United States Patent Application Publication US 2009/0081658 A1 - sequence listing, part 3

SEQ ID NO: 4253 - DNA, 1611 bp, Homo sapiens
gacccccccaagacacatatgacccaccaccccatctctgaccatgaggccaccctgaggtgctgggccctgggcttctaccctgcggagatcacactgacctggcagcgggatggggaggaccagacccaggacacggagctcgtggagaccaggcctgcaggggatggaaccttccagaagtgggcggctgtggtggtgccttctggagaggagcagagatacacctgccatgtgcagcatgagggtctgcccaagcccctcaccctgagatgggagctgtcttcccagcccaccatccccatcgtgggcatcattgctggcctggttctccttggagctgtgatcactggagctgtggtcgctgccgtgatgtggaggaggaagagctcaggtggagaaggggtgaagggtggggtctgagatttcttgtctcactgagggttccaagccccagctagaaatgtgccctgtctcattactgggaagcaccgtccacaatcatgggcctacccagtctgggccctgtgtgccagcacttactcttttgtaaagcacctgttaaaatgaaggacagatttatcaccttgattacggcggtgatgggacctgatcccagcagtcacaagtcacaggggaaggtccctgaggacagacctcaggagggctattggtccaggacccacacctgctttcttcatgtttcctgatcccgccctgggtctgcagtcacacatttctggaaacttctctggggtccaagactaggaggttcctctaggaccttaaggccctggctcctttctggtatctcacaggacattttcttctcacagatagaaaaggagggagttacactcaggctgcaagtaagtatgaaggaggctgatgcctgaggtccttgggatattgtgtttgggagcccatgggggagcccacccacctcacaattcctcctctagccacatcttctgtgggatctgaccaggttctgtttttgttctaccccaggcagtgacagtgcccagggctctgatgtgtccctcacagcttgtaaaggtgagagcttggaggacctaatgtgtgttgggtgttgggcggaacagtggacacagctgtgctatggggtttctttgcattggatgtattgagcatgcgatgggctgtttaaggtgtgacccctcactgtgatggatatgaatttgttcatgaatatttttttctatagtgtgagacagctgccttgtgtgggactgagaggcaagagttgttcctgcccttccctttgtgacttgaagaaccctgactttgtttctgcaaaggcacctgcatgtgtctgtgttcgtgtaggcataatgtgaggaggtggggagaccaccccacccccatgtccaccatgaccctcttcccacgctgacctgtgctccctccccaatcatctttcctgttccagagaggtggggctgaggtgtctccatctctgtctcaacttcatggtgcactgagctgtaacttcttccttccctattaaaattagaaccttagtataaatttactttctcaaattcttgccatgagaggttgatgagttaattaaaggagaagattcct

SEQ ID NO: 4254 - protein, 134 aa, Homo sapiens; identical to SEQ ID NO: 4170

SEQ ID NO: 4255 - DNA, 909 bp, Homo sapiens
gacccccccaagacacatatgacccaccaccccatctctgaccatgaggccaccctgaggtgctgggccctgggcttctaccctgcggagatcacactgacctggcagcgggatggggaggaccagacccaggacacggagctcgtggagaccaggcctgcaggggatggaaccttccagaagtgggcggctgtggtggtgccttctggagaggagcagagatacacctgccatgtgcagcatgagggtctgcccaagcccctcaccctgagatgggagctgtcttcccagcccaccatccccatcgtgggcatcattgctggcctggttctccttggagctgtgatcactggagctgtggtcgctgccgtgatgtggaggaggaagagctcagatagaaaaggagggagttacactcaggctgcaagcagtgacagtgcccagggctctgatgtgtccctcacagcttgtaaagtgtgagacagctgccttgtgtgggactgagaggcaagagttgttcctgcccttccctttgtgacttgaagaaccctgactttgtttctgcaaaggcacctgcatgtgtctgtgttcgtgtaggcataatgtgaggaggtggggagaccaccccacccccatgtccaccatgaccctcttcccacgctgacctgtgctccctccccaatcatctttcctgttccagagaggtggggctgaggtgtctccatctctgtctcaacttcatggtgcactgagctgtaacttcttccttccctattaaaattagaaccttagtataaatttactttctcaaattcttgccatgagaggttgatgagttaattaaaggagaagattcctaaaatttgagagacaaaataaatggaagacatgagaaccttccagagtcca

SEQ ID NO: 4256 - protein, 153 aa, Homo sapiens; identical to SEQ ID NO: 4248

SEQ ID NO: 4257 - DNA, 1662 bp, Homo sapiens
gacccccccaagacacatatgacccaccaccccatctctgaccatgaggccaccctgaggtgctgggccctgggcttctaccctgcggagatcacactgacctggcagcgggatggggaggaccagacccaggacacggagctcgtggagaccaggcctgcaggggatggaaccttccagaagtgggcggctgtggtggtgccttctggagaggagcagagatacacctgccatgtgcagcatgagggtctgcccaagcccctcaccctgagatgggagctgtcttcccagcccaccatccccatcgtgggcatcattgctggcctggttctccttggagctgtgatcactggagctgtggtcgctgccgtgatgtggaggaggaagagctcaggtggagaaggggtgaagggtggggtctgagatttcttgtctcactgagggttccaagccccagctagaaatgtgccctgtctcattactgggaagcaccgtccacaatcatgggcctacccagtctgggccctgtgtgccagcacttactcttttgtaaagcacctgttaaaatgaaggacagatttatcaccttgattacggcggtgatgggacctgatcccagcagtcacaagtcacaggggaaggtccctgaggacagacctcaggagggctattggtccaggacccacacctgctttcttcatgtttcctgatcccgccctgggtctgcagtcacacatttctggaaacttctctggggtccaagactaggaggttcctctaggaccttaaggccctggctcctttctggtatctcacaggacattttcttctcacagatagaaaaggagggagttacactcaggctgcaagtaagtatgaaggaggctgatgcctgaggtccttgggatattgtgtttgggagcccatgggggagcccacccacctcacaattcctcctctagccacatcttctgtgggatctgaccaggttctgtttttgttctaccccaggcagtgacagtgcccagggctctgatgtgtccctcacagcttgtaaaggtgagagcttggaggacctaatgtgtgttgggtgttgggcggaacagtggacacagctgtgctatggggtttctttgcattggatgtattgagcatgcgatgggctgtttaaggtgtgacccctcactgtgatggatatgaatttgttcatgaatatttttttctatagtgtgagacagctgccttgtgtgggactgagaggcaagagttgttcctgcccttccctttgtgacttgaagaaccctgactttgtttctgcaaaggcacctgcatgtgtctgtgttcgtgtaggcataatgtgaggaggtggggagaccaccccacccccatgtccaccatgaccctcttcccacgctgacctgtgctccctccccaatcatctttcctgttccagagaggtggggctgaggtgtctccatctctgtctcaacttcatggtgcactgagctgtaacttcttccttccctattaaaattagaaccttagtataaatttactttctcaaattcttgccatgagaggttgatgagttaattaaaggagaagattcctaaaatttgagagacaaaataaatggaagacatgagaaccttccagagtcca

SEQ ID NO: 4258 - protein, 134 aa, Homo sapiens; identical to SEQ ID NO: 4170

SEQ ID NO: 4259 - DNA, 1037 bp, Homo sapiens
cccatctctgaccatgaggccaccctgaggtgctgggccctgggcttctaccctgcggagatcacactgacctggcagcgggatggggaggaccagacccaggacacggagctcgtggagaccaggcctgcaggggatggaaccttccagaagtgggcggctgtggtggtgccttctggagaggagcagagatacacctgccatgtgcagcatgagggtctgcccaagcccctcaccctgagatggggtaaggagggagatgggggtgtcatgtctcttagggaaagcaggagcctctctggagacctttagcagggtcagggcccctcaccttcccctcttttcccagagctgtcttcccagcccaccatccccatcgtgggcatcattgctggcctggttctccttggagctgtgatcactggagctgtggtcgctgccgtgatgtggaggaggaagagctcagtcacacatttctggaaacttctctggggtccaagactaggaggttcctctaggaccttaaggccctggctcctttctggtatctcacaggacattttcttctcacagatagaaaaggagggagttacactcaggctgcaagcagtgacagtgcccagggctctgatgtgtccctcacagcttgtaaagtgtgagacagctgccttgtgtgggactgagaggcaagagttgttcctgcccttccctttgtgacttgaagaaccctgactttgtttctgcaaaggcacctgcatgtgtctgtgttcgtgtaggcataatgtgaggaggtggggagaccaccccacccccatgtccaccatgaccctcttcccacgctgacctgtgctccctccccaatcatctttcctgttccagagaggtggggctgaggtgtctccatctctgtctcaacttcatggtgcactgagctgtaacttcttccttccctattaaaattagaaccttagtataaatttactttctcaaattcttgccatgagaggttgatgagttaattaaaggagaagattcct

SEQ ID NO: 4260 - protein, 90 aa, Homo sapiens
MWRRKSSVTHFWKLLWGPRLGGSSRTLRPWLLSGISQDIFFSQIEKEGVTLRLQAVTVPRALMCPSQLVKCETAALCGTERQELFLPFPL

SEQ ID NO: 4261 - DNA, 1088 bp, Homo sapiens
cccatctctgaccatgaggccaccctgaggtgctgggccctgggcttctaccctgcggagatcacactgacctggcagcgggatggggaggaccagacccaggacacggagctcgtggagaccaggcctgcaggggatggaaccttccagaagtgggcggctgtggtggtgccttctggagaggagcagagatacacctgccatgtgcagcatgagggtctgcccaagcccctcaccctgagatggggtaaggagggagatgggggtgtcatgtctcttagggaaagcaggagcctctctggagacctttagcagggtcagggcccctcaccttcccctcttttcccagagctgtcttcccagcccaccatccccatcgtgggcatcattgctggcctggttctccttggagctgtgatcactggagctgtggtcgctgccgtgatgtggaggaggaagagctcagtcacacatttctggaaacttctctggggtccaagactaggaggttcctctaggaccttaaggccctggctcctttctggtatctcacaggacattttcttctcacagatagaaaaggagggagttacactcaggctgcaagcagtgacagtgcccagggctctgatgtgtccctcacagcttgtaaagtgtgagacagctgccttgtgtgggactgagaggcaagagttgttcctgcccttccctttgtgacttgaagaaccctgactttgtttctgcaaaggcacctgcatgtgtctgtgttcgtgtaggcataatgtgaggaggtggggagaccaccccacccccatgtccaccatgaccctcttcccacgctgacctgtgctccctccccaatcatctttcctgttccagagaggtggggctgaggtgtctccatctctgtctcaacttcatggtgcactgagctgtaacttcttccttccctattaaaattagaaccttagtataaatttactttctcaaattcttgccatgagaggttgatgagttaattaaaggagaagattcctaaaatttgagagacaaaataaatggaagacatgagaaccttccagagtcca

SEQ ID NO: 4262 - protein, 90 aa, Homo sapiens; identical to SEQ ID NO: 4260

SEQ ID NO: 4263 - DNA, 785 bp, Homo sapiens
tctctgaccatgaggccaccctgaggtgctgggccctgggcttctaccctgcggagatcacactgacctggcagcgggatggggaggaccagacccaggacacggagctcgtggagaccaggcctgcaggggatggaaccttccagaagtgggcggctgtggtggtgccttctggagaggagcagagatacaccctgagatgggagctgtcttcccagcccaccatccccatcgtgggcatcattgctggcctggttctccttggagctgtgatcactggagctgtggtcgctgccgtgatgtggaggaggaagagctcagatagaaaaggagggagttacactcaggctgcaagcagtgacagtgcccagggctctgatgtgtccctcacagcttgtaaagtgtgagacagctgccttgtgtgggactgagaggcaagagttgttcctgcccttccctttgtgacttgaagaaccctgactttgtttctgcaaaggcacctgcatgtgtctgtgttcgtgtaggcataatgtgaggaggtggggagaccaccccacccccatgtccaccatgaccctcttcccacgctgacctgtgctccctccccaatcatctttcctgttccagagaggtggggctgaggtgtctccatctctgtctcaacttcatggtgcactgagctgtaacttcttccttccctattaaaattagaaccttagtataaatttactttctcaaattcttgccatgagaggttgatgagttaattaaaggagaagattcct

SEQ ID NO: 4264 - protein, 41 aa, Homo sapiens
MGAVFPAHHPHRGHHCWPGSPWSCDHWSCGRCRDVEEEELR

SEQ ID NO: 4265 - DNA, 836 bp, Homo sapiens
tctctgaccatgaggccaccctgaggtgctgggccctgggcttctaccctgcggagatcacactgacctggcagcgggatggggaggaccagacccaggacacggagctcgtggagaccaggcctgcaggggatggaaccttccagaagtgggcggctgtggtggtgccttctggagaggagcagagatacaccctgagatgggagctgtcttcccagcccaccatccccatcgtgggcatcattgctggcctggttctccttggagctgtgatcactggagctgtggtcgctgccgtgatgtggaggaggaagagctcagatagaaaaggagggagttacactcaggctgcaagcagtgacagtgcccagggctctgatgtgtccctcacagcttgtaaagtgtgagacagctgccttgtgtgggactgagaggcaagagttgttcctgcccttccctttgtgacttgaagaaccctgactttgtttctgcaaaggcacctgcatgtgtctgtgttcgtgtaggcataatgtgaggaggtggggagaccaccccacccccatgtccaccatgaccctcttcccacgctgacctgtgctccctccccaatcatctttcctgttccagagaggtggggctgaggtgtctccatctctgtctcaacttcatggtgcactgagctgtaacttcttccttccctattaaaattagaaccttagtataaatttactttctcaaattcttgccatgagaggttgatgagttaattaaaggagaagattcctaaaatttgagagacaaaataaatggaagacatgagaaccttccagagtcca

SEQ ID NO: 4266 - protein, 41 aa, Homo sapiens; identical to SEQ ID NO: 4264

SEQ ID NO: 4267 - DNA, 502 bp, Homo sapiens
ctctggggtccaagactaggaggttcctctaggaccttaaggccctggctcctttctggtatctcacaggacattttcttctcacagatagaaaaggagggagttacactcaggctgcaagcagtgacagtgcccagggctctgatgtgtccctcacagcttgtaaagtgtgagacagctgccttgtgtgggactgagaggcaagagttgttcctgcccttccctttgtgacttgaagaaccctgactttgtttctgcaaaggcacctgcatgtgtctgtgttcgtgtaggcataatgtgaggaggtggggagaccaccccacccccatgtccaccatgaccctcttcccacgctgacctgtgctccctccccaatcatctttcctgttccagagaggtggggctgaggtgtctccatctctgtctcaacttcatggtgcactgagctgtaacttcttccttccctattaaaattagaaccttagtataaatttactttctc

SEQ ID NO: 4268 - protein, 46 aa, Homo sapiens
DLKALAPFWYLTGHFLLTDRKGGSYTQAASSDSAQGSDVSLTACKV

SEQ ID NO: 4269 - DNA, 822 bp, Homo sapiens
atgattgtaaaggcattattatacggcaccagtcgtgggactctttggtctagctactgtattttctcaactttcttgcaactcatcaaagagaacattaatattaaaggcatttgcaaaaaaaatctgagatattgttgtatctccattctctgtctcaaagttttattcattactttacaaaagataattttaaagtattaaagaaaattagtcagatacaagaagtatttgatttacaaaatcctgaaacaataatgttaattgtggtgccagctacttgggaggctgaaggaggagcattgatggcatgagcccaggaggttgaggcttcagtgaatcatgagcatgccactgcattccagccagggcaacagagtgttactttgtctaaaaataactaactagctaactaactaactaaataaataaataatggaggcagtgcacgagccctggtgaagggcactttggctgcattgagcacttgcagatttgaggtgattacattctgtacgttacttaacatgcatactgtacatacttaacatgcatataaattctttgatactcctccttgcagaggtgcagcttcattcccttcctgtgagtgtggcctgaacttaatgactcacttacagactgatagagtaatgttgagataatagtttgtgactctgggtgtggtggtgcatgcctgtaatcccagttgctcaggaggctgaggcaggagaatcacttgaacctggaagtcggaggttgcagtgagccaagatccagccactgcattccagcctgggtgacagggtgagactctgtctc

SEQ ID NO: 4270 - protein, 67 aa, Homo sapiens [sequence omitted]

SEQ ID NO: 4271 - DNA, 646 bp, Homo sapiens
cagagaggaaagaaccctgggaacgggaggcgaagggataatgagctggggatgggagcagtcgcaggaagaatcctctgcctggagccggcaggctccaacccctcagcttgagagtcaggagccccatagtccccacagcaataggaagcaccagctcctggtcccgaaaaaaggagggccccaactccagggactgcggcccgccctggagctgagaacacgcggactccagggagaggacagggcttcagggacccgagagccgctctgagcaccgggggatgtgactgcctcagcggcagagctggaagggccctcgaatgccattcacaggaacagcccaggaacccagggacttcagaagggctggtttgtccgaaaagtgagaggaggcggaggagagagcctgcgaggtcaagctgcagagaacatgagcttctacctccagatgtgccagggtgcatctcaataaacttggattttggccaggcgcggtggctcaggcctgtaatcccagctctggaagctgaaggatagcttgagcccaggagttcgaggctgcagtgagctatgatctcaccactacactccagcctgggtgacagcaagagatcttgtctcagaaataaataaataaaattta

SEQ ID NO: 4272 - protein, 77 aa, Homo sapiens; identical to SEQ ID NO: 485

SEQ ID NO: 4273 - DNA, 3269 bp, Homo sapiens
aacgtcttccaagggagattgcgtctccactttcaccctggtactgagaggttgagcacaaaattggtaaccaatgctgcgcttccagcaaattttcccaccagcacccaatcctgggatatttattctctttgtctcacatcctacaggaacgcagtcgcggggtatatccccctgaaaaccattggcctggggtacatcatctaaagatcctaggattgctgcaggtcagcagtctccactggaaaaaaagatcttgcatgtatttcaagtcctctgatgaatcatgtgatctactagaccctgaagatacagtgaagagcaaaagaacacagatgaaatgagaaacaaaaacgatggagaaaaccaaaaaaggggacacatgggatccaggcaataggagagccagcataagagagagccagagggatgcccaggatgaggtgaagacgatcttggaaatcagcccagatgtgcatgcaccagtccacgtgtggcaggaccaagggaagtgtcttcacaaagatgaggctttgatttgttggagaaactgttaccagaaaaacaggtcccgatcccgaccccaaaagagtattcttggatcttgcacaggaaggaattaaagggaagtaagaagttacagctcagtgcaccatgaagttgagacagagatggagacatcccagcaccacttctctggaacaggaaaggtgatcggggaaggaatgtagcctgagagtagctccctccttttctatctgcgggaagaaaacgtcctgtgagaggccaggaaggtagcagggccatgaggtcctagaggaacctcctagtcttggaaccttgagaagtttccagaaatgtgtgactgcaaaccaagggcaggatcaggaaaaacaaggaaagcagatgtgggtcctggaccaactgccctcctaaggtctgtcctcagcagggaccttcccctgacctgtgattactggggtcagatccccatcactacaatcatcaagcagtgaccacagctccagtgaccacagctccaaggagaaccagcccgggagatctacaggagatcgagcaggctccccatggcccctggtacccgcgcgctgcagcgtctccttcccgttctccaggtgtctgcggagccactccatgcaggtgccctccaggcatactgctcatacccgcggaggagacgcccgtcgggccccaggtcgcagccaaacattccctggaggatgtgataccctggcccagttcccgcggtcagccccgcccaccgagccctggcccggcccctagcaacctgcggagattttggcctcaactgaagatgaaaccagtttccaatgatcagaaatccaggagaggtttccctgagtgcttctggctcagggcctctcacaaggttgcagtccagttgtcagcctaggcctgcatcatctgaggacttcactgagcaaggccatagaggagtcctcgagctacaattggccatcagaggagtcccctgtctcctaggaatgtcctgccttagtgtcactggggtacactcctttggaaaccagaacctcgtatcctgcacagcccagtgttgggagataaaatatgcgaaataccccattgagtgaatctaagagattggacatggagccaaacctgcttccgccttttgatttctggacacacatgttcttcctattgagaacacagaactctagagacgtctctgattcaaacaatgcactgtgtcctgaaagatggcacccacccctcagagtgcttcctccaggctggcactgagttgtgcctgtagaagacctgtccagccttccttgtggctggcagctcctgggtagtgcagatggtgataggattagtggaacccacagccgtggaaacactgaaactttccctgcaaagtgggtccttcaggcagataatgggctaggagcactgcctagcctgcagaccaggaatgtcaacagcacccagagagtggtgctggctgtgtctgagagcaggacaggaaaacccacccatagaatcggtacctaaccctgtgaagatgaaactctggcccttccaggttggaagtagctaaatgtagtcaacttgttacttagtgggtagtcatgtaaagaaatagtgccccactagggcacatcatgggcctcaattgctgatgagttggacattcagaggtggcagcagctggatctgccttggtgtggggaagtcagtgctgctggccccttacggagcctcatgcctgccactgtggttgctccattcatgcactcatcctaccaggcctgggctgacccatggtgaaagctggctaactgccatttgtctgtttggtagttcagtgccacttcagacttgggtgttttctgtgggtgtcagcaagggattcaagctcaacccaggtggactgttttcacctgatgatgaatgctgttgggcctgtaccatctatgactttgtgggtcacacaggcacttggaaccccgtagttgcttggtatcccgtggtcaaacattctattgaatcaggacaaggaacactaaaagttgcttctaacagggggcatgtgtctctgctgtggatgacatgatcttactccagaatcccaggccctccactgtgactctcccactggtgcttggttcagctccatcctgtgtctttccccaccactggcaccaccagccccaggggtctgagggatggtggctgcttgtaccatggcctggatctgctgcagggtcctttcctgtgtaggccccacttgaagctggcatcctcctatgtcacctagactgtgggccaaagcaaaatgtctagatgtggaatgtggtgttgttataattcaaagaggctcaccaagcagtgtgcttccttgcttctggtgaggatgcaagatgcaacagtttttcttttaccttggaggggacacacctgcattcccctaaacacttggcacttgttcacccataaaacttcacttcagtgcccacctttgaagctgtataaggtttatcttcaccttgtggggtgcgtgtgttttgcaaaggactacagtgcactttcttcctgctgctcatctactccagtcaacatgaagttgtcaatgaaatgtgctgatttaatatcctaaaggatatgcagtatgtccagtacagtcttaagcctatactatagagggcacaggtgttacaatagccctgaggcaaacaataaataaatgtgtcgttgattcc

SEQ ID NO: 4274 - protein, 93 aa, Homo sapiens
MIRNPGEVSLSASGSGPLTRLQSSCQPRPASSEDFTEQGHRGVLELQLAIRGVPCLLGMSCLSVTGVHSFGNQNLVSCTAQCWEIKYAKYPIE

SEQ ID NO: 4275 - DNA, 2429 bp, Homo sapiens
aattgcgaaccgtgtctcgggagcgttagagatggagactaacgtcttccaagggagattgcgtctccactttcaccctggtactgagaggttgagcacaaaattggaacgcagtcgcggggtatatccccctgaaaaccgtacgttgccaaataatgatttctttggattagagaactacaactcccctgggtcctgagccggtatttcccttttgcggctgcaccgtagttaaaaacaaagctaagtgttctgggacgtatagttctagcgttccttgggtcccgctggcgagcgtgggctttctgcagctcgcaaccggcctcgtgctttgcggacggttcactgcgcttggaaagggattggcctggggtacatcatctaaagatcctaggattgctgcaggtcagcagtctccactggaaaaaaagatcttgcatgtatttcaagtcctctgatgaatcatgtgatctactagaccctgaagatacagtgaagagcaaaagaacacagatgaaatgagaaacaaaaacgatggagaaaaccaaaaaaggggacacatgggatccaggcaataggagagccagcataagagagagccagagggatgcccaggatgaggtgaagacgatcttggaaatcagcccagatgtgcatgcaccagtccacgtgtggcaggaccaagggaagtgtcttcacaaagatgaggggtacactcctttggaaaccagaacctcgtatcctgcacagcccagtgttgggagataaaatatgcgaaataccccattgagtgaatctaagagattggacatggagccaaacctgcttccgccttttgatttctggacacacatgttcttcctattgagaacacagaactctagagacgtctctgattcaaacaatgcactgtgtcctgaaagatggcacccacccctcagagtgcttcctccaggctggcactgagttgtgcctgtagaagacctgtccagccttccttgtggctggcagctcctgggtagtgcagatggtgataggattagtggaacccacagccgtggaaacactgaaactttccctgcaaagtgggtccttcaggcagataatgggctaggagcactgcctagcctgcagaccaggaatgtcaacagcacccagagagtggtgctggctgtgtctgagagcaggacaggaaaacccacccatagaatcggtacctaaccctgtgaagatgaaactctggcccttccaggttggaagtagctaaatgtagtcaacttgttacttagtgggtagtcatgtaaagaaatagtgccccactagggcacatcatgggcctcaattgctgatgagttggacattcagaggtggcagcagctggatctgccttggtgtggggaagtcagtgctgctggccccttacggagcctcatgcctgccactgtggttgctccattcatgcactcatcctaccaggcctgggctgacccatggtgaaagctggctaactgccatttgtctgtttggtagttcagtgccacttcagacttgggtgttttctgtgggtgtcagcaagggattcaagctcaacccaggtggactgttttcacctgatgatgaatgctgttgggcctgtaccatctatgactttgtgggtcacacaggcacttggaaccccgtagttgcttggtatcccgtggtcaaacattctattgaatcaggacaaggaacactaaaagttgcttctaacagggggcatgtgtctctgctgtggatgacatgatcttactccagaatcccaggccctccactgtgactctcccactggtgcttggttcagctccatcctgtgtctttccccaccactggcaccaccagccccaggggtctgagggatggtggctgcttgtaccatggcctggatctgctgcagggtcctttcctgtgtaggccccacttgaagctggcatcctcctatgtcacctagactgtgggccaaagcaaaatgtctagatgtggaatgtggtgttgttataattcaaagaggctcaccaagcagtgtgcttccttgcttctggtgaggatgcaagatgcaacagtttttcttttaccttggaggggacacacctgcattcccctaaacacttggcacttgttcacccataaaacttcacttcagtgcccacctttgaagctgtataaggtttatcttcaccttgtggggtgcgtgtgttttgcaaaggactacagtgcactttcttcctgctgctcatctactccagtcaacatgaagttgtcaatgaaatgtgctgatttaatatcctaaaggatatgcagtatgtccagtacagtcttaagcctatactatagagggcacaggtgttacaatagccctgaggcaaacaataaataaatgtgtcgttgattcc

SEQ ID NO: 4276 - protein, 77 aa, Homo sapiens
MEKTKKGDTWDPGNRRASIRESQRDAQDEVKTILEISPDVHAPVHVWQDQGKCLHKDEGYTPLETRTSYPAQPSVGR

SEQ ID NO: 4277 - DNA, 1175 bp, Homo sapiens
acgtcttccaagggagattgcgtctccactttcaccctggtactgagaggttgagcacaaaattggtaaccaatgctgcgcttccagcaaattttcccaccagcacccaatcctgggatatttattctctttgtctcacatcctacaggaacgcagtcgcggggtatatccccctgaaaaccgtacgttgccaaataatgatttctttggattagagaactacaactcccctgggtcctgagccggtatttcccttttgcggctgcaccgtagttaaaaacaaagctaagtgttctgggacgtatagttctagcgttccttgggtcccgctggcgagcgtgggctttctgcagctcgcaaccggcctcgtgctttgcggacggttcactgcgcttggaaagggattggcctggggtacatcatctaaagatcctaggattgctgcaggtcagcagtctccactggaaaaaaagatcttggctttgatttgttggagaaactgttaccagaaaaacaggtcccgatcccgaccccaaaagagtattcttggatcttgcacaggaaggaattaaaggggtacactcctttggaaaccagaacctcgtatcctgcacagcccagtgttgggagataaaatatgcgaaataccccattgagtgaatctaagagattggacatggagccaaacctgcttccgccttttgatttctggacacacatgttcttcctattgagaacacagaactctagagacgtctctgattcaaacaatgcactgtgtcctgaaagatggcacccacccctcagagtgcttcctccaggctggcactgagttgtgcctgtagaagacctgtccagccttccttgtggctggcagctcctgggtagtgcagatggtgataggattagtggaacccacagccgtggaaacactgaaactttccctgcaaagtgggtccttcaggcagataatgggctaggagcactgcctagcctgcagaccaggaatgtcaacagcacccagagagtggtgctggctgtgtctgagagcaggacaggaaaacccacccatagaatcggtacctaaccctgtgaagatgaaactctggcccttccaggttggaagtagctaaatgtagtcaacttgttacttagtgggtagtcatgtaaagaaa

SEQ ID NO: 4278 - protein, 64 aa, Homo sapiens
MRNTPLSESKRLDMEPNLLPPFDFWTHMFFLLRTQNSRDVSDSNNALCPERWHPPLRVLPPGWH

SEQ ID NO: 4279 - DNA, 806 bp, Homo sapiens
agaactacaactcccctgggtcctgagccggtatttcccttttgcggctgcaccgtagttaaaaacaaagctaagtgttctgggacgtatagttctagcgttccttgggtcccgctggcgagcgtgggctttctgcagctcgcaaccggcctcgtgctttgcggacggttcactgcgcttggaaagggattggcctggggtacatcatctaaagatcctaggattgctgcaggtcagcagtctccactggaaaaaaagatcttggggtacactcctttggaaaccagaacctcgtatcctgcacagcccagtgttgggagataaaatatgcgaaataccccattgagtgaatctaagagattggacatggagccaaacctgcttccgccttttgatttctggacacacatgttcttcctattgagaacacagaactctagagacgtctctgattcaaacaatgcactgtgtcctgaaagatggcacccacccctcagagtgcttcctccaggctggcactgagttgtgcctgtagaagacctgtccagccttccttgtggctggcagctcctgggtagtgcagatggtgataggattagtggaacccacagccgtggaaacactgaaactttccctgcaaagtgggtccttcaggcagataatgggctaggagcactgcctagcctgcagaccaggaatgtcaacagcacccagagagtggtgctggctgtgtctgagagcaggacaggaaaacccacccatagaatcggtacctaaccctgtgaagatgaaactctggcccttcc

SEQ ID NO: 4280 - protein, 64 aa, Homo sapiens; identical to SEQ ID NO: 4278

SEQ ID NO: 4281 - DNA, 1308 bp, Homo sapiens
ccccagacgccgacgatggggtcatggcgccccgaaccctcctcctgctgctctcggggaccctggccctggccgagacctgggcgggctcccactccatgaggtatttcagcaccgccgtttcctggccgggccgcggggagcccagcttcattgccgtgggctacgtggacgacacgcagttcgtgcgggtcgacagtgacgccgtgagtctgaggatgaagacgcgggcgcggtgggtggagcaggaggggccggagtattgggacctacagacactgggcgccaaggcccaggcacagactgaccgagtgaacctgcggaccctgctccgctactacaaccagagcgaggcggaccccccccaagacacacgtgacccacccccctctctgaacatgaggcataacgaggtcctgggttctgggcttctaccctgcggagatcacattgacctggcagcgggatggggaggaccagacccaggacatggagctcgtggagaccaggcccacaggggatggaaccttccagaagtgggcggttgtggtagtgccttctggagaggaacagagatacacatgccatgtgcagcacaaggggctgcccaagcccctcatcctgagatgggagccctctccccagcccaccatccccattgtgggtatcattgctggcctggttctccttggagctgtggtcactggagctgtggtcactgctgtgatgtggaggaagaagagctcagtcacacatttctggaaacttctcaaggttccaagactaggaggttcctctaggacctcatggccctgctaccttcctggcctctcacaggacgttttcttcccgcagatagaaaaggagggagctactctcaggctgcaatgtgagacagctgccttgtgtgggactgagaggcaagatttgttcatgccttccctttgtgacttcaagaaccctgacttctctttctgcaaaggcatctgaatgtgtctgtgtccctataggcataatgtgaggtggtggggagaccagcccacacccgtgtccaccatgaccctgttccccacactgacctacattccttccccgatcacctttcctgttccagagaagtggtgctgggatgtctccatctctgtctcaacttcatggtgcactgagctgtaacttcttacttccctattaaaattagaatctgagtataaatttacttttttcaaattatttccatgacgggttgatgggttaattaaaggagaagattcctaaaatttgagagacaaaataaatggaagacatgag

SEQ ID NO: 4282 - protein, 258 aa, Homo sapiens
MAPRTLLLLLSGTLALAETWAGSHSMRYFSTAVSWPGRGEPSFIAVGYVDDTQFVRVDSDAVSLRMKTRARWVEQEGPEYWDLQTLGAKAQAQTDRVNLRTLLRYYNQSEADPPQDTRDPPPSLNMRHNEVLGSGLLPCGDHIDLAAGWGGPDPGHGARGDQAHRGWNLPEVGGCGSAFWRGTEIHMPCAAQGAAQAPHPEMGALSPAHHPHCGYHCWPGSPWSCGHWSCGHCCDVEEEELSHTFLETSQGSKTRRFL

SEQ ID NO: 4283 - DNA, 857 bp, Homo sapiens
cgatggggtcatggcgccccgaaccctcctcctgctgctctcggggaccctggccctggccgagacctgggcggaccccccccaagacacacgtgacccacccccctctctgaacatgaggcataacgaggtcctgggttctgggcttctaccctgcggagatcacattgacctggcagcgggatggggaggaccagacccaggacatggagctcgtggagaccaggcccacaggggatggaaccttccagaagtgggcggttgtggtagtgccttctggagaggaacagagatacacatgccatgtgcagcacaaggggctgcccaagcccctcatcctgagatgggtcacacatttctggaaacttctcaaggttccaagactaggaggttcctctaggacctcatggccctgctaccttcctggcctctcacaggacgttttcttcccgcagatagaaaaggagggagctactctcaggctgcaagcagccaaagtgcccagggctctgatgtgtctctcacggcttgtaaagtgtgagacagctgccttgtgtgggactgagaggcaagatttgttcatgccttccctttgtgacttcaagaaccctgacttctctttctgcaaaggcatctgaatgtgtctgtgtccctataggcataatgtgaggtggtggggagaccagcccacacccgtgtccaccatgaccctgttccccacactgacctacattccttccccgatcacctttcctgttccagagaagtggtgctgggatgtctccatctctgtctcaacttcatggtgcactgagctgtaacttcttacttccctattaaaattagaatctgagtat

SEQ ID NO: 4284 - protein, 143 aa, Homo sapiens
MELVETRPTGDGTFQKWAVVVVPSGEEQRYTCHVQHKGLPKPLILRWVTHFWKLLKVPRLGGSSRTSWPCYLPGLSQDVFFPQIEKEGATLRLQAAKVPRALMCLSRLVKCETAALCGTERQDLFMPSLCDFKNPDFSFCKGI

SEQ ID NO: 4285 - DNA, 2095 bp, Homo sapiens
tatagcttcaatgatttcacctgggccaagattttggttttttttgatgttatttgtttgaactgctgcctggggcttagaaaagtgacttggatattttgtcaaaatggattttctttgatggaatgtgaaatccgtaaacactctgctttcctgctgtatccccagagcaggttgagtaccttgcacttcttctcagcacttcgctagaagtggtagaagatttggagttagggcctccctcaatccctaccctttctttaattcagaggatcacaaactgttgggagaagagtggtatcttgggcctctagctgatctgatgaatattaatatccaatgtcctgtagtgaagtcatgtgtgcgtgtaacatcacttcttcacgcagtgtcataggaaagtgggttcctggaccccaggttaagagcctaagcactaaaggcacagagctagagctctaggaggggagggatggctggggtggaacctcgtcttgtcatttagtcctggggccttttcactccttacatggtgggtggtgggcgtctggcaggtgccgatgttgatggagtcaagggagggaactagccgggacagggaaaaacagggttggagagataattaaggtggacgttattttttctgagcgtaagtcgtggctggaaatctggagagcctgaaagagtatccccctacccaaacctgttttttccttttccctcaagcctcatttggccacaggcccagtgtcaacaccagggggcgccacagaccatgaaggcaccgtgcagctgggattgtttgtggtcggctactgggtccctcagtttcttaatctgtgaaatggtgaggacattacagcatttacctctggggcgggtttctcaacagcagcactattaacaatttgggacagagaatcttgtggagtggtctgtcctgtgcattgtgggaggtttgccagcaacaccccactcaccccctcccaccaatccccatgtgacaaccgaaaatgtcccaggatttttaggtctcccttgggtctagaagctgcacttaggcattttcccacctgacacttgagttcatctctgctttggtccacataaggccactttaaaaaaatgttgtttctttaaagattctaaccatcttttaaacaaatccattttcttcctctatttctgcattcagttaatccttccaaaccctttgtttagtatatcttgaaatgtatcaattcctgttctagtaattaacatatgtgacttgcatgatatctgctatgacccttagtagagctctgattcctttagcacagggaatgtgttctcgattctgctctggatgatgtaaatcaatttattttactttacttgtctgggatgttgctcctcatctgtaagatgtaaatgtggatatggcttggattactaagtggttttatttcttaattcacctgacatttgttgtgtgcctgctgcaagtcaaatacatggcatggtattgtttccttgttcacaccacagcaaatgagaaaatgagacattatagccaggtgtggcggcacaggcttgtggtcctagctactcggaaggctgaggcaggagaattgctccagcccaggagtttgaggttacagtaaggtatgatatcaccattgcatttcaacctgggcaacagaccctgtctctgaaaaaagggaaaaagaccttgtgagctgtctacgtgtactctatgtctcaggagactcatatcctgtaatttttctaaatggcgtctccatgtggtctttcatgaatgtttgtctggtattctctatccttttactttcaacttttctttaccttctactgaaattatgtcttttgtaaacagcccatgattatttatttagttatttatttttacccccctgcactatttgtcttgtaattggagtgtctgagtccattatgtttaatgtaattattgacctcattgggtttaagtctgtccattgtcatttgctgccttctaatattatctctttcttgctcaactatttttcttatgttaccttctttagatgaataaaaacctttgcattattgt

SEQ ID NO: 4286 - protein, 42 aa, Homo sapiens
MKAPCSWDCLWSATGSLSFLICEMVRTLQHLPLGRVSQQQHY

SEQ ID NO: 4287 - DNA, 3215 bp, Homo sapiens
tatatccccctgaaaaccgtacgttgccaaataatgatttctttggattagagaactacaactcccctgggtcctgagccggtatttcccttttgcggctgcaccgtagttaaaaacaaagctaagtgttctgggacgtatagttctagcgttccttgggtcccgctggcgagcgtgggctttctgcagctcgcaaccggcctcgtgctttgcggacggttcactgcgcttggaaaggggtgagtcggctttttgagggacagcaagtggtgagagtgaaggcccgaggaatgcttagtcccacgggacgaaaggaagcagggatgaagtggtacacttgagaaggggttcaggactttggaggtggtggaacagaggagcttggggcttcctctccttcgactcctgccagataagtgaggctagcagtagtcaagaaagctcattaagtaggatttcataagacttaggtcgagtttggcttttagttgtgcctgccgcctatcgaactcttaattcattatgtcatccgttaagtggacagctgacatttccctgatcttttataaaacatgagaataagtatctttgggaaatctttctattttcattaatctgtaacttatattccaagtagaaactttccctgaaggggcagcttgtagttgtttactagtttcctgctagccctcccaccaccatccactctgatagctgtgctaagttcattcatataaaagttctggagccatcactgttttctcctatgaaggacacaagctgtagtcttttcgctgggagaggctcccatctgcctttctctgtaataatggagagaacgccatagtgaaagggttaaaactcagcaaactgctgaagagtgacaagccctatcatttaactgtgaaattgcttgttattctgtcttacaaagggagacgtgttgttgagctgattgtcgtagacagtttttattctcacttatctgtgtgtctcctttgaaaatggaacttgaaattctaccctcctcagttttctgtttttaatttgaaaaacagccaacatcccctgtgaattgcagtaaaggaacaaagcattaaaaggcatatccttttcccaacaaaagctcacagtctaatcagtaaagatttattgagcaactatgccaggttttgagctgaggctgagcctgcaaagttgaaatctgtgttctctgacctcaaggaacatgaatgaataattagaatataataaaactgtgctagtaggtacaaaatgtgagagcccagaacatgcatataaaggaaacatatctgtaaacttcaaggaagactgggaaatggcttaataaaaatagatacaatgttatggcagatatttaaaaaagatgctcagatattatgtgtcaaggatcatcagcaatcagcaaatcattaattttgagaacttgggatcacagactctaatgttaagtattgtgctagaagccatgtacagagaagtaaaagtaagatgatcatacgtttacaatctcaaaataagcttacgtagacaaataagaatgttcctaagaggtcagtgagaccaaatatttgatatcagatcctttccaacaatatagaggcatcatatttgtagatataaattacagttttcattccttatgagcctaaatttcagcatcaaaatgttaaaagtgatatgtgaatacagatatcacagtgtaaaccacgattaattttcaaatgagttgtagaattaaaatatgtcaagtatttagaggaagggaagatcactgacagagtagactggaaagactttataatcaggagcttgacctgtgaaggacagatagatagaatttattgagaacttaccaagctctttacatctaattcatatttgttctttataaccctgagaggcagatttttgtcttacatctccattttatagatgagaaagctgacagaagttacttgccctgagtcacacacctaggaagtggtagaattagatttcagatctagctctgtcagactgtaaagaccatcctttgaactctaaatggtataaaagacatacagaggaaatgccaggcatcctcagtggcttaaatacgacatcacagtaaactcaggctagaccagggatgacacataaaagatgatagttttcatttgtgttgccatcagcctcctctataaataaacccagagtaaccacaaattgccatcctgaggggttcaacagggaatagtctcataatggatttagagtgaaggatgattggcattgttagtcaggcaagcagagggctgagcagtcaaataacagaatttcagaacaaaagattagagggcagaaatgctgtatgtgctgatagagtcagagagggcccggatcaagaaactgcaggaagagaaaactagaaacctagaatcgtctagaaaactagaacctacaatcgtctcagaacacaaaggaggcttgaggactgagcagactgacatagatgtacttggacaacacctcaccaaggagcatgtctcttcccactcacaatccccaatacgagattcacagtggttcacgctgagtccacaggaaaaattggcctggggtacatcatctaaagatcctaggattgctgcaggtcagcagtctccactggaaaaaaagatcttgcatgtatttcaagtcctctgatgaatcatgtgatctactagaccctgaagatacagtgaagagcaaaagaacacagatgaaatgagaaacaaaaacgatggagaaaaccaaaaaaggggacacatgggatccaggcaataggagagccagcataagagagagccagagggatgcccaggatgaggtgaagacgatcttggaaatcagcccagatgtgcatgcaccagtccacgtgtggcaggaccaagggaagtgtcttcacaaagatgaggctttgatttgttggagaaactgttaccagaaaaacaggtcccgatcccgaccccaaaagagtattcttggatcttgcacaggaaggaattaaaggtctagctctgtctcctcagcacatgttctaggctctgactgcaagtgctgacttgggctcccagccccacacagaccctctgttccatgaaagggccatctatgcaaagtgccccccaaatgccaaaggagccaataaaccaaggaacaagacagacaaa

SEQ ID NO: 4288 - protein, 113 aa, Homo sapiens
MLYVLIESERARIKKLQEEKTRNLESSRKLEPTIVSEHKGGLRTEQTDIDVLGQHLTKEHVSSHSQSPIRDSQWFTLSPQEKLAWGTSSKDPRIAAGQQSPLEKKILHVFQVL

SEQ ID NO: 4289 - DNA, 1503 bp, Homo sapiens
atacaggtgaccgtatcctgagccccgggcagaggcaggaccgagccgcaatctgaacagaaatccaggtccgactgaaagctggagcaagtattggcgaggtccatgacagacatgcggtcgggtctgaggagggagttggaagtttattaacaaaagagagaagagttcctgtcccagaggtcgtaactattctgtcccaggacctaggagtatataacccgaaccctcctgccacgcacgcctcctgcctctgcgaccaaggagccgaaacgcccggaattcccagacagcgtcgggtactaaaggacttggaaccctttccaggggccggtgagaggagttaaccaactccgtgggctagagcgccagctctgcgcccgcggcggggcagcgagatagagccggctagagcgtcaggctttcgcgttgacgattggctgtgacgtcataattaattgcgaaccgtgtctcgggagcgttagagatggagactaacgtcttccaagggagattgcgtctccactttcaccctggtactgagaggttgagcacaaaattggtaaccaatgctgcgcttccagcaaattttcccaccagcacccaatcctgggatatttattctctttgtctcacatcctacaggaacgcagtcgcggggtatatccccctgaaaaccgtacgttgccaaataatgatttctttggattagagaactacaactcccctgggtcctgagccggtatttcccttttgcggctgcaccgtagttaaaaacaaagctaagtgttctgggacgtatagttctagcgttccttgggtcccgctggcgagcgtgggctttctgcagctcgcaaccggcctcgtgctttgcggacggttcactgcgcttggaaagggattggcctggggtacatcatctaaagatcctaggattgctgcaggtcagcagtctccactggaaaaaaagatcttgcatgtatttcaagtcctctgatgaatcatgtgatctactagaccctgaagatacagtgaagagcaaaagaacacagatgaaatgagaaacaaaaacgatggagaaaaccaaaaaaggggacacatgggatccaggcaataggagagccagcataagagagagccagagggatgcccaggatgaggtgaagacgatcttggaaatcagcccagatgtgcatgcaccagtccacgtgtggcaggaccaagggaagtgtcttcacaaagatgaggctttgatttgttggagaaactgttaccagaaaaacaggtcccgatcccgaccccaaaagagtattcttggatcttgcacaggaaggaattaaaggtctagctctgtctcctcagcacatgttctaggctctgactgcaagtgctgacttgggctcccagccccacacagaccctctgttccatgaaagggccatctatgcaaagtgccccccaaatgccaaaggagccaataaaccaaggaacaagacagacaaa

SEQ ID NO: 4290 - protein, 88 aa, Homo sapiens
MEKTKKGDTWDPGNRRASIRESQRDAQDEVKTILEISPDVHAPVHVWQDQGKCLHKDEALICWRNCYQKNRSRSRPQKSILGSCTGRN

SEQ ID NO: 4291 - DNA, 1706 bp, Homo sapiens
taattaattgcgaaccgtgtctcgggagcgttagagatggagactaacgtcttccaagggagattgcgtctccactttcaccctggtactgagaggttgagcacaaaattggtaaccaatgctgcgcttccagcaaattttcccaccagcacccaatcctgggatatttattctctttgtctcacatcctacaggaacgcagtcgcggggtatatccccctgaaaaccgtacgttgccaaataatgatttctttggattagagaactacaactcccctgggtcctgagccggtatttcccttttgcggctgcaccgtagttaaaaacaaagctaagtgttctgggacgtatagttctagcgttccttgggtcccgctggcgagcgtgggctttctgcagctcgcaaccggcctcgtgctttgcggacggttcactgcgcttggaaagggattggcctggggtacatcatctaaagatcctaggattgctgcaggtcagcagtctccactggaaaaaaagatcttgaatctaggtggtgtgcatacaacagcagcaagacagttgataatgcagaaatatcaggaggagtgtgaaatactctgtagggagcaagctgtttctcttgactactggcttgccaaagcagagtcttattataataaaataatagtggaaatgatgaaagaagagacaggcaatgaaatctagaaaaaaatggaggagaaaacaacccagagcgtagaaggactaaaacagtactgtttggtacctgagagagagatgaaacacatagaaaggcacatacatcaaacaggaaaggctggagaatttaagaacaaaccatttagacaagtactacaaccccccaatgaaacaaaattaccaaaaattatgccagaagggcatggcatccagaacgcacagagaagaaagcaggtaaatgagagggaacagatgcagactaaggatcaccaggaacgcatgattcgagggagagaacttgcagaacaaagactcaaggagagaatcttgagaagaagccagagccagctacttacatatgagaagcatgagagagtaaaagagataaaggagtttgaaagagttattgcgtatcttcttttccaaccatgcagtagaagtcggattaaacatgtatttcaagtcctctgatgaatcatgtgatctactagaccctgaagatacagtgaagagcaaaagtaagatgctggcaatttgatgtttgcactgtcatgaaggagatgcacatttagcagaacttacaaagagaaatataaaattactgctgagctaagtgtggtgaagaaaagttcatggtaccatgaaagcagataaccaggagatctaacaggtccactaccactattctcaataatacctaaaagaaataataagatatggcatttataaatgatgaataggattttataaaattatatacaatcagagaaccaaaaagcactcttggaaatcaaaaagtgatcatttaaataagtatttcaatagatcacttggaagagtaaatttgtactaccactaaatattaaaaatggaaaaacaatgtcaagaaagacagaaaaactatacgaatactaggctatcagtcaaggatttcctgcaacttaataatacaaattctaaaagaatggaaagatagaaattatttaaaataaaaaaatttctcc

SEQ ID NO: 4292 - protein, 152 aa, Homo sapiens [sequence omitted]

SEQ ID NO: 4293 - DNA, 3293 bp, Homo sapiens
cgaaccgtgtctcgggagcgttagagatggagactaacgtcttccaagggagattgcgtctccactttcaccctggtactgagaggttgagcacaaaattgattggcctggggtacatcatctaaagatcctaggattgctgcaggtcagcagtctccactggaaaaaaagatcttgaatctaggtggtgtgcatacaacagcagcaagacagttgataatgcagaaatatcaggaggagtgtgaaatactctgtagggagcaagctgtttctcttgactactggcttgccaaagcagagtcttattataataaaataatagtggaaatgatgaaagaagagacaggcaatgaaatctagaaaaaaatggaggagaaaacaacccagagcgtagaaggactaaaacagtactgtttggtacctgagagagagatgaaacacatagaaaggcacatacatcaaacaggaaaggctggagaatttaagaacaaaccatttagacaagtactacaaccccccaatgaaacaaaattaccaaaaattatgccagaagggcatggcatccagaacgcacagagaagaaagcaggtaaatgagagggaacagatgcagactaaggatcaccaggaacgcatgattcgagggagagaacttgcagaacaaagactcaaggagagaatcttgagaagaagccagagccagctacttacatatgagaagcatgagagagtaaaagagataaaggagtttgaaagagttattgcgtatcttcttttccaaccatgcagtagaagtcggattaaagtgagtattcttatggataagtctcagaatggagagaaggtgaatacaattgtgaaaccatatcaaagaaaattcttggcaatgccaccctttttaagaagtcaaataggaaaaataagagattaaagtttcaatgctgttatgataaaatcatatctcttaagtgaacccttttttttttcaaatgctcgttctctccagggttcagtgaatattcccatttgtatcagatacagatagatagttctgcacttgaaaattagcttaacttttttagttgacttgcatttgttcaagttgcatatcctttctagtgttcagtgtcctcatctttaaaatggcaataatatttgatggcatttatggaaggactgttttttttgtgaagtgtaggtatgtattagttgtttcataaatgttagtttccccacttggaaagaccggggttgggcaatggtggtgaataaagaattgttctaatcttcttctcttattctccctgttcccagccctccaaggttattttgatgagattgctatagtttagtatatggtctttaatatcataccttcatcagataactactagccagcccctaaaagtgtaacttgctctgtacaatttatttgaatgagaaacttaattttgagagcctcctacatgctaggcattatgttagttactgaaggtgaataaagagaagtctctgcccttgaataattttcaactaatggcatagatcactctataaacagataatgtagtaaataaaggttacaatagaaaggtacagggtgctttacaaaggacggattctaacctggcccaggtgagcagggtgaaaaggaggaaggttagggaagggagtattatagtctgtcatgtttcttccagctttttttgtcacttcctatcacccacttaagcaagaccttcctaatgcttggatccactcagggataatcaaactcagcctttctcaaactcatgtttttggcgctcattgataaatcagaaagcaaatttataaatttagtgagaattacagttgtcaagcagaatgaaatttgtgttttctagtcagtttattttcttcccagataccagaaagttgggaaagcaggggttcagagttggtaagcagagaagcaaataaatggaaatagatgccctcaggaatattatgcttaagttgtgataattctgatgcccaccttgctttactagcagaacaccctttaccctggatactgctaggtcagccactgatacaaatgttctgtgtctgtgctcctcagtacagtagcccttgctacacgtggctgttgaggcatttaaaatgtggctggtgcagctgtggaatggaatgtttaattgaatttcatttaaatttaaattgccacatgtggcaagtgactaccctgttgcacagtgtagcactggataaacataacttctgtgttctagattccagtcccaccattagctttctgtttttgacagtgtttgctggtatgataggtcactgttcattttacattactatcagtttagtttcctttgcatttcagaggctccctaatcccttaaagagatttaaaaatcaatgtagaccacttctgtgtgaaaataagatgactgaatttgctttgattggaattaggaactgacctctctttgctagttctggaatttggccaggatgcacatcaaaatctcattcctaccctcctgatttgcctcatggaaacttcgttgctgtgtctgttctctggtcctctattgctatgtctcagctttagattctatgttttgcatagaaatggatcatcagaatgcaacaggcagaagacttagaagtgcaaatcagtagggtaatgacaagccctttgagctgagtgggactgaaaagtaacctaacatataacctattagtaattgtttaccatgaaggttttcagtgctggacacataaattgctgagttcaactgccctctttcccctccaaatctagcataaaagcaactggtgctctcagggcaatttcacacctaatacggctaagaataaaagtctatgtttcaggaactcagtttgtccaaacctgcatccatcatctacctcaaattatatccaccttttcatttctttgcactgtgtctgcttaaatcttgagtcacacttaatgttttttttttggtcttttttctttttaatgtgaaatagaatatacaatacacaaatgaaaatgtatatttagaagaacaataataaatgtccaggtgcccgttgctcagactgagaaatggaacattactacatcccaggagcctcgtatgctctcattcatatctctctcccctgcagccagaggcaaccactatcctgaattttgtataactgtcacctagcttttatagattttactgtctgtgtatccctaacagttgcttatttatagcctttatataaatagaattatactgt

SEQ ID NO: 4294 - protein, 32 aa, Homo sapiens
METNVFQGRLRLHFHPGTERLSTKLIGLGYII

SEQ ID NO: 4295 - DNA, 3649 bp, Homo sapiens
tatatccccctgaaaaccgtacgttgccaaataatgatttctttggattagagaactacaactcccctgggtcctgagccggtatttcccttttgcggctgcaccgtagttaaaaacaaagctaagtgttctgggacgtatagttctagcgttccttgggtcccgctggcgagcgtgggctttctgcagctcgcaaccggcctcgtgctttgcggacggttcactgcgcttggaaaggggtgagtcggctttttgagggacagcaagtggtgagagtgaaggcccgaggaatgcttagtcccacgggacgaaaggaagcagggatgaagtggtacacttgagaaggggttcaggactttggaggtggtggaacagaggagcttggggcttcctctccttcgactcctgccagataagtgaggctagcagtagtcaagaaagctcattaagtaggatttcataagacttaggtcgagtttggcttttagttgtgcctgccgcctatcgaactcttaattcattatgtcatccgttaagtggacagctgacatttccctgatcttttataaaacatgagaataagtatctttgggaaatctttctattttcattaatctgtaacttatattccaagtagaaactttccctgaaggggcagcttgtagttgtttactagtttcctgctagccctcccaccaccatccactctgatagctgtgctaagttcattcatataaaagttctggagccatcactgttttctcctatgaaggacacaagctgtagtcttttcgctgggagaggctcccatctgcctttctctgtaataatggagagaacgccatagtgaaagggttaaaactcagcaaactgctgaagagtgacaagccctatcatttaactgtgaaattgcttgttattctgtcttacaaagggagacgtgttgttgagctgattgtcgtagacagtttttattctcacttatctgtgtgtctcctttgaaaatggaacttgaaattctaccctcctcagttttctgtttttaatttgaaaaacagccaacatcccctgtgaattgcagtaaaggaacaaagcattaaaaggcatatccttttcccaacaaaagctcacagtctaatcagtaaagatttattgagcaactatgccaggttttgagctgaggctgagcctgcaaagttgaaatctgtgttctctgacctcaaggaacatgaatgaataattagaatataataaaactgtgctagtaggtacaaaatgtgagagcccagaacatgcatataaaggaaacatatctgtaaacttcaaggaagactgggaaatggcttaataaaaatagatacaatgttatggcagatatttaaaaaagatgctcagatattatgtgtcaaggatcatcagcaatcagcaaatcattaattttgagaacttgggatcacagactctaatgttaagtattgtgctagaagccatgtacagagaagtaaaagtaagatgatcatacgtttacaatctcaaaataagcttacgtagacaaataagaatgttcctaagaggtcagtgagaccaaatatttgatatcagatcctttccaacaatatagaggcatcatatttgtagatataaattacagttttcattccttatgagcctaaatttcagcatcaaaatgttaaaagtgatatgtgaatacagatatcacagtgtaaaccacgattaattttcaaatgagttgtagaattaaaatatgtcaagtatttagaggaagggaagatcactgacagagtagactggaaagactttataatcaggagcttgacctgtgaaggacagatagatagaatttattgagaacttaccaagctctttacatctaattcatatttgttctttataaccctgagaggcagatttttgtcttacatctccattttatagatgagaaagctgacagaagttacttgccctgagtcacacacctaggaagtggtagaattagatttcagatctagctctgtcagactgtaaagaccatcctttgaactctaaatggtataaaagacatacagaggaaatgccaggcatcctcagtggcttaaatacgacatcacagtaaactcaggctagaccagggatgacacataaaagatgatagttttcatttgtgttgccatcagcctcctctataaataaacccagagtaaccacaaattgccatcctgaggggttcaacagggaatagtctcataatggatttagagtgaaggatgattggcattgttagtcaggcaagcagagggctgagcagtcaaataacagaatttcagaacaaaagattagagggcagaaatgctgtatgtgctgatagagtcagagagggcccggatcaagaaactgcaggaagagaaaactagaaacctagaatcgtctagaaaactagaacctacaatcgtctcagaacacaaaggaggcttgaggactgagcagactgacatagatgtacttggacaacacctcaccaaggagcatgtctcttcccactcacaatccccaatacgagattcacagtggttcacgctgagtccacaggaaaaattggcctggggtacatcatctaaagatcctaggattgctgcaggtcagcagtctccactggaaaaaaagatcttgaatctaggtggtgtgcatacaacagcagcaagacagttgataatgcagaaatatcaggaggagtgtgaaatactctgtagggagcaagctgtttctcttgactactggcttgccaaagcagagtcttattataataaaataatagtggaaatgatgaaagaagagacaggcaatgaaatctagaaaaaaatggaggagaaaacaacccagagcgtagaaggactaaaacagtactgtttggtacctgagagagagatgaaacacatagaaaggcacatacatcaaacaggaaaggctggagaatttaagaacaaaccatttagacaagtactacaaccccccaatgaaacaaaattaccaaaaattatgccagaagggcatggcatccagaacgcacagagaagaaagcaggtaaatgagagggaacagatgcagactaaggatcaccaggaacgcatgattcgagggagagaacttgcagaacaaagactcaaggagagaatcttgagaagaagccagagccagctacttacatatgagaagcatgagagagtaaaagagataaaggagtttgaaagagttattgcgtatcttcttttccaaccatgcagtagaagtcggattaaagtgagtattcttatggataagtctcagaatggagagaaggtgaatacaattgtgaaaccatatcaaagaaaattcttggcaatgccaccctttttaagaagtcaaataggaaaaataagagattaaagtttcaatgctgttatgataaaatcatatctcttaagtgaacccttttttttttcaaatgctcgttctctccagggttcagtgaatattcccatttgtatcagatacagatagatagttctgcacttgaaaattagcttaacttttttagttgacttgcatttgttcaagttgcatatcctttctagtgttcagtgtcctcatcttt

SEQ ID NO: 4296 - protein, 167 aa, Homo sapiens [sequence omitted]

SEQ ID NO: 4297 - DNA, 1209 bp, Homo sapiens
caacagggaatagtctcataatggatttagagtgaaggatgattggcattgttagtcaggcaagcagagggctgagcagtcaaataacagaatttcagaacaaaagattagagggcagaaatgctgtatgtgctgatagagtcagagagggcccggatcaagaaactgcaggaagagaaaactagaaacctagaatcgtctagaaaactagaacctacaatcgtctcagaacacaaaggaggcttgaggactgagcagactgacatagatgtacttggacaacacctcaccaaggagcatgtctcttcccactcacaatccccaatacgagattcacagtggttcacgctgagtccacaggaaaaattggcctggggtacatcatctaaagatcctaggattgctgcaggtcagcagtctccactggaaaaaaagatcttgaatctaggtggtgtgcatacaacagcagcaagacagttgataatgcagaaatatcaggaggagtgtgaaatactctgtagggagcaagctgtttctcttgactactggcttgccaaagcagagtcttattataataaaataatagtggaaatgatgaaagaagagacaggcaatgaaatctagaaaaaaatggaggagaaaacaacccagagcgtagaaggactaaaacagtactgtttggtacctgagagagagatgaaacacatagaaaggcacatacatcaaacaggaaaggctggagaatttaagaacaaaccatttagacaagtactacaaccccccaatgaaacaaaattaccaaaaattatgccagaagggcatggcatccagaacgcacagagaagaaagcaggtaaatgagagggaacagatgcagactaaggatcaccaggaacgcatgattcgagggagagaacttgcagaacaaagactcaaggagagaatcttgagaagaagccagagccagctacttacatatgagaagcatgagagagtaaaagagataaaggagtttgaaagagttattgcgtatcttcttttccaaccatgcagtagaagtcggattaaagtgagtattcttatggataagtctcagaatggagagaaggtgaatacaattgtgaaaccatatcaaagaaaattcttggcaatgccaccctttttaagaagtcaaataggaaaaataagagattaaagtttcaatgctgtt

SEQ ID NO: 4298 - protein, 167 aa, Homo sapiens [sequence omitted]

SEQ ID NO: 4299 - DNA, 3670 bp, Homo sapiens
gtcttttataccatttagagttcaaaggatggtctttacagtctgacagagctagatctgaaatctaattctaccacttcctaggtgtgtgactcagggcaagtaacttctgtcagctttctcatctataaaatggagatgtaagacaaaaatctgcctctcagggttataaagaacaaatatgaattagatgtaaagagcttggtaagttctcaataaattctatctatctgtccttcacaggtcaagctcctgattataaagtctttccagtctactctgtcagtgatcttcccttcctctaaatacttgacatattttaattctacaactcatttgaaaattaatcgtggtttacactgtgatatctgtattcacatatcacttttaacattttgatgctgaaatttaggctcataaggaatgaaaactgtaatttatatctacaaatatgatgcctctatattgttggaaaggatctgatatcaaatatttggtctcactgacctcttaggaacattcttatttgtctacgtaagcttattttgagattgtaaacgtatgatcatcttacttttacttctctgtacatggcttctagcacaatacttaacattagagtctgtgatcccaagttctcaaaattaatgatttgctgattgctgatgatccttgacacataatatctgagcatcttttttaaatatctgccataacattgtatctatttttattaagccatttcccagtcttccttgaagtttacagatatgtttcctttatatgcatgttctgggctctcacattttgtacctactagcacagttttattatattctaattattcattcatgttccttgaggtcagagaacacagatttcaactttgcaggctcagcctcagctcaaaacctggcatagttgctcaataaatctttactgattagactgtgagcttttgttgggaaaaggatatgccttttaatgctttgttcctttactgcaattcacaggggatgttggctgtttttcaaattaaaaacagaaaactgaggagggtagaatttcaagttccattttcaaaggagacacacagataagtgagaataaaaactgtctacgacaatcagctcaacaacacgtctccctttgtaagacagaataacaagcaatttcacagttaaatgatagggcttgtcactcttcagcagtttgctgagttttaaccctttcactatggcgttctctccattattacagagaaaggcagatgggagcctctcccagcgaaaagactacagcttgtgtccttcataggagaaaacagtgatggctccagaacttttatatgaatgaacttagcacagctatcagagtggatggtggtgggagggctagcaggaaactagtaaacaactacaagctgccccttcagggaaagtttctacttggaatataagttacagattaatgaaaatagaaagatttcccaaagatacttattctcatgttttataaaagatcagggaaatgtcagctgtccacttaacggatgacataatgaattaagagttcgataggcggcaggcacaactaaaagccaaactcgacctaagtcttatgaaatcctacttaatgagctttcttgactactgctagcctcacttatctggcaggagtcgaaggagaggaagccccaagctcctctgttccaccacctccaaagtcctgaaccccttctcaagtgtaccacttcatccctgcttcctttcgtcccgtgggactaagcattcctcgggccttcactctcaccacttgctgtccctcaaaaagccgactcacccctttccaagcgcagtgaaccgtccgcaaagcacgaggccggttgcgagctgcagaaagcccacgctcgccagcgggacccaaggaacgctagaactatacgtcccagaacacttagctttgtttttaactacggtgcagccgcaaaagggaaataccggctcaggacccaggggagttgtagttctctaatccaaagaaatcattatttggcaacgtacggttttcagggggatataccccgcgactgcgttcctgtaggatgtgagacaaagagaataaatatcccaggattgggtgctggtgggaaaatttgctggaagcgcagcattggttaccaattttgtgctcaacctctcagtaccagggtgaaagtggagacgcaatctcccttggaagacgttagtctccatctctaacgctcccgagacacggttcgcaattaattatgacgtcacagccaatcgtcaacgcgaaagcctgacgctctagccggctctatctcgctgccccgccgcgggcgcagagctggcgctctagcccacggagttggttaactcctctcaccggcccctggaaagggttccaagtcctttagtacccgacgctgtctgggaattccgggcgtttcggctccttggtcgcagaggcaggaggcgtgcgtggcaggagggttcgggttatatactcctaggtcctgggacagaatagttacgacctctgggacaggaactcttctctcttttgttaataaacttccaactccctcctcagacccgaccgcatgtctgtcatggacctcgccaatacttgctccagctttcagtcggacctggatttctgttcagattgcggctcggtcctgcctctgcccggggctcaggatacggtcacctgtattcgctgtggcttcaacatcaacgttcggggtgagaggcttgtacgcaggggtcctggcggagggcgcagggtcggaagcttggggaactcaagatcggttgggttgaggaggggatcctagagcaggacatcaggcggttgtacatttggtctagcgatgaaaactgagggaaaggatgtagggcctcctggcctaaccagccaggggaaaggggaggtttccggtgtcagctctctctggttgtctccataaccagttcttacttgcctgtgcagactttgaggggaaggttgtgaagacttcggttgtgttccaccaactggggacagccatgcctatgtcggtggaggaagggcctgagtgccagggacctgtggtaagctaatgagatcaagaactggctccataaggtgggtaggaaagaaatggaggagtgattgcaaagctctggagagttttgtgcccaattccaagagggaaaagagatgtaaaccatcgacgtttgagaggcgtgatcgcctgattcctgtgggaagtaaggggatatgaccaggcctccctaacccaccagtttcttcccaggttgacaggcgctgccctcgatgtggtcatgaaggaatggcataccacaccagacagatgcgttcagccgatgaagggcaaactgtcttctacacctgtaccaactgcaagttccaggagaaggaagactcttgacctttttcctgggcaactctacagtccctccctcctttcggaaggtgaaggatactgggtttttagatgccttgtccatcctgtctggttgcaatgttttgctcccagaagagaatcagatcatcatgtggggattaccattgttcctggagtactcctacccttagttgaatttccttattaaagttatatttttctataagaccctga

SEQ ID NO: 4300 - protein, 96 aa, Homo sapiens
MKEWHTTPDRCVQPMKGKLSSTPVPTASSRRRKTLDLFPGQLYSPSLLSEGEGYWVFRCLVHPVWLQCFAPRRESDHHVGITIVPGVLLPLVEFPY

SEQ ID NO: 4301 - DNA, 249 bp, Homo sapiens
aattctaccacttcctaggtgtgtgactcagggcaagtaacttctgtcagctttctcatctataaaatggagatgtaagacaaaaatctgcctctcagggttataaagaacaaatatgaattagatgtaaagagcttggggatgttggctgtttttcaaattaaaaacagaaaactgaggagggtagaatttcaagttccattttcaaaggagacacacagataagtgagaataaaaactgtctacgac

SEQ ID NO: 4302 - DNA, 864 bp, Homo sapiens
gccgcgggcgcagagctggcgctctagcccacggagttggttaactcctctcaccggcccctggaaagggttccaagtcctttagtacccgacgctgtctgggaattccgggcgtttcggctccttggtcgcagaggcaggaggcgtgcgtggcaggagggttcgggttatatactcctaggtcctgggacagaatagttacgacctctgggacaggaactcttctctcttttgttaataaacttccaactccctcctcagacccgaccgcatgtctgtcatggacctcgccaatacttgctccagctttcagtcggacctggatttctgttcagattgcggctcggtcctgcctctgcccggggctcaggatacggtcacctgtattcgctgtggcttcaacatcaacgttcgggactttgaggggaaggttgtgaagacttcggttgtgttccaccaactggggacagccatgcctatgtcggtggaggaagggcctgagtgccagggacctgtggttgacaggcgctgccctcgatgtggtcatgaaggaatggcataccacaccagacagatgcgttcagccgatgaagggcaaactgtcttctacacctgtaccaactgcaagttccaggagaaggaagactcttgacctttttcctgggcaactctacagtccctccctcctttcggaaggtgaaggatactgggtttttagatgccttgtccatcctgtctggttgcaatgttttgctcccagaagagaatcagatcatcatgtggggattaccattgttcctggagtactcctacccttagttgaatttccttattaaagttatatttttctataagaccctgaca

SEQ ID NO: 4303 - protein, 126 aa, Homo sapiens; identical to SEQ ID NO: 487

SEQ ID NO: 4304 - DNA, 745 bp, Homo sapiens
gcgggcgcagagctggcgctctagcccacggagttggttaactcctctcaccggcccctggaaagggttccaagtcctttagtacccgacgctgtctgggaattccgggcgtttcggctccttggtcgcagaggcaggaggcacccgaccgcatgtctgtcatggacctcgccaatacttgctccagctttcagtcggacctggatttctgttcagattgcggctcggtcctgcctctgcccggggctcaggatacggtcacctgtattcgctgtggcttcaacatcaacgttcgggactttgaggggaaggttgtgaagacttcggttgtgttccaccaactggggacagccatgcctatgtcggtggaggaagggcctgagtgccagggacctgtggttgacaggcgctgccctcgatgtggtcatgaaggaatggcataccacaccagacagatgcgttcagccgatgaagggcaaactgtcttctacacctgtaccaactgcaagttccaggagaaggaagactcttgacctttttcctgggcaactctacagtccctccctcctttcggaaggtgaaggatactgggtttttagatgccttgtccatcctgtctggttgcaatgttttgctcccagaagagaatcagatcatcatgtggggattaccattgttcctggagtactcctacccttagttgaatttccttattaaagttatatttttctataagaccctgaca

SEQ ID NO: 4305 - protein, 126 aa, Homo sapiens; identical to SEQ ID NO: 487

SEQ ID NO: 4306 - DNA, 592 bp, Homo sapiens
ggcccctggaaagggttccaagtcctttagtacccgacgctgtctgggaattccgggcgtttcggctccttggtcgcagaggcaggaggcacccgaccgcatgtctgtcatggacctcgccaatacttgctccagctttcagtcggacctggatttctgttcagattgcggctcggtcctgcctctgcccggggctcaggatacggtcacctgtattcgctgtggcttcaacatcaacgttcggggttgacaggcgctgccctcgatgtggtcatgaaggaatggcataccacaccagacagatgcgttcagccgatgaagggcaaactgtcttctacacctgtaccaactgcaagttccaggagaaggaagactcttgacctttttcctgggcaactctacagtccctccctcctttcggaaggtgaaggatactgggtttttagatgccttgtccatcctgtctggttgcaatgttttgctcccagaagagaatcagatcatcatgtggggattaccattgttcctggagtactcctacccttagttgaatttccttattaaagttatatttttctataagaccctgaca

SEQ ID NO: 4307 - protein, 96 aa, Homo sapiens; identical to SEQ ID NO: 4300

SEQ ID NO: 4308 - DNA, 1649 bp, Homo sapiens
ctacaggcacagggcgaggggtagaaccacatcgcttgactcttaagtgtgtttccaactgctcccacttcccgttttctttagagaaacccagaccaaacaaggaaagggaaataggccacggtagggtcattactattgctccttaagcttcctcgccggtccacctacccagacaaggcaaacggaaatctgcagcaggactcagcttggtgcacacaactccgccctcgccacacccactctgcagcgtctggcccggcaatacccatctgggcgcccctcctgcttcctctaggctgagaaccggagccttaccatcaaacttcggaaacggaagccagagaaaaaggtagaatggacaagtgacactgtggacaatgaacacatgggccgccgctcatccaaatgctgctgtatttatgagaaacctcgggcctttggcgagagctccacggaaagtgatgaggaggaagaagagggctgtggtcatacacactgtgtacgtggccaccgcaaaggacggcgtcgtgcaaccctaggaccgacccccaccacccctccccagcctcctgacccttcccagccccctccagggccaatgcagcactaaatccctctctcctccagcattcctgtgtctgtctggccctaaatgtatccatgtggctacttctccagccccctccttccctctcttctgcctgatagagggaagaggaagaggaggacgaacagagatcctgaaattctgacttgctgctattccagaacccagcctcctgggtttccccagtcctcatttttcctcccaatacccacccttctctctcgagggatctaggcaccttggtcccagtgtcttccttttgttctcactgccaaactgcctgtcctgggatctagttatcttggccctgcactctcaacatgagtagcgaacacttaaattgggttttcaacagtcccagctttcactgccagggtcccagtcagattccaggaatttgcgccctaactttgcttgctaatcctggtttagagctatcccactaaaatatttaatcctaattcttagtccttgcctgtgagatatgaggtcttacaggagacctcagagctcccagcccttctcctcctgctaacccttctcacaccctcaagaggagttagaaaagaggtccttgtcattctcacctcttatggaaaatggaataagaaataatcatatcctttcttcccacccttctcctgttatttaggatttctgacaaagctggcttgagattggtcacttagagccgactgtctcctctgccttttgtttttcagcttcagagacagatccaatatagtcccagggacctgggtctctgggagaggaaggaagagggagggagcaaagagattggggtatgtcccctgtagtacactcttacctcttacttcctagactttgatttctccggcagcccagatgttcagttctcttggcccctctctaccccttactgggatccggttttcattttccggtccttttgccatacacagttacagagatcagtcaaatccataccaccactgagatctcatttattgccacagatgcacaaaataaataacccaaaatcacaaaatgtgttaaa

SEQ ID NO: 4309 - protein, 74 aa, Homo sapiens
MGRRSSKCCCIYEKPRAFGESSTESDEEEEEGCGHTHCVRGHRKGRRRATLGPTPTTPPQPPDPSQPPPGPMQH

SEQ ID NO: 4310 - DNA, 1732 bp, Homo sapiens
cagcgcctgcgcgctgtcacgttacggcggaactaatccagcgacgcctgcgctttgacgcatttggtgccgtggaagggaaaaagggggactgcagtatgcgtcacacccggaagcggcgagccggaagtggggttagccaggttatccccaggggtggagaagcggaggcccaggaggagggggaataaagaaggtggaggatcctggctaccactctgaatccgataccgcttctcttagacctcagcgacagaaaaagggaagggtgtctcatcccccttcctcctctcctccctgtcctgagccttagccatggccgaggcaggggctgggctgagcgagaccgtcactgagacaacggttaccgtgacaaccgagcccgagaaccggagccttaccatcaaacttcggaaacggaagccagagaaaaaggtagaatggacaagtgacactgtggacaatgaacacatgggccgccgctcatccaaatgctgctgtatttatgagaaacctcgggcctttggcgagagctccacggaaagtgatgaggaggaagaagagggctgtggtcatacacactgtgtacgtggccaccgcaaaggacggcgtcgtgcaaccctaggaccgacccccaccacccctccccagcctcctgacccttcccagccccctccagggccaatgcagcactaaatccctctctcctccagcattcctgtgtctgtctggccctaaatgtatccatgtggctacttctccagccccctccttccctctcttctgcctgatagagggaagaggaagaggaggacgaacagagatcctgaaattctgacttgctgctattccagaacccagcctcctgggtttccccagtcctcatttttcctcccaatacccacccttctctctcgagggatctaggcaccttggtcccagtgtcttccttttgttctcactgccaaactgcctgtcctgggatctagttatcttggccctgcactctcaacatgagtagcgaacacttaaattgggttttcaacagtcccagctttcactgccagggtcccagtcagattccaggaatttgcgccctaactttgcttgctaatcctggtttagagctatcccactaaaatatttaatcctaattcttagtccttgcctgtgagatatgaggtcttacaggagacctcagagctcccagcccttctcctcctgctaacccttctcacaccctcaagaggagttagaaaagaggtccttgtcattctcacctcttatggaaaatggaataagaaataatcatatcctttcttcccacccttctcctgttatttaggatttctgacaaagctggcttgagattggtcacttagagccgactgtctcctctgccttttgtttttcagcttcagagacagatccaatatagtcccagggacctgggtctctgggagaggaaggaagagggagggagcaaagagattggggtatgtcccctgtagtacactcttacctcttacttcctagactttgatttctccggcagcccagatgttcagttctcttggcccctctctaccccttactgggatccggttttcattttccggtccttttgccatacacagttacagagatcagtcaaatccataccaccactgagatctcatttattgccacagatgcacaaaataaataacccaaaatcacaaaatgtgttaaa

SEQ ID NO: 4311 - protein, 126 aa, Homo sapiens; identical to SEQ ID NO: 491

SEQ ID NO: 4312 - DNA, 1572 bp, Homo sapiens
cagcgcctgcgcgctgtcacgttacggcggaactaatccagcgacgcctgcgctttgacgcatttggtgccgtggaagggaaaaagggggactgcagtatgcgtcacacccggaagcggcgagccggaagtggggttagccaggttatccccaggggtggagaagcggaggcccaggaggagggggaataaagaaggtggaggatcctggctaccactctgaatccgataccgcttctcttagacctcagcgacagaaaaagggaagggtgtctcatcccccttcctcctctcctccctgtcctgagccttagccatggccgaggcaggggctgggctgagcgagaccgtcactgagacaacggttaccgtgacaaccgagcccgagaaccggagccttaccatcaaacttcggaaacggaagccagagaaaaaggtagaatggacaagtgacactgtggacaatgaacacatgggccgccgctcatccaaatgctgctgtatttatgagaaacctcggggccaatgcagcactaaatccctctctcctccagcattcctgtgtctgtctggccctaaatgtatccatgtggctacttctccagccccctccttccctctcttctgcctgatagagggaagaggaagaggaggacgaacagagatcctgaaattctgacttgctgctattccagaacccagcctcctgggtttccccagtcctcatttttcctcccaatacccacccttctctctcgagggatctaggcaccttggtcccagtgtcttccttttgttctcactgccaaactgcctgtcctgggatctagttatcttggccctgcactctcaacatgagtagcgaacacttaaattgggttttcaacagtcccagctttcactgccagggtcccagtcagattccaggaatttgcgccctaactttgcttgctaatcctggtttagagctatcccactaaaatatttaatcctaattcttagtccttgcctgtgagatatgaggtcttacaggagacctcagagctcccagcccttctcctcctgctaacccttctcacaccctcaagaggagttagaaaagaggtccttgtcattctcacctcttatggaaaatggaataagaaataatcatatcctttcttcccacccttctcctgttatttaggatttctgacaaagctggcttgagattggtcacttagagccgactgtctcctctgccttttgtttttcagcttcagagacagatccaatatagtcccagggacctgggtctctgggagaggaaggaagagggagggagcaaagagattggggtatgtcccctgtagtacactcttacctcttacttcctagactttgatttctccggcagcccagatgttcagttctcttggcccctctctaccccttactgggatccggttttcattttccggtccttttgccatacacagttacagagatcagtcaaatccataccaccactgagatctcatttattgccacagatgcacaaaataaataacccaaaatcacaaaatgtgttaaa

SEQ ID NO: 4313 - protein, 120 aa, Homo sapiens
MAEAGAGLSETVTETTVTVTTEPENRSLTIKLRKRKPEKKVEWTSDTVDNEHMGRRSSKCCCIYEKPRGQCSTKSLSPPAFLCLSGPKCIHVATSPAPSFPLFCLIEGRGRGGRTEILKF

SEQ ID NO: 4314 - DNA, 1433 bp, Homo sapiens
ggaagcggcgagccggaagtggggttagccaggttatccccaggggtggagaagcggaggcccaggaggagggggaataaagaaggagaaccggagccttaccatcaaacttcggaaacggaagccagagaaaaaggtagaatggacaagtgacactgtggacaatgaacacatgggccgccgctcatccaaatgctgctgtatttatgagaaacctcgggcctttggcgagagctccacggaaagtgatgaggaggaagaagagggctgtggtcatacacactgtgtacgtggccaccgcaaaggacggcgtcgtgcaaccctaggaccgacccccaccacccctccccagcctcctgacccttcccagccccctccagggccaatgcagcactaaatccctctctcctccagcattcctgtgtctgtctggccctaaatgtatccatgtggctacttctccagccccctccttccctctcttctgcctgatagagggaagaggaagaggaggacgaacagagatcctgaaattctgacttgctgctattccagaacccagcctcctgggtttccccagtcctcatttttcctcccaatacccacccttctctctcgagggatctaggcaccttggtcccagtgtcttccttttgttctcactgccaaactgcctgtcctgggatctagttatcttggccctgcactctcaacatgagtagcgaacacttaaattgggttttcaacagtcccagctttcactgccagggtcccagtcagattccaggaatttgcgccctaactttgcttgctaatcctggtttagagctatcccactaaaatatttaatcctaattcttagtccttgcctgtgagatatgaggtcttacaggagacctcagagctcccagcccttctcctcctgctaacccttctcacaccctcaagaggagttagaaaagaggtccttgtcattctcacctcttatggaaaatggaataagaaataatcatatcctttcttcccacccttctcctgttatttaggatttctgacaaagctggcttgagattggtcacttagagccgactgtctcctctgccttttgtttttcagcttcagagacagatccaatatagtcccagggacctgggtctctgggagaggaaggaagagggagggagcaaagagattggggtatgtcccctgtagtacactcttacctcttacttcctagactttgatttctccggcagcccagatgttcagttctcttggcccctctctaccccttactgggatccggttttcattttccggtccttttgccatacacagttacagagatcagtcaaatccataccaccactgagatctcatttattgccacagatgcacaaaataaataacccaaaatcacaaaatgtgttaaa

SEQ ID NO: 4315 - protein, 74 aa, Homo sapiens; identical to SEQ ID NO: 4309

SEQ ID NO: 4316 - DNA, 1691 bp, Homo sapiens
cggcgagccggaagtggggttagccaggttatccccaggggtggagaagcggaggcccaggaggagggggaataaagaaggtggaggatcctggctaccactctgaatccgataccgcttctcttagacctcagcgacagaaaaagggaagggtgtctcatcccccttcctcctctcctccctgtcctgagccttagccatggccgaggcaggggctgggctgagcgagaccgtcactgagacaacggttaccgtgacaaccgagcccgatgatttggggaggaagacggagaaacagcaaggattatattttcctttgaagagttgctgggacctttcctaggagaaccggagccttaccatcaaacttcggaaacggaagccagagaaaaaggtagaatggacaagtgacactgtggacaatgaacacatgggccgccgctcatccaaatgctgctgtatttatgagaaacctcgggcctttggcgagagctccacggaaagtgatgaggaggaagaagagggctgtggtcatacacactgtgtacgtggccaccgcaaaggacggcgtcgtgcaaccctaggaccgacccccaccacccctccccagcctcctgacccttcccagccccctccagggccaatgcagcactaaatccctctctcctccagcattcctgtgtctgtctggccctaaatgtatccatgtggctacttctccagccccctccttccctctcttctgcctgatagagggaagaggaagaggaggacgaacagagatcctgaaattctgacttgctgctattccagaacccagcctcctgggtttccccagtcctcatttttcctcccaatacccacccttctctctcgagggatctaggcaccttggtcccagtgtcttccttttgttctcactgccaaactgcctgtcctgggatctagttatcttggccctgcactctcaacatgagtagcgaacacttaaattgggttttcaacagtcccagctttcactgccagggtcccagtcagattccaggaatttgcgccctaactttgcttgctaatcctggtttagagctatcccactaaaatatttaatcctaattcttagtccttgcctgtgagatatgaggtcttacaggagacctcagagctcccagcccttctcctcctgctaacccttctcacaccctcaagaggagttagaaaagaggtccttgtcattctcacctcttatggaaaatggaataagaaataatcatatcctttcttcccacccttctcctgttatttaggatttctgacaaagctggcttgagattggtcacttagagccgactgtctcctctgccttttgtttttcagcttcagagacagatccaatatagtcccagggacctgggtctctgggagaggaaggaagagggagggagcaaagagattggggtatgtcccctgtagtacactcttacctcttacttcctagactttgatttctccggcagcccagatgttcagttctcttggcccctctctaccccttactgggatccggttttcattttccggtccttttgccatacacagttacagagatcagtcaaatccataccaccactgagatctcatttattgccacagatgcacaaaataaataacccaaaatcacaaaatgtgttaaa

SEQ ID NO: 4317 - protein, 74 aa, Homo sapiens; identical to SEQ ID NO: 4309

SEQ ID NO: 4318 - DNA, 472 bp, Homo sapiens
ggggttagccaggttatccccaggggtggagaagcggaggcccaggaggagggggaataaagaaggtggaggatcctggctaccactctgaatccgataccgcttctcttagacctcagcgacagaaaaagggaagggtgtctcatcccccttcctcctctcctccctgtcctgagccttagccatggccgaggcaggggctgggctgagcgagaccgtcactgagacaacggttaccgtgacaaccgagcccgagaaccggagctcttacctcttacttcctagactttgatttctccggcagcccagatgttcagttctcttggcccctctctaccccttactgggatccggttttcattttccggtccttttgccatacacagttacagagatcagtcaaatccataccaccactgagatctcatttattgccacagatgcacaaaataaataacccaaaatcacaaaa

SEQ ID NO: 4319 - protein, 35 aa, Homo sapiens
MAEAGAGLSETVTETTVTVTTEPENRSSYLLLPRL

SEQ ID NO: 4320 - DNA, 460 bp, Homo sapiens
ggggttagccaggttatccccaggggtggagaagcggaggcccaggaggagggggaataaagaaggtggaggatcctggctaccactctgaatccgataccgcttctcttagacctcagcgacagaaaaagggaagggtgtctcatcccccttcctcctctcctccctgtcctgagccttagccatggccgaggcaggggctgggctgagcgagaccgtcactgagacaacggttaccgtgacaaccgagcccgagaaccggagccttaccatcaaacttcggaaacggaagccagaatgttcagttctcttggcccctctctaccccttactgggatccggttttcattttccggtccttttgccatacacagttacagagatcagtcaaatccataccaccactgagatctcatttattgccacagatgcacaaaataaataacccaaaatcacaaaa

SEQ ID NO: 4321 - protein, 86 aa, Homo sapiens
MAEAGAGLSETVTETTVTVTTEPENRSLTIKLRKRKPECSVLLAPLYPLLGSGFHFPVLLPYTVTEISQIHTTTEISFIATDAQNK

SEQ ID NO: 4322 - DNA, 1258 bp, Homo sapiens
cccaggggtggagaagcggaggcccaggaggaggggaaacctcgggcctttggcgagagctccacggaaagtgatgaggaggaagaagagggctgtggtcatacacactgtgtacgtggccaccgcaaaggacggcgtcgtgcaaccctaggaccgacccccaccacccctccccagcctcctgacccttcccagccccctccagggccaatgcagcactaaatccctctctcctccagcattcctgtgtctgtctggccctaaatgtatccatgtggctacttctccagccccctccttccctctcttctgcctgatagagggaagaggaagaggaggacgaacagagatcctgaaattctgacttgctgctattccagaacccagcctcctgggtttccccagtcctcatttttcctcccaatacccacccttctctctcgagggatctaggcaccttggtcccagtgtcttccttttgttctcactgccaaactgcctgtcctgggatctagttatcttggccctgcactctcaacatgagtagcgaacacttaaattgggttttcaacagtcccagctttcactgccagggtcccagtcagattccaggaatttgcgccctaactttgcttgctaatcctggtttagagctatcccactaaaatatttaatcctaattcttagtccttgcctgtgagatatgaggtcttacaggagacctcagagctcccagcccttctcctcctgctaacccttctcacaccctcaagaggagttagaaaagaggtccttgtcattctcacctcttatggaaaatggaataagaaataatcatatcctttcttcccacccttctcctgttatttaggatttctgacaaagctggcttgagattggtcacttagagccgactgtctcctctgccttttgtttttcagcttcagagacagatccaatatagtcccagggacctgggtctctgggagaggaaggaagagggagggagcaaagagattggggtatgtcccctgtagtacactcttacctcttacttcctagactttgatttctccggcagcccagatgttcagttctcttggcccctctctaccccttactgggatccggttttcattttccggtccttttgccatacacagttacagagatcagtcaaatccataccaccactgagatctcatttattgccacagatgcacaaaataaataacccaaaatcacaaaatgtgttaaa

SEQ ID NO: 4323 - protein, 62 aa, Homo sapiens
MYPCGYFSSPLLPSLLPDRGKRKRRTNRDPEILTCCYSRTQPPGFPQSSFFLPIPTLLSRGI

SEQ ID NO: 4324 - DNA, 2248 bp, Homo sapiens
gggaggggacagggattagaagagttgttggaggagctaggcctagggatatgggaggtgtggggttgaatatctagggctgggagaatcggaaggtattggagctatttggagtggcagagatggtgcaggaggcaggtcaaggaacttgtaatagggaggtacagttaggatataggtgttgctgcttggggtggttatgtgtgtaagtaataaacgaaagggaaattgaggattaaggagccaggaagatgttgggaggaaatcaaaggtagtgtaagaaagcatggttggaggccaacttatcaatattatcaatattgatattcgaataaatatttattgaatggatgaatgtaaaaggaagtggcaggaatgaggaaacaagaaaaggagatgaaaagaggtattttgagaaatcagagagcaaagatgtaaatggagaaacaagaagtatttatccaaaaacatgttaagttgccttcaaagggagaaggttgcattgggcttaatactcttggattaaaggaagtttagtaattaatagattagtaatacttgctactagagatgccaggatgccagagaataggtggataagaggtagggagggctggagcttgagaatgagagaggttttgtttgtttttttaagagaaaaagaataggggatctggaaaaaggaagggagatcaaagattaggtgctggggactgaaaaataattttcatgtattaatactaccaaggatgatttggggaggaagacggagaaacagcaaggattatattttcctttgaagagttgctgggacctttcctaggttaggaattgtgtcttctcttatactggtggtataagaacaggaaataatacttattcctcaagggactatctgaggagaaccggagccttaccatcaaacttcggaaacggaagccagagaaaaaggtagaatggacaagtgacactgtggacaatgaacacatgggccgccgctcatccaaatgctgctgtatttatgagaaacctcgggcctttggcgagagctccacggaaagtgatgaggaggaagaagagggctgtggtcatacacactgtgtacgtggccaccgcaaaggacggcgtcgtgcaaccctaggaccgacccccaccacccctccccagcctcctgacccttcccagccccctccagggccaatgcagcactaaatccctctctcctccagcattcctgtgtctgtctggccctaaatgtatccatgtggctacttctccagccccctccttccctctcttctgcctgatagagggaagaggaagaggaggacgaacagagatcctgaaattctgacttgctgctattccagaacccagcctcctgggtttccccagtcctcatttttcctcccaatacccacccttctctctcgagggatctaggcaccttggtcccagtgtcttccttttgttctcactgccaaactgcctgtcctgggatctagttatcttggccctgcactctcaacatgagtagcgaacacttaaattgggttttcaacagtcccagctttcactgccagggtcccagtcagattccaggaatttgcgccctaactttgcttgctaatcctggtttagagctatcccactaaaatatttaatcctaattcttagtccttgcctgtgagatatgaggtcttacaggagacctcagagctcccagcccttctcctcctgctaacccttctcacaccctcaagaggagttagaaaagaggtccttgtcattctcacctcttatggaaaatggaataagaaataatcatatcctttcttcccacccttctcctgttatttaggatttctgacaaagctggcttgagattggtcacttagagccgactgtctcctctgccttttgtttttcagcttcagagacagatccaatatagtcccagggacctgggtctctgggagaggaaggaagagggagggagcaaagagattggggtatgtcccctgtagtacactcttacctcttacttcctagactttgatttctccggcagcccagatgttcagttctcttggcccctctctaccccttactgggatccggttttcattttccggtccttttgccatacacagttacagagatcagtcaaatccataccaccactgagatctcatttattgccacagatgcacaaaataaataacccaaaatcacaaaatgtgttaaa

SEQ ID NO: 4325 - protein, 74 aa, Homo sapiens; identical to SEQ ID NO: 4309

SEQ ID NO: 4326 - DNA, 1545 bp, Homo sapiens
ggattagaagagttgttggaggagctaggcctagggatatgggaggtgtggggttgaatatctagggctgggagaatcggaaggtattggagctatttggagtggcagagatggtgcaggaggatgatttggggaggaagacggagaaacagcaaggattatattttcctttgaagagttgctgggacctttcctaggagaaccggagccttaccatcaaacttcggaaacggaagccagagaaaaaggtagaatggacaagtgacactgtggacaatgaacacatgggccgccgctcatccaaatgctgctgtatttatgagaaacctcgggcctttggcgagagctccacggaaagtgatgaggaggaagaagagggctgtggtcatacacactgtgtacgtggccaccgcaaaggacggcgtcgtgcaaccctaggaccgacccccaccacccctccccagcctcctgacccttcccagccccctccagggccaatgcagcactaaatccctctctcctccagcattcctgtgtctgtctggccctaaatgtatccatgtggctacttctccagccccctccttccctctcttctgcctgatagagggaagaggaagaggaggacgaacagagatcctgaaattctgacttgctgctattccagaacccagcctcctgggtttccccagtcctcatttttcctcccaatacccacccttctctctcgagggatctaggcaccttggtcccagtgtcttccttttgttctcactgccaaactgcctgtcctgggatctagttatcttggccctgcactctcaacatgagtagcgaacacttaaattgggttttcaacagtcccagctttcactgccagggtcccagtcagattccaggaatttgcgccctaactttgcttgctaatcctggtttagagctatcccactaaaatatttaatcctaattcttagtccttgcctgtgagatatgaggtcttacaggagacctcagagctcccagcccttctcctcctgctaacccttctcacaccctcaagaggagttagaaaagaggtccttgtcattctcacctcttatggaaaatggaataagaaataatcatatcctttcttcccacccttctcctgttatttaggatttctgacaaagctggcttgagattggtcacttagagccgactgtctcctctgccttttgtttttcagcttcagagacagatccaatatagtcccagggacctgggtctctgggagaggaaggaagagggagggagcaaagagattggggtatgtcccctgtagtacactcttacctcttacttcctagactttgatttctccggcagcccagatgttcagttctcttggcccctctctaccccttactgggatccggttttcattttccggtccttttgccatacacagttacagagatcagtcaaatccataccaccactgagatctcatttattgccacagatgcacaaaataaataacccaaaatcacaaaatgtgttaaa

SEQ ID NO: 4327 - protein, 74 aa, Homo sapiens; identical to SEQ ID NO: 4309

SEQ ID NO: 4328 - DNA, 2387 bp, Homo sapiens
agagttgttggaggagctaggcctagggatatgggaggtgtggggttgaatatctagggctgggagaatcggaaggtattggagctatttggagtggcagagatggtgcaggaggcaggtcaaggaacttgtaatagggaggtacagttaggatataggtgttgctgcttggggtggttatgtgtgtaagtaataaacgaaagggaaattgaggattaaggagccaggaagatgttgggaggaaatcaaaggtagtgtaagaaagcatggttggaggccaacttatcaatattatcaatattgatattcgaataaatatttattgaatggatgaatgtaaaaggaagtggcaggaatgaggaaacaagaaaaggagatgaaaagaggtattttgagaaatcagagagcaaagatgtaaatggagaaacaagaagtatttatccaaaaacatgttaagttgccttcaaagggagaaggttgcattgggcttaatactcttggattaaaggaagtttagtaattaatagattagtaatacttgctactagagatgccaggatgccagagaataggtggataagaggtagggagggctggagcttgagaatgagagaggttttgtttgtttttttaagagaaaaagaataggggatctggaaaaaggaagggagatcaaagattaggtgctggggactgaaaaataattttcatgtattaatactaccaaggatgatttggggaggaagacggagaaacagcaaggattatattttcctttgaagagttgctgggacctttcctaggttaggaattgtgtcttctcttatactggtggtataagaacaggaaataatacttattcctcaagggactatctgaggtaaaagacctgttctgttttatcttctgtcagctcctctggtgctatgcctatggtactgattgagctaaagaagaaaagagaggaggttccctgggagggagtgggaaaggttagtaagaggggactagataggtatgctcatccttaaccttctaggagaaccggagccttaccatcaaacttcggaaacggaagccagagaaaaaggtagaatggacaagtgacactgtggacaatgaacacatgggccgccgctcatccaaatgctgctgtatttatgagaaacctcgggcctttggcgagagctccacggaaagtgatgaggaggaagaagagggctgtggtcatacacactgtgtacgtggccaccgcaaaggacggcgtcgtgcaaccctaggaccgacccccaccacccctccccagcctcctgacccttcccagccccctccagggccaatgcagcactaaatccctctctcctccagcattcctgtgtctgtctggccctaaatgtatccatgtggctacttctccagccccctccttccctctcttctgcctgatagagggaagaggaagaggaggacgaacagagatcctgaaattctgacttgctgctattccagaacccagcctcctgggtttccccagtcctcatttttcctcccaatacccacccttctctctcgagggatctaggcaccttggtcccagtgtcttccttttgttctcactgccaaactgcctgtcctgggatctagttatcttggccctgcactctcaacatgagtagcgaacacttaaattgggttttcaacagtcccagctttcactgccagggtcccagtcagattccaggaatttgcgccctaactttgcttgctaatcctggtttagagctatcccactaaaatatttaatcctaattcttagtccttgcctgtgagatatgaggtcttacaggagacctcagagctcccagcccttctcctcctgctaacccttctcacaccctcaagaggagttagaaaagaggtccttgtcattctcacctcttatggaaaatggaataagaaataatcatatcctttcttcccacccttctcctgttatttaggatttctgacaaagctggcttgagattggtcacttagagccgactgtctcctctgccttttgtttttcagcttcagagacagatccaatatagtcccagggacctgggtctctgggagaggaaggaagagggagggagcaaagagattggggtatgtcccctgtagtacactcttacctcttacttcctagactttgatttctccggcagcccagatgttcagttctcttggcccctctctaccccttactgggatccggttttcattttccggtccttttgccatacacagttacagagatcagtcaaatccataccaccactgagatctcatttattgccacagatgcacaaaataaataacccaaaatcacaaaatgtgttaaa

SEQ ID NO: 4329 - protein, 74 aa, Homo sapiens; identical to SEQ ID NO: 4309

SEQ ID NO: 4330 - DNA, 1473 bp, Homo sapiens
gggatatgggaggtgtggggttgaatatctagggctgggagaatcggaaggatgatttggggaggaagacggagaaacagcaaggattatattttcctttgaagagttgctgggacctttcctaggagaaccggagccttaccatcaaacttcggaaacggaagccagagaaaaaggtagaatggacaagtgacactgtggacaatgaacacatgggccgccgctcatccaaatgctgctgtatttatgagaaacctcgggcctttggcgagagctccacggaaagtgatgaggaggaagaagagggctgtggtcatacacactgtgtacgtggccaccgcaaaggacggcgtcgtgcaaccctaggaccgacccccaccacccctccccagcctcctgacccttcccagccccctccagggccaatgcagcactaaatccctctctcctccagcattcctgtgtctgtctggccctaaatgtatccatgtggctacttctccagccccctccttccctctcttctgcctgatagagggaagaggaagaggaggacgaacagagatcctgaaattctgacttgctgctattccagaacccagcctcctgggtttccccagtcctcatttttcctcccaatacccacccttctctctcgagggatctaggcaccttggtcccagtgtcttccttttgttctcactgccaaactgcctgtcctgggatctagttatcttggccctgcactctcaacatgagtagcgaacacttaaattgggttttcaacagtcccagctttcactgccagggtcccagtcagattccaggaatttgcgccctaactttgcttgctaatcctggtttagagctatcccactaaaatatttaatcctaattcttagtccttgcctgtgagatatgaggtcttacaggagacctcagagctcccagcccttctcctcctgctaacccttctcacaccctcaagaggagttagaaaagaggtccttgtcattctcacctcttatggaaaatggaataagaaataatcatatcctttcttcccacccttctcctgttatttaggatttctgacaaagctggcttgagattggtcacttagagccgactgtctcctctgccttttgtttttcagcttcagagacagatccaatatagtcccagggacctgggtctctgggagaggaaggaagagggagggagcaaagagattggggtatgtcccctgtagtacactcttacctcttacttcctagactttgatttctccggcagcccagatgttcagttctcttggcccctctctaccccttactgggatccggttttcattttccggtccttttgccatacacagttacagagatcagtcaaatccataccaccactgagatctcatttattgccacagatgcacaaaataaataacccaaaatcacaaaatgtgttaaa

SEQ ID NO: 4331 - protein, 74 aa, Homo sapiens; identical to SEQ ID NO: 4309

SEQ ID NO: 4332 - DNA, 512 bp, Homo sapiens
gcctgagtcccagagggtgggcctggggaagctggatcctggaaggtaggagaaaataggaattctcacctcttatggaaaatggaataagaaataatcatatcctttcttcccacccttctcctgttatttaggatttctgacaaagctggcttgagattggtcacttagagccgactgtctcctctgccttttgtttttcagcttcagagacagatccaatatagtcccagggacctgggtctctgggagaggaaggaagagggagggagcaaagagattggggtatgtcccctgtagtacactcttacctcttacttcctagactttgatttctccggcagcccagatgttcagttctcttggcccctctctaccccttactgggatccggttttcattttccggtccttttgccatacacagttacagagatcagtcaaatccataccaccactgagatctcatttattgccacagatgcacaaaataaataacccaaaatcacaaaa

SEQ ID NO: 4333 - protein, 36 aa, Homo sapiens
MFSSLGPSLPLTGIRFSFSGPFAIHSYRDQSNPYHH

SEQ ID NO: 4334 - DNA, 3350 bp, Homo sapiens
cccaaaccttacccgggaagcaggagaaccagatgaggcgttacgcaaggcctggtgtttacctcccgtgggagcctcctccctccctataaagcctgatgtggtggagagatttgacgagactgagactctggttgaagagagaggcaatcccaggagaggggcggaaagcggcaaaagttaatgcgggagtcggagagaagggcatctacacagcaagcagcaggggcggcccgccatctgcgcgctcgaaggcggtcacggtggtcgcggaaggggcggcgtccagatcctggctttccatggatgcgcccgagctgggcccggggctggtggagcgtctggagcagctggcgacgtgtcctctgtgcgggggctccttcgaggacccggtgcttctggcgtgcgagcacagcttctgccgcgcgtgtctggcccgccgctgggggactccgccggcgaccggcaccgaggcttcccccaccgcctgtccctgctgcggcctgccgtgtccccgccgcagcctgaggtctaatgtgcggctggcggtggaggtgcgaatcagccgcgagctgcgagagaagctggctgagcctggggcccgtgcggggagacgccgaggggggcgcatccccaccatgggctgcctggacctgcccggagaggatatgaggaagacatggagacgatttgaagtcccaacatccaagtcatctaattcagaggatgatctccctgaagattatccagtggtcaaaaaaatgcttcatagactgacagccgacctgaccctggaccctgggaccgcacaccgccgcctgctcatctccgccgaccgccgcagcgtacaactggccccaccagggacgcccgcgccccctgacggccccaagcgcttcgatcagctcccagctgtgctgggtgcgcagggcttcggggccggccgccactgctgggaggtggagactgcggacgccgcctcctgcagagactcttctggggaggatgcggacgacgaggagagccactatgcagtgggcgcggccggggaatcagtgcaacgcaagggctgcgtaaggctgtgccctgcgggggccgtgtgggccgtggagggccgcggcggccgcctgtgggccctcacggcacccgaacccaccctgctgggcggtgttgagcccccgccgcggcgcattcgcgtggacctggactgggagcggggccgcgtggccttctacgacggccgctcactcgacctgctttacgccttccaggcgcctggccccctgggggagcgcatcttcccgctgttctgcacctgcgaccctcgtgctccgctccgcattgtaccagcggaaagctgagtctcgtctccaactagaagtttggcccggccactggccctgcagctgctttttgggggtggaattccccactcatttctgggaacacattcacacgcccattgcaggagtattaatagcaacccacattttcgccccaaaataatgagacctcacctggtctccacgtttccacgtccctgctcaaaaccaaatccattcctgccttctggctctcagaatcttctctcccctacagctactacagtacttcctgacttctcccattcaaaccattctaggcctgcaatggggaacaggccctccccatcagtattggtaaagtgaccatgattcctacatagaggctctgctggtcaaatacttgactcccactcttgccactcctagctccagaagggctcagggccttccccacagatctaaggactgggctaccctgcctgtccactgaggtttctcctaaaacaagaggcttgactctggtctgggccctgtggccctctgggaagctttgtacctcttttgcaggatctgggggtggggagggacaagctagttccccaacctcctatgactgctttctatgctcacagccttttttccataagaaccttcttgaaacttctccccgcacatactcacggaaaggaaccaatggtgctatttcccctctctcctcctcaacctgggaatacttcagacatctccaaactcatccttgtgtatagtctcacacccttccccataagtataaatgggcccatatttaacacattttgtgattttgggttatttattttgtgcatctgtggcaataaatgagatctcagtggtggtatggatttgactgatctctgtaactgtgtatggcaaaaggaccggaaaatgaaaaccggatcccagtaaggggtagagaggggccaagagaactgaacatctgggctgccggagaaatcaaagtctaggaagtaagaggtaagagtgtactacaggggacataccccaatctctttgctccctccctcttccttcctctcccagagacccaggtccctgggactatattggatctgtctctgaagctgaaaaacaaaaggcagaggagacagtcggctctaagtgaccaatctcaagccagctttgtcagaaatcctaaataacaggagaagggtgggaagaaaggatatgattatttcttattccattttccataagaggtgagaatgacaaggacctcttttctaactcctcttgagggtgtgagaagggttagcaggaggagaagggctgggagctctgaggtctcctgtaagacctcatatctcacaggcaaggactaagaattaggattaaatattttagtgggatagctctaaaccaggattagcaagcaaagttagggcgcaaattcctggaatctgactgggaccctggcagtgaaagctgggactgttgaaaacccaatttaagtgttcgctactcatgttgagagtgcagggccaagataactagatcccaggacaggcagtttggcagtgagaacaaaaggaagacactgggaccaaggtgcctagatccctcgagagagaagggtgggtattgggaggaaaaatgaggactggggaaacccaggaggctgggttctggaatagcagcaagtcagaatttcaggatctctgttcgtcctcctcttcctcttccctctatcaggcagaagagagggaaggagggggctggagaagtagccacatggatacatttagggccagacagacacaggaatgctggaggagagagggatttagtgctgcattggccctggagggggctgggaagggtcaggaggctggggaggggtggtgggggtcggtcctagggttgcacgacgccgtcctttgcggtggccacgtacacagtgtgtatgaccacagccctcttcttcctcctcatcactttccgtggagctctcgccaaaggcccgaggtt

SEQ ID NO: 4335 - protein, 420 aa, Homo sapiens
MWWRDLTRLRLWLKREAIPGEGRKAAKVNAGVGEKGIYTASSRGGPPSARSKAVTVVAEGAASRSWLSMDAPELGPGLVERLEQLATCPLCGGSFEDPVLLACEHSFCRACLARRWGTPPATGTEASPTACPCCGLPCPRRSLRSNVRLAVEVRISRELREKLAEPGARAGRRRGGRIPTMGCLDLPGEDMRKTWRRFEVPTSKSSNSEDDLPEDYPVVKKMLHRLTADLTLDPGTAHRRLLISADRRSVQLAPPGTPAPPDGPKRFDQLPAVLGAQGFGAGRHCWEVETADAASCRDSSGEDADDEESHYAVGAAGESVQRKGCVRLCPAGAVWAVEGRGGRLWALTAPEPTLLGGVEPPPRRIRVDLDWERGRVAFYDGRSLDLLYAFQAPGPLGERIFPLFCTCDPRAPLRIVPAES

SEQ ID NO: 4336 - DNA, 3152 bp, Homo sapiens
cccaaaccttacccgggaagcaggagaaccagatgaggcgttacgcaaggcctggtgtttacctcccgtgggagcctcctccctccctataaagcctgatgtggtggagagatttgacgagactgagactctggttgaagagagaggcaatcccaggagaggggcggaaagcggcaaaagttaatgcgggagtcggagagaagggcatctacacagcaagcagcaggggcggcccgccatctgcgcgctcgaaggcggtcacggtggtcgcggaaggggcggcgtccagatcctggctttccatggatgcgcccgagctgggcccggggctggtggagcgtctggagcagctggcgacgtgtcctctgtgcgggggctccttcgaggacccggtgcttctggcgtgcgagcacagcttctgccgcgcgtgtctggcccgccgctgggggactccgccggcgaccggcaccgaggcttcccccaccgcctgtccctgctgcggcctgccgtgtccccgccgcagcctgaggtctaatgtgcggctggcggtggaggtgcgaatcagccgcgagctgcgagagaagctggctgagcctggggcccgtgcggggagacgccgaggggggcgcatccccaccatgggctgcctggacctgcccggagaggatatgaggaagacatggagacgatttgaagtcccaacatccaagtcatctaattcagaggatgatctccctgaagattatccagtggtcaaaaaaatgcttcatagactgacagccgacctgaccctggaccctgggaccgcacaccgccgcctgctcatctccgccgaccgccgcagcgtacaactggccccaccagggacgcccgcgccccctgacggccccaagcgcttcgatcagctcccagctgtgctgggtgcgcagggcttcggggccggccgccactgctgggaggtggagactgcggacgccgcctcctgcagagactcttctggggaggatgcggacgacgaggagagccactatgcagtgggcgcggccggggaatcagtgcaacgcaagggctgcgcgcctggccccctgggggagcgcatcttcccgctgttctgcacctgcgaccctcgtgctccgctccgcattgtaccagcggaaagctgagtctcgtctccaactagaagtttggcccggccactggccctgcagctgctttttgggggtggaattccccactcatttctgggaacacattcacacgcccattgcaggagtattaatagcaacccacattttcgccccaaaataatgagacctcacctggtctccacgtttccacgtccctgctcaaaaccaaatccattcctgccttctggctctcagaatcttctctcccctacagctactacagtacttcctgacttctcccattcaaaccattctaggcctgcaatggggaacaggccctccccatcagtattggtaaagtgaccatgattcctacatagaggctctgctggtcaaatacttgactcccactcttgccactcctagctccagaagggctcagggccttccccacagatctaaggactgggctaccctgcctgtccactgaggtttctcctaaaacaagaggcttgactctggtctgggccctgtggccctctgggaagctttgtacctcttttgcaggatctgggggtggggagggacaagctagttccccaacctcctatgactgctttctatgctcacagccttttttccataagaaccttcttgaaacttctccccgcacatactcacggaaaggaaccaatggtgctatttcccctctctcctcctcaacctgggaatacttcagacatctccaaactcatccttgtgtatagtctcacacccttccccataagtataaatgggcccatatttaacacattttgtgattttgggttatttattttgtgcatctgtggcaataaatgagatctcagtggtggtatggatttgactgatctctgtaactgtgtatggcaaaaggaccggaaaatgaaaaccggatcccagtaaggggtagagaggggccaagagaactgaacatctgggctgccggagaaatcaaagtctaggaagtaagaggtaagagtgtactacaggggacataccccaatctctttgctccctccctcttccttcctctcccagagacccaggtccctgggactatattggatctgtctctgaagctgaaaaacaaaaggcagaggagacagtcggctctaagtgaccaatctcaagccagctttgtcagaaatcctaaataacaggagaagggtgggaagaaaggatatgattatttcttattccattttccataagaggtgagaatgacaaggacctcttttctaactcctcttgagggtgtgagaagggttagcaggaggagaagggctgggagctctgaggtctcctgtaagacctcatatctcacaggcaaggactaagaattaggattaaatattttagtgggatagctctaaaccaggattagcaagcaaagttagggcgcaaattcctggaatctgactgggaccctggcagtgaaagctgggactgttgaaaacccaatttaagtgttcgctactcatgttgagagtgcagggccaagataactagatcccaggacaggcagtttggcagtgagaacaaaaggaagacactgggaccaaggtgcctagatccctcgagagagaagggtgggtattgggaggaaaaatgaggactggggaaacccaggaggctgggttctggaatagcagcaagtcagaatttcaggatctctgttcgtcctcctcttcctcttccctctatcaggcagaagagagggaaggagggggctggagaagtagccacatggatacatttagggccagacagacacaggaatgctggaggagagagggatttagtgctgcattggccctggagggggctgggaagggtcaggaggctggggaggggtggtgggggtcggtcctagggttgcacgacgccgtcctttgcggtggccacgtacacagtgtgtatgaccacagccctcttcttcctcctcatcactttccgtggagctctcgccaaaggcccgaggtt

SEQ ID NO: 4337 - protein, 354 aa, Homo sapiens
MWWRDLTRLRLWLKREAIPGEGRKAAKVNAGVGEKGIYTASSRGGPPSARSKAVTVVAEGAASRSWLSMDAPELGPGLVERLEQLATCPLCGGSFEDPVLLACEHSFCRACLARRWGTPPATGTEASPTACPCCGLPCPRRSLRSNVRLAVEVRISRELREKLAEPGARAGRRRGGRIPTMGCLDLPGEDMRKTWRRFEVPTSKSSNSEDDLPEDYPVVKKMLHRLTADLTLDPGTAHRRLLISADRRSVQLAPPGTPAPPDGPKRFDQLPAVLGAQGFGAGRHCWEVETADAASCRDSSGEDADDEESHYAVGAAGESVQRKGCAPGPLGERIFPLFCTCDPRAPLRIVPAES

SEQ ID NO: 4338 - DNA, 2482 bp, Homo sapiens
ggcgttacgcaaggcctggtgtttacctcccgtgggagcctcctccctccctataaagcctgatgtggtggagagatttgacgagactgagactctggttgaagagagaggcaatcccaggagaggggcggaaagcggcaaaagttaatgcgggagtcggagagaagggcatctacacagcaagcagcaggggcggcccgccatctgcgcgctcgaaggcggtcacggtggtcgcggaaggggcggcgtccagatcctggctttccatggatgcgcccgagctgggcccggggctggtggagcgtctggagcagctggcgacgtgtcctctgtgcgggggctccttcgaggacccggtgcttctggcgtgcgagcacagcttctgccgcgcgtgtctggcccgccgctgggggactccgccggcgaccggcaccgaggcttcccccaccgcctgtccctgctgcggcctgccgtgtccccgccgcagcctgaggtctaatgtgcggctggcggtggaggtgcgaatcagccgcgagagctgctttttgggggtggaattccccactcatttctgggaacacattcacacgcccattgcaggagtattaatagcaacccacattttcgccccaaaataatgagacctcacctggtctccacgtttccacgtccctgctcaaaaccaaatccattcctgccttctggctctcagaatcttctctcccctacagctactacagtacttcctgacttctcccattcaaaccattctaggcctgcaatggggaacaggccctccccatcagtattggtaaagtgaccatgattcctacatagaggctctgctggtcaaatacttgactcccactcttgccactcctagctccagaagggctcagggccttccccacagatctaaggactgggctaccctgcctgtccactgaggtttctcctaaaacaagaggcttgactctggtctgggccctgtggccctctgggaagctttgtacctcttttgcaggatctgggggtggggagggacaagctagttccccaacctcctatgactgctttctatgctcacagccttttttccataagaaccttcttgaaacttctccccgcacatactcacggaaaggaaccaatggtgctatttcccctctctcctcctcaacctgggaatacttcagacatctccaaactcatccttgtgtatagtctcacacccttccccataagtataaatgggcccatatttaacacattttgtgattttgggttatttattttgtgcatctgtggcaataaatgagatctcagtggtggtatggatttgactgatctctgtaactgtgtatggcaaaaggaccggaaaatgaaaaccggatcccagtaaggggtagagaggggccaagagaactgaacatctgggctgccggagaaatcaaagtctaggaagtaagaggtaagagtgtactacaggggacataccccaatctctttgctccctccctcttccttcctctcccagagacccaggtccctgggactatattggatctgtctctgaagctgaaaaacaaaaggcagaggagacagtcggctctaagtgaccaatctcaagccagctttgtcagaaatcctaaataacaggagaagggtgggaagaaaggatatgattatttcttattccattttccataagaggtgagaatgacaaggacctcttttctaactcctcttgagggtgtgagaagggttagcaggaggagaagggctgggagctctgaggtctcctgtaagacctcatatctcacaggcaaggactaagaattaggattaaatattttagtgggatagctctaaaccaggattagcaagcaaagttagggcgcaaattcctggaatctgactgggaccctggcagtgaaagctgggactgttgaaaacccaatttaagtgttcgctactcatgttgagagtgcagggccaagataactagatcccaggacaggcagtttggcagtgagaacaaaaggaagacactgggaccaaggtgcctagatccctcgagagagaagggtgggtattgggaggaaaaatgaggactggggaaacccaggaggctgggttctggaatagcagcaagtcagaatttcaggatctctgttcgtcctcctcttcctcttccctctatcaggcagaagagagggaaggagggggctggagaagtagccacatggatacatttagggccagacagacacaggaatgctggaggagagagggatttagtgctgcattggccctggagggggctgggaagggtcaggaggctggggaggggtggtgggggtcggtcctagggttgcacgacgccgtcctttgcggtggccacgtacacagtgtgtatgaccacagccctcttcttcctcctcatcactttccgtggagctctcgccaaaggcccgaggtt

SEQ ID NO: 4339 - protein, 191 aa, Homo sapiens
MWWRDLTRLRLWLKREAIPGEGRKAAKVNAGVGEKGIYTASSRGGPPSARSKAVTVVAEGAASRSWLSMDAPELGPGLVERLEQLATCPLCGGSFEDPVLLACEHSFCRACLARRWGTPPATGTEASPTACPCCGLPCPRRSLRSNVRLAVEVRISRESCFLGVEFPTHFWEHIHTPIAGVLIATHIFAPK

SEQ ID NO: 4340 - DNA, 874 bp, Homo sapiens
ggaggaagaagagggctgtggtcatacacactgtgtacgtggccaccgcaaaggacggcgtcgtgcaaccctaggaccgacccccaccacccctccccagcctcctgacccttcccagccccctccagggccaatgcagcactaaatccctctctcctccagcattcctgtgtctgtctggccctaaatgtatccatgtggctacttctccagccccctccttccctctcttctgcctgatagagggaagaggaagaggaggacgaacagagatcctgaaattctgacttgctgctattccagaacccagcctcctgggtttccccagtcctcatttttcctcccaatacccacccttctctcctgctaacccttctcacaccctcaagaggagttagaaaagaggtccttgtcattctcacctcttatggaaaatggaataagaaataatcatatcctttcttcccacccttctcctgttatttaggatttctgacaaagctggcttgagattggtcacttagagccgactgtctcctctgccttttgtttttcagcttcagagacagatccaatatagtcccagggacctgggtctctgggagaggaaggaagagggagggagcaaagagattggggtatgtcccctgtagtacactcttacctcttacttcctagactttgatttctccggcagcccagatgttcagttctcttggcccctctctaccccttactgggatccggttttcattttccggtccttttgccatacacagttacagagatcagtcaaatccataccaccactgagatctcatttattgccacagatgcacaaaataaataacccaaaatcacaaaatgtgttaaa

SEQ ID NO: 4341 - protein, 60 aa, Homo sapiens
MYPCGYFSSPLLPSLLPDRGKRKRRTNRDPEILTCCYSRTQPPGFPQSSFFLPIPTLLSC

SEQ ID NO: 4342 - DNA, 2205 bp, Homo sapiens
cccaaaccttacccgggaagcaggagaaccagatgaggcgttacgcaaggcctggtgtttacctcccgtgggagcctcctccctccctataaagcctgatgtggtggagagatttgacgagactgagactctggttgaagagagaggcaatcccaggagaggggcggaaagcggcaaaagttaatgcgggagtcggagagaagggcatctacacagcaagcagcaggggcggcccgccatctgcgcgctcgaaggcggtcacggtggtcgcggaaggggcggcgtccagatcctggctttccatggatgcgcccgagctgggcccggggctggtggagcgtctggagcagctggcgacgtgtcctctgtgcgggggctccttcgaggacccggtgcttctggcgtgcgagcacagcttctgccgcgcgtgtctggcccgccgctgggggactccgccggcgaccggcaccgaggcttcccccaccgcctgtccctgctgcggcctgccgtgtccccgccgcagcctgaggtctaatgtgcggctggcggtggaggtgcgaatcagccgcgagctgcgagagaagctggctgagcctggggcccgtgcggggagacgccgaggggggcgcatccccaccatgggctgcctggacctgcccggagaggatatgaggaagacatggagacgatttgaagtcccaacatccaagtcatctaattcagaggatgatctccctgaagattatccagtggtcaaaaaaatgcttcatagactgacagccgacctgaccctggaccctgggaccgcacaccgccgcctgctcatctccgccgaccgccgcagcgtacaactggccccaccagggacgcccgcgccccctgacggccccaagcgcttcgatcagctcccagctgtgctgggtgcgcagggcttcggggccggccgccactgctgggaggtggagactgcggacgccgcctcctgcagagactcttctggggaggatgcggacgacgaggagagccactatgcagtgggcgcggccggggaatcagtgcaacgcaagggctgcgtaaggctgtgccctgcgggggccgtgtgggccgtggagggccgcggcggccgcctgtgggccctcacggcacccgaacccaccctgctgggcggtgttgagcccccgccgcggcgcattcgcgtggacctggactgggagcggggccgcgtggccttctacgacggccgctcactcgacctgctttacgccttccaggcgcctggccccctgggggagcgcatcttcccgctgttctgcacctgcgaccctcgtgctccgctccgcattgtaccagcggaaagctgagtctcgtctccaactagaagtttggcccggccactggccctgcagctgctttttgggggtggaattccccactcatttctgggaacacattcacacgcccattgcaggagtattaatagcaacccacattttcgccccaaaataatgagacctcacctggtctccacgtttccacgtccctgctcaaaaccaaatccattcctgccttctggctctcagaatcttctctcccctacagctactacagtacttcctgacttctcccattcaaaccattctaggcctgcaatggggaacaggccctccccatcagtattggtaaagtgaccatgattcctacatagaggctctgctggtcaaatacttgactcccactcttgccactcctagctccagaagggctcagggccttccccacagatctaaggactgggctaccctgcctgtccactgaggtttctcctaaaacaagaggcttgactctggtctgggccctgtggccctctgggaagctttgtacctcttttgcaggatctgggggtggggagggacaagctagttccccaacctcctatgactgctttctatgctcacagccttttttccataagaaccttcttgaaacttctccccgcacatactcacggaaaggaaccaatggtgctatttcccctctctcctcctcaacctgggaatacttcagacatctccaaactcatccttgtgtatagtctcacacccttccccataagtataaatgggcccatatttaacacattttgtgattttgggttatttattttgtgcatctgtggcaataaatgagatctcagtggtggtatgg

SEQ ID NO: 4343 - protein, 420 aa, Homo sapiens; identical to SEQ ID NO: 4335

SEQ ID NO: 4344 - DNA, 2007 bp, Homo sapiens
cccaaaccttacccgggaagcaggagaaccagatgaggcgttacgcaaggcctggtgtttacctcccgtgggagcctcctccctccctataaagcctgatgtggtggagagatttgacgagactgagactctggttgaagagagaggcaatcccaggagaggggcggaaagcggcaaaagttaatgcgggagtcggagagaagggcatctacacagcaagcagcaggggcggcccgccatctgcgcgctcgaaggcggtcacggtggtcgcggaaggggcggcgtccagatcctggctttccatggatgcgcccgagctgggcccggggctggtggagcgtctggagcagctggcgacgtgtcctctgtgcgggggctccttcgaggacccggtgcttctggcgtgcgagcacagcttctgccgcgcgtgtctggcccgccgctgggggactccgccggcgaccggcaccgaggcttcccccaccgcctgtccctgctgcggcctgccgtgtccccgccgcagcctgaggtctaatgtgcggctggcggtggaggtgcgaatcagccgcgagctgcgagagaagctggctgagcctggggcccgtgcggggagacgccgaggggggcgcatccccaccatgggctgcctggacctgcccggagaggatatgaggaagacatggagacgatttgaagtcccaacatccaagtcatctaattcagaggatgatctccctgaagattatccagtggtcaaaaaaatgcttcatagactgacagccgacctgaccctggaccctgggaccgcacaccgccgcctgctcatctccgccgaccgccgcagcgtacaactggccccaccagggacgcccgcgccccctgacggccccaagcgcttcgatcagctcccagctgtgctgggtgcgcagggcttcggggccggccgccactgctgggaggtggagactgcggacgccgcctcctgcagagactcttctggggaggatgcggacgacgaggagagccactatgcagtgggcgcggccggggaatcagtgcaacgcaagggctgcgcgcctggccccctgggggagcgcatcttcccgctgttctgcacctgcgaccctcgtgctccgctccgcattgtaccagcggaaagctgagtctcgtctccaactagaagtttggcccggccactggccctgcagctgctttttgggggtggaattccccactcatttctgggaacacattcacacgcccattgcaggagtattaatagcaacccacattttcgccccaaaataatgagacctcacctggtctccacgtttccacgtccctgctcaaaaccaaatccattcctgccttctggctctcagaatcttctctcccctacagctactacagtacttcctgacttctcccattcaaaccattctaggcctgcaatggggaacaggccctccccatcagtattggtaaagtgaccatgattcctacatagaggctctgctggtcaaatacttgactcccactcttgccactcctagctccagaagggctcagggccttccccacagatctaaggactgggctaccctgcctgtccactgaggtttctcctaaaacaagaggcttgactctggtctgggccctgtggccctctgggaagctttgtacctcttttgcaggatctgggggtggggagggacaagctagttccccaacctcctatgactgctttctatgctcacagccttttttccataagaaccttcttgaaacttctccccgcacatactcacggaaaggaaccaatggtgctatttcccctctctcctcctcaacctgggaatacttcagacatctccaaactcatccttgtgtatagtctcacacccttccccataagtataaatgggcccatatttaacacattttgtgattttgggttatttattttgtgcatctgtggcaataaatgagatctcagtggtggtatgg

SEQ ID NO: 4345 - protein, 354 aa, Homo sapiens; identical to SEQ ID NO: 4337

SEQ ID NO: 4346 - DNA, 1337 bp, Homo sapiens
ggcgttacgcaaggcctggtgtttacctcccgtgggagcctcctccctccctataaagcctgatgtggtggagagatttgacgagactgagactctggttgaagagagaggcaatcccaggagaggggcggaaagcggcaaaagttaatgcgggagtcggagagaagggcatctacacagcaagcagcaggggcggcccgccatctgcgcgctcgaaggcggtcacggtggtcgcggaaggggcggcgtccagatcctggctttccatggatgcgcccgagctgggcccggggctggtggagcgtctggagcagctggcgacgtgtcctctgtgcgggggctccttcgaggacccggtgcttctggcgtgcgagcacagcttctgccgcgcgtgtctggcccgccgctgggggactccgccggcgaccggcaccgaggcttcccccaccgcctgtccctgctgcggcctgccgtgtccccgccgcagcctgaggtctaatgtgcggctggcggtggaggtgcgaatcagccgcgagagctgctttttgggggtggaattccccactcatttctgggaacacattcacacgcccattgcaggagtattaatagcaacccacattttcgccccaaaataatgagacctcacctggtctccacgtttccacgtccctgctcaaaaccaaatccattcctgccttctggctctcagaatcttctctcccctacagctactacagtacttcctgacttctcccattcaaaccattctaggcctgcaatggggaacaggccctccccatcagtattggtaaagtgaccatgattcctacatagaggctctgctggtcaaatacttgactcccactcttgccactcctagctccagaagggctcagggccttccccacagatctaaggactgggctaccctgcctgtccactgaggtttctcctaaaacaagaggcttgactctggtctgggccctgtggccctctgggaagctttgtacctcttttgcaggatctgggggtggggagggacaagctagttccccaacctcctatgactgctttctatgctcacagccttttttccataagaaccttcttgaaacttctccccgcacatactcacggaaaggaaccaatggtgctatttcccctctctcctcctcaacctgggaatacttcagacatctccaaactcatccttgtgtatagtctcacacccttccccataagtataaatgggcccatatttaacacattttgtgattttgggttatttattttgtgcatctgtggcaataaatgagatctcagtggtggtatgg

SEQ ID NO: 4347 - protein, 191 aa, Homo sapiens; identical to SEQ ID NO: 4339

SEQ ID NO: 4348 - DNA, 736 bp, Homo sapiens
atcaaaaaggacctgatcactttttagggctaaaaggaagaaaatctaacacagactttcattcaattcccttccctcccttcttctttccttacctgtcagtctatgaagcatttttttgaccactggataatcttcagggagatcatcctctgaattagatgacttggatgttgggacttcaaatctacacagatgaggggaagggtcaggaaatcagccctctgatcctaatgcccccacgcataccccactcacatctctggaggaagaagggatgagactataccccagaaaacctgcctattaatgggaacaaaggtgtgggcccagtgagaacgtgatggctatggcagctggtgagaaaaggagggaacagaaaagtggaactcaccgtctccatgtcttcctcatatcctaggatgggcagaaacaaacatggatgtgagctctgggcttcattccctggggcatccttccctatctctcccctcctcaggtgagttctgtctgagttagcagtgtccctcctcacctttcagagtgatctcacctctttacacactgtgctcctttccctctcattctcctccttcacctttcatgatccctccttcctctcaccccatcacttttccctcatcctccatcacacagaccaaacacacacccagagccctcgggctaagagttggtatataaaagccttacaataaagctgcttcccctcttgcaa

SEQ ID NO: 4349 - protein, 32 aa, Homo sapiens
MIPPSSHPITFPSSSITQTKHTPRALGLRVGI

SEQ ID NO: 4350 - DNA, 2042 bp, Homo sapiens
attacacattcaaagtatccatttgttctcaagaggtagcaagaaacagtatccacagtggactccggggctcctacagacttggcacagcttcctacagtcttgaaacagccctgttgttctgtcatggccagtgggcagtttgtgaacaaactgcaagaggaagtgatctgccccatctgcctggacattctgcagaaacctgtcaccatcgactgtgggcacaatttctgcctcaaatgcatcactcagattggggaaacatcatgtggatttttcaaatgtcccctctgcaaaacttccgtaaggaagaacgcaatcaggttcaactcgctgttgcggaatctggtggagaaaatccaagctctacaagcctctgaggtgcagtccaaaaggaaagaggctacatgcccgaggcaccaggagatgttccactatttctgcgaggatgatgggaagttcctctgttttgtgtgtcgtgaatccaaggaccacaaatcccataatgtcagcttgatcgaagaagctgcccagaattatcaggggcagattcaagagcagatccaagtcttgcagcaaaaggagaaggagacagtacaagtgaaggcacaaggtgtacacagggtcgatgtcttcacggaccaggtagaacatgagaagcaaaggatcctcacagaatttgaactcctgcatcaagtcctagaggaggagaagaatttcctgctatcacggatttactggctgggtcatgagggaacggaagcggggaaacactatgttgcctccactgagccacagttgaacgatctcaagaagctcgttgattccctgaagaccaagcagaacatgccacccaggcagctgctggaggatatcaaagtcgtcttgtgcagaagtgaagagtttcagtttctcaacccaacccctgttcctctggaactggagaaaaaactcagtgaagcaaaatcaagacatgactccatcacagggagcctaaaaaaattcaaagaccaactccaggctgataggaaaaaagatgaaaacagattcttcaaaagcatgaataaaaatgacatgaagagctggggcttgttacagaaaaataatcataaaatgaacaaaacctcagagcccgggtcatcttctgcaggcggcagaactacatcggggccaccaaatcaccactcttcagccccatcccactccctgtttcgggcctcgtctgctgggaaagtcacttttccagtatgtctcctggcctcttatgatgagatttctggtcaaggagcgagctctcaggatacgaagacatttgacgttgcgctgtccgaggagctccatgcggcactgagtgagtggctgacagcgatccgggcttggttttgtgaggttccttcaagctaagccagctcagagaacacggggagcggtggtgctacacggacttcggagcatagagtggcgctgagtgagtggctgagaccgaccacggttcttgacttagtggaattgggtcgaaggagtggagaatgggagggctcgggctactgagagtggagatgggggcgggggtggtggtgaagagagttggagaaggaatggacgaattcttgagcaaaaggaggggaagagacaatctccagccacccgccccacgcttgacttcttatcactttggctgtggtgccgcctagtggaaaaaggaagtccctgcagcagtccccgcactctttaagcagctgtttaccgaaggcaccagttcagccaggagtgaaatccggagaggagcaacgccagcctgggtcacagtccatcaaaccccatgagcccgaccactctcgctcttccttacattcccacgtcccccttctctcccaacccctcatatcagcaagggaaattaattaatgagatttgataaatcagtagatagaatgaggtccccattctgaaatatttagcagactggaaccaccacgcaagcctctgtagggggtggatggagacacttctaactttaataaactgcgactgaacgtgga

SEQ ID NO: 4351 - protein, 425 aa, Homo sapiens; identical to SEQ ID NO: 499

SEQ ID NO: 4352 - DNA, 1975 bp, Homo sapiens
attacacattcaaagtatccatttgttctcaagaggtagcaagaaacagtatccacagtggactccggggctcctacagacttggcacagcttcctacagtcttgaaacagccctgttgttctgtcatggccagtgggcagtttgtgaacaaactgcaagaggaagtgatctgccccatctgcctggacattctgcagaaacctgtcaccatcgactgtgggcacaatttctgcctcaaatgcatcactcagattggggaaacatcatgtggatttttcaaatgtcccctctgcaaaacttccgtaaggaagaacgcaatcaggttcaactcgctgttgcggaatctggtggagaaaatccaagctctacaagcctctgaggtgcagtccaaaaggaaagaggctacatgcccgaggcaccaggagatgttccactatttctgcgaggatgatgggaagttcctctgttttgtgtgtcgtgaatccaaggaccacaaatcccataatgtcagcttgatcgaagaagctgcccagaattatcaggggcagattcaagagcagatccaagtcttgcagcaaaaggagaaggagacagtacaagtgaaggcacaaggtgtacacagggtcgatgtcttcacggaccaggtagaacatgagaagcaaaggatcctcacagaatttgaactcctgcatcaagtcctagaggaggagaagaatttcctgctatcacggatttactggctgggtcatgagggaacggaagcggggaaacactatgttgcctccactgagccacagttgaacgatctcaagaagctcgttgattccctgaagaccaagcagaacatgccacccaggcagctgctggagaactggagaaaaaactcagtgaagcaaaatcaagacatgactccatcacagggagcctaaaaaaattcaaagaccaactccaggctgataggaaaaaagatgaaaacagattcttcaaaagcatgaataaaaatgacatgaagagctggggcttgttacagaaaaataatcataaaatgaacaaaacctcagagcccgggtcatcttctgcaggcggcagaactacatcggggccaccaaatcaccactcttcagccccatcccactccctgtttcgggcctcgtctgctgggaaagtcacttttccagtatgtctcctggcctcttatgatgagatttctggtcaaggagcgagctctcaggatacgaagacatttgacgttgcgctgtccgaggagctccatgcggcactgagtgagtggctgacagcgatccgggcttggttttgtgaggttccttcaagctaagccagctcagagaacacggggagcggtggtgctacacggacttcggagcatagagtggcgctgagtgagtggctgagaccgaccacggttcttgacttagtggaattgggtcgaaggagtggagaatgggagggctcgggctactgagagtggagatgggggcgggggtggtggtgaagagagttggagaaggaatggacgaattcttgagcaaaaggaggggaagagacaatctccagccacccgccccacgcttgacttcttatcactttggctgtggtgccgcctagtggaaaaaggaagtccctgcagcagtccccgcactctttaagcagctgtttaccgaaggcaccagttcagccaggagtgaaatccggagaggagcaacgccagcctgggtcacagtccatcaaaccccatgagcccgaccactctcgctcttccttacattcccacgtcccccttctctcccaacccctcatatcagcaagggaaattaattaatgagatttgataaatcagtagatagaatgaggtccccattctgaaatatttagcagactggaaccaccacgcaagcctctgtagggggtggatggagacacttctaactttaataaactgcgactgaacgtgga

SEQ ID NO: 4353 - protein, 267 aa, Homo sapiens; identical to SEQ ID NO: 501

SEQ ID NO: 4354 - DNA, 1217 bp, Homo sapiens
gtaaaaagagactgtaaaagatagcaataatttttataatacatgttgaaataacattttgagaatattgagttaaataaaatatataattaaagttaattttactagtttctttctactttttaaatgtgactactagaaaatttaaaaatatataagtggctcacattcgtgactcagattacattcatcattcatactggacagtgctgggctaggcagtcaccacaggaaatcagaaagggcatctctcaagggttgcataccttcctggtccaataagaatatgagagtcaaatgcagcttctacttctcccaggcatttcaaattagtgccttgctgtgtgatagtgagttctttgctcaacccctctggactctcaccatttcatcccattctttattccccagaccaactccaggctgataggaaaaaagatgaaaacagattcttcaaaagcatgaataaaaatgacatgaagagctggggcttgttacagaaaaataatcataaaatgaacaaaacctcagagcccgggtcatcttctgcaggcggcagaactacatcggggccaccaaatcaccactcttcagccccatcccactccctgtttcgggcctcgtctgctgggaaagtcacttttccagtatgtctcctggcctcttatgatgagatttctggtcaaggagcgagctctcaggatacgaagacatttgacgttgcgctgtccgaggagctccatgcggcactgagtgagtggctgacagcgatccgggcttggttttgtgaggttccttcaagctaagccagctcagagaacacggggagcggtggtgctacacggacttcggagcatagagtggcgctgatggaaaaaggaagtccctgcagcagtccccgcactctttaagcagctgtttaccgaaggcaccagttcagccaggagtgaaatccggagaggagcaacgccagcctgggtcacagtccatcaaaccccatgagcccgaccactctcgctcttccttacattcccacgtcccccttctctcccaacccctcatatcagcaagggaaattaattaatgagatttgataaatcagtagatagaatgaggtccccattctgaaatatttagcagactggaaccaccacgcaagcctctgtagggggtggatggagacacttctaactttaataaactgcgactgaacgtgg

SEQ ID NO: 4355 - protein, 114 aa, Homo sapiens
MNKNDMKSWGLLQKNNHKMNKTSEPGSSSAGGRTTSGPPNHHSSAPSHSLFRASSAGKVTFPVCLLASYDEISGQGASSQDTKTFDVALSEELHAALSEWLTAIRAWFCEVPSS

SEQ ID NO: 4356 - DNA, 362 bp, Homo sapiens
aggctgtcaggcctctctgcgcacgaaacccatcacagcacctgggccagcagccagtgccgggctgtcctcttcccaccccaaggcggtcctcttgagtcttcacaccgcctccttcggatccctccagtccatcaaaccccatgagcccgaccactctcgctcttccttacattcccacgtcccccttctctcccaacccctcatatcagcaagggaaattaattaatgagatttgataaatcagtagatagaatgaggtccccattctgaaatatttagcagactggaaccaccacgcaagcctctgtagggggtggatggagacacttctaactttaataaactgcgactgaacgtgg

SEQ ID NO: 4357 - protein, 31 aa, Homo sapiens
MSPTTLALPYIPTSPFSPNPSYQQGKLINEI

SEQ ID NO: 4358 - DNA, 507 bp, Homo sapiens
ctcaccaaccagctcaaccacatcttcctagaagtgaagagtttcagtttctcaacccaacccctgttcctctggaactggagaaaaaactcagtgaagcaaaatcaagacatgactccatcacagggagcctaaaaaaattcaaagaccaactccaggctgataggaaaaaagatgaaaacagattcttcaaaagcatgaataaaaatgacatgaagagctggggcttgttacagaaaaataatcataaaatgaacaaaacctcagagcccgggtcatcttctgcaggtaagagtcctgtctctgaatactaagggacctctaagtctacaggtggtcaaaatgctgtatccacccaattccactaaatggaataaatgaataaatgaatgaattcatttattccatttcctcagttcctccccaaattacacctctgccaggaaacagagggcgctccgacttgttcaggtgtactttcttgagtttcacctccatccctcctgc

SEQ ID NO: 4359 - protein, 38 aa, Homo sapiens
MNKNDMKSWGLLQKNNHKMNKTSEPGSSSAGKSPVSEY

SEQ ID NO: 4360 - DNA, 495 bp, Homo sapiens
gctaggcagtcaccacaggaaatcagaaagggcatctctcaagggttgcataccttcctggtccaataagaatatgagagtcaaatgcagcttctacttctcccaggcatttcaaattagtgccttgctgtgtgatagtgagttctttgctcaacccctctggactctcaccatttcatcccattctttattccccagaccaactccaggctgataggaaaaaagatgaaaacagattcttcaaaagcatgaataaaaatgacatgaagagctggggcttgttacagaaaaataatcataaaatgaacaaaacctcagagcccgggtcatcttctgcaggtaagagtcctgtctctgaatactaagggacctctaagtctacaggtggtcaaaatgctgtatccacccaattccactaaatggaataaatgaataaatgaatgaattcatttattccatttcctcagttcctccccaaattacacctctgccagg

SEQ ID NO: 4361 - protein, 38 aa, Homo sapiens; identical to SEQ ID NO: 4359

SEQ ID NO: 4362 - DNA, 921 bp, Homo sapiens
aaatactacagaggtggagctgcctccttcttgtcccactttttcctccctgtctctaggagtgaagaaatacatttgtaattttctattacttctgaatacttcaaagtttgggattagtgactgttttgtgagttacctgagtttaaaataataaaacaaccatatgcctgttctctcaattggctgaggaatcggcattcacttatatctggccttcatgtaatcatagagacacaattcttccccttttctcactttccccaaatggcagaagcaaccaaccatcatttctcacttacagctcttcatgtcatttttattcatgcttttgaagaatctgttttcatcttttttcctatcagcctggagttggtctggggaataaagaatgggatgaaatggtgagagtccagaggggttgagcaaagaactcactatcacacagcaaggcactaatttgaaatgcctgggagaagtagaagctgcatttgactctcatattcttattggaccaggaaggcaggaggagacaccagtgtgcaccagagaaggagaagtcagagatgacagtccctgcctgaggccatctctggtccaccagacaactcatcaccaacttcccaacagccactgctctaggccagacttggatctgctcttgaatctgcccctgcggaaagagggccgtttggacaggctgtgcctggagatttctggcctcataaaatcctcctggtctcttaggagagctggtgacactctccaggtccttggtggagcctgatgattgacatcttaagcaaattctctggagaagtcgatgctcctgatggaggctcacacattgataacccctggtttagagacactactaattgttccagctcatccagctaataaatgacagatctcagactt

SEQ ID NO: 4363 - protein, 46 aa, Homo sapiens [sequence omitted]

SEQ ID NO: 4364 - DNA, 1960 bp, Homo sapiens
ataagaaccactcatctgctggccatctctccaggtctggagccagagaagatgatctgaaattgtagcaggagaaattgaggtgtatgaaaaataatttcaagtttaacaaacacaaggaaaccgcagggtccatgtcaaagctgatgagctatttctgaaactcgtgcagaattgtggtttgtgtggtctatgtcacggcacccttgagggagagtgggcaattgcctgaacttggaggctgtgtcctgtccccaggctgctccagggctgcctccttccgactgggccttcttatctgggactgttgagggcaacaggccttccgaagaccagtgaagaaggaggccctgcaaacaggaggctgacagggtaggaacgaggccatgatccctttgcagaaggacaaccaggaggagggtgtctgccccatctgccaggagagcctgaaggaggccgtgagcaccaactgcggacatctcttctgtcgagtgtgcctgacacagcatgtggagaaggcctcagcctctggggtcttctgctgccccctctgccggaagccctgttctgaggaggtgctagggacaggctatatctgccccaaccaccagaagagggtgtgcaggttctgtgaggagagcagacttcttctatgtgtggaatgcctggtgtcccctgaacacatgtctcatcatgaactgaccattgaaaatgccctcagccactacaaggaacgactcaatcgccggagcaggaagctcagaaaggacattgcagaacttcagcggctcaaggctcagcaggagaagaaactgcaggctctgcagcagtggctgggccagctggagcacatgccagcagaagcggccagaatccttgacatctccagggcagtaacacagctcagaagcctggtcattgatctggaaaggacggccaaggaattagacaccaacacactgaagaatgctggtgacttactgaacaggagtgctccacagaaattagaggttatttatccccagttggagaaaggagtcagtgaattgcttcttcagccccctcagaagctctgacctgttcatccctgggacacctcacttcaggctcacctcagcctcctctctctccttcctccaacctgtccaggcccccactgggtctacccagtgcatcttcgggcctgccagctcctgaacatgtcaccatttcttcatgtccacagtcatcacctgatgcctgaccctctgactcttggacgatagccagcctccttccaggacaggctcatgcttggggctgccactgtggaggtcggggcccatggtctccaggagcatttgtgaaatctccattttgcctgtaaactgatggtagtgcccatctctcacaatctcattcaaataggatcctccaggcctctgaatggcccgagctcatcagcagtgacaccacctcacatgtggagcccagctgagttcctgcagtacttgttgtctgtaccactcacctggcacttatttattattgttgtggaagacagactcaaagacagcctcccttcatgatcctcacctcttggaattcatgcccttgtttggtcccctccccttgagtgtaagtgggatctgtgacttgcttctaatgaatggaataaggcaaaggtgatagggtgtcactctggcaactgtgttgcattgtatagaactcctccttgctggcccacccttttagagcccctcctaggagccaagagcagcttccagccaacaacaagcagaggccctcagtcttgtggctgcaagaacctgaattctgccaacaacccgagtgagcttggaagcagattcttccccaactgagccggataagaacctagtccagccaacaccttgattatagtcttgtgagtacctaagctgaggacccagtgaagctgtgccaaaatttcccacccaca

SEQ ID NO: 4365 - protein, 229 aa, Homo sapiens; identical to SEQ ID NO: 503

SEQ ID NO: 4366 - DNA, 2086 bp, Homo sapiens
ataagaaccactcatctgctggccatctctccaggtctggagccagagaagatgatctgaaattgtagcaggagaaattgaggtgtatgaaaaataatttcaagtttaacaaacacaaggaaaccgcagggtccatgtcaaagctgatgagctatttctgaaactcgtgcagaattgtggtttgtgtggtctatgtcacggcacccttgagggagagtgggcaattgcctgaacttggaggctgtgtcctgtccccaggctgctccagggctgcctccttccgactgggccttcttatctgggactgttgagggcaacaggccttccgaagaccagtgaagaaggaggccctgcaaacaggaggctgacagggtaggaacgaggccatgatccctttgcagaaggacaaccaggaggagggtgtctgccccatctgccaggagagcctgaaggaggccgtgagcaccaactgcggacatctcttctgtcgagtgtgcctgacacagcatgtggagaaggcctcagcctctggggtcttctgctgccccctctgccggaagccctgttctgaggaggtgctagggacaggctatatctgccccaaccaccagaagagggtgtgcaggttctgtgaggagagcagacttcttctatgtgtggaatgcctggtgtcccctgaacacatgtctcatcatgaactgaccattgaaaatgccctcagccactacaaggaacgactcaatcgccggagcaggaagctcagaaaggacattgcagaacttcagcggctcaaggctcagcaggagaagaaactgcaggctctgcagtttcaggtagaccacgggaaccacaggctggaggctgggccggagagccagcaccaaaccagggaacagctgggtgccctccctcagcagtggctgggccagctggagcacatgccagcagaagcggccagaatccttgacatctccagggcagtaacacagctcagaagcctggtcattgatctggaaaggacggccaaggaattagacaccaacacactgaagaatgctggtgacttactgaacaggagtgctccacagaaattagaggttatttatccccagttggagaaaggagtcagtgaattgcttcttcagccccctcagaagctctgacctgttcatccctgggacacctcacttcaggctcacctcagcctcctctctctccttcctccaacctgtccaggcccccactgggtctacccagtgcatcttcgggcctgccagctcctgaacatgtcaccatttcttcatgtccacagtcatcacctgatgcctgaccctctgactcttggacgatagccagcctccttccaggacaggctcatgcttggggctgccactgtggaggtcggggcccatggtctccaggagcatttgtgaaatctccattttgcctgtaaactgatggtagtgcccatctctcacaatctcattcaaataggatcctccaggcctctgaatggcccgagctcatcagcagtgacaccacctcacatgtggagcccagctgagttcctgcagtacttgttgtctgtaccactcacctggcacttatttattattgttgtggaagacagactcaaagacagcctcccttcatgatcctcacctcttggaattcatgcccttgtttggtcccctccccttgagtgtaagtgggatctgtgacttgcttctaatgaatggaataaggcaaaggtgatagggtgtcactctggcaactgtgttgcattgtatagaactcctccttgctggcccacccttttagagcccctcctaggagccaagagcagcttccagccaacaacaagcagaggccctcagtcttgtggctgcaagaacctgaattctgccaacaacccgagtgagcttggaagcagattcttccccaactgagccggataagaacctagtccagccaacaccttgattatagtcttgtgagtacctaagctgaggacccagtgaagctgtgccaaaatttcccacccacagaaacagtgtgacaataaatgtgtgtgtgtttttttgtt

SEQ ID NO: 4367 - protein, 258 aa, Homo sapiens
MIPLQKDNQEEGVCPICQESLKEAVSTNCGHLFCRVCLTQHVEKASASGVFCCPLCRKPCSEEVLGTGYICPNHQKRVCRFCEESRLLLCVECLVSPEHMSHHELTIENALSHYKERLNRRSRKLRKDIAELQRLKAQQEKKLQALQFQVDHGNHRLEAGPESQHQTREQLGALPQQWLGQLEHMPAEAARILDISRAVTQLRSLVIDLERTAKELDTNTLKNAGDLLNRSAPQKLEVIYPQLEKGVSELLLQPPQKL

SEQ ID NO: 4368 - DNA, 2341 bp, Homo sapiens
ctccaggtctggagccagagaagatgatctgaaattgtagcaggagaaattgaggtaggatactaagaaagcttttcaggagtggggctaggcaagaggtgcagcatgagggaataagagtgaatcctcagtatctaagggaggtggcaggtggcgggggacttctttctttgggtcatctttggtggtgatttgacaggaaggaacaaagtggcttcaaacattatacaagtctctagtctgttctgtgtcctgttttctttctcattctttcagtgtggaatctatatgaccctgggagggatgttggttggaagaatgaccagctgatggagatgctgctgtaattattggtggtaataatgggcagcagtgagccacccggtgtgacagtgtaggagaaaacagtccaaactcctgccaaactctctctactgatggcaaatcagaggagactcaaattgtgtatgaaaaataatttcaagtttaacaaacacaaggaaaccgcagggtccatgtcaaagctgatgagctatttctgaaactcgtgcagaattgtggtttgtgtggtctatgtcacggcacccttgagggagagtgggcaattgcctgaacttggaggctgtgtcctgtccccaggctgctccagggctgcctccttccgactgggccttcttatctgggactgttgagggcaacaggccttccgaagaccagtgaagaaggaggccctgcaaacaggaggctgacagggtaggaacgaggccatgatccctttgcagaaggacaaccaggaggagggtgtctgccccatctgccaggagagcctgaaggaggccgtgagcaccaactgcggacatctcttctgtcgagtgtgcctgacacagcatgtggagaaggcctcagcctctggggtcttctgctgccccctctgccggaagccctgttctgaggaggtgctagggacaggctatatctgccccaaccaccagaagagggtgtgcaggttctgtgaggagagcagacttcttctatgtgtggaatgcctggtgtcccctgaacacatgtctcatcatgaactgaccattgaaaatgccctcagccactacaaggaacgactcaatcgccggagcaggaagctcagaaaggacattgcagaacttcagcggctcaaggctcagcaggagaagaaactgcaggctctgcagcagtggctgggccagctggagcacatgccagcagaagcggccagaatccttgacatctccagggcagtaacacagctcagaagcctggtcattgatctggaaaggacggccaaggaattagacaccaacacactgaagaatgctggtgacttactgaacaggagtgctccacagaaattagaggttatttatccccagttggagaaaggagtcagtgaattgcttcttcagccccctcagaagctctgacctgttcatccctgggacacctcacttcaggctcacctcagcctcctctctctccttcctccaacctgtccaggcccccactgggtctacccagtgcatcttcgggcctgccagctcctgaacatgtcaccatttcttcatgtccacagtcatcacctgatgcctgaccctctgactcttggacgatagccagcctccttccaggacaggctcatgcttggggctgccactgtggaggtcggggcccatggtctccaggagcatttgtgaaatctccattttgcctgtaaactgatggtagtgcccatctctcacaatctcattcaaataggatcctccaggcctctgaatggcccgagctcatcagcagtgacaccacctcacatgtggagcccagctgagttcctgcagtacttgttgtctgtaccactcacctggcacttatttattattgttgtggaagacagactcaaagacagcctcccttcatgatcctcacctcttggaattcatgcccttgtttggtcccctccccttgagtgtaagtgggatctgtgacttgcttctaatgaatggaataaggcaaaggtgatagggtgtcactctggcaactgtgttgcattgtatagaactcctccttgctggcccacccttttagagcccctcctaggagccaagagcagcttccagccaacaacaagcagaggccctcagtcttgtggctgcaagaacctgaattctgccaacaacccgagtgagcttggaagcagattcttccccaactgagccggataagaacctagtccagccaacaccttgattatagtcttgtgagtacctaagctgaggacccagtgaagctgtgccaaaatttcccacccaca

SEQ ID NO: 4369 - protein, 229 aa, Homo sapiens; identical to SEQ ID NO: 503

SEQ ID NO: 4370 - DNA, 3291 bp, Homo sapiens
aatatttcttctgacagtggacagctgacatatcaccactttccttctactgtgagtgtctctggatgggcagaaaggaatggccagcccctggttatggtcatctaaggtcacctctgaaatgctgtgagcccctcttccttcctctcctctgctatttcccatctctgctgttggcaggagaatagaaccctggctgccagagatgcaagtgtgtgacgatatgggtgctggtgcatatttagtatgtgcctgtgtccagccatgtgcatgtgtgggtgtgtgagtgtgtgacccagcccttcccccgtggccaagcagagagagtggccttgaggaagccatagcagcaggaccagcatggcctctgctgcctctgtgaccagcctggcagatgaagtcaactgccccatctgtcagggtaccctgagggagccggtcactatcgactgcggccacaacttctgccgggcctgccttacccgctactgtgagataccaggcccagacctggaggagtcccctacttgcccactctgcaaagaacccttccgtcctgggagcttccggcccaactggcagctggctaacgtggtggagaacattgagcgcctccagctggtgtccacactgggtttgggagaggaggatgtctgccaagagcacggagagaagatctacttcttctgtgaggatgatgagatgcagttgtgcgtggtgtgccgggaggctggggagcacgctacccacaccatgcgcttcctggaggatgcagcggctccctatagggaacaaatccataagtgtcttaaatgtctaagaaaagagagagaggagattcaagaaatccagtcaagagaaaataaaaggatgcaagtcctcctgactcaggtgtccaccaagagacaacaggtgatttctgagttcgcacacctgaggaagtttctagaggaacagcagagcatcctcttagcacaattggagagccaggatggggacatcttgaggcaacgggatgaatttgatttgctggttgctggggagatctgccggtttagtgctcttattgaagaactggaggagaagaatgagaggccagcaagggagctcctgacggacatcagaagcactctaataagatgtgaaaccagaaagtgccggaaaccggtggctgtgtcgccagagctgggccagaggattcgggactttccccagcaggccctcccgctgcagagggagatgaagatgtttctggaaaaactatgctttgagttggactatgagccagctcacatttctctagaccctcagacttcccaccccaagctcctcttgtccgaggaccaccagcgagctcagttctcctacaaatggcagaactcaccagacaacccccaacgttttgaccgggccacctgtgttctggcccacactggcatcacaggggggagacacacgtgggtgtggatggccagggtacctggggactcaggctgctgccagttctgctcaccaccatccgtgcttggcacagaagtagctgcatagaaagggcactggatttgaagtcagaagacctgggttcttgaaccagcctgtcaaccagttgtatgactttaaacaaggcatctcacctcttttcatcttgttttcttccaataatgttagagttcatgtaatcacattctctagaaccatttagtttgtgttaactatgaaccaagcagtgtggtggccactggtgacttgaaaatatagagaaaaaaaaaacctgctctatatctgaaagagctcttgggaagacagagaaacataaagaggaaattacagcacagtgtggtgggtgttacgggaagtccaaccccagcattatgggagttcaggggaaggggcatagcccagcctggaaggagagggtgagtgggggatggctttctgaaaagggtggtctaaaggatgcctatggtcaatagggaaaagaggggaagaagcatcttaagaagaggaaacagcagagaactggctggatgacctgtgactctggagcactgggttgtctccattgtcattatgggcagatgtgtgccatccccagccgacgccactcactgcctccttcctcctggtgttgccacttctgggtgagattaaggtgcagggcctgggggcaggaggacataaggtatagccataaatcataacccagggaccacactcaaccctagggaaattgtcttcctgatcagttgattaccatctgaggtcaagaaatgagatagtgggagcaaatgggtcacaaatagctcagctgtgggctcagaaactgctaggtaaaagaattccagaaggaggccagggcataagttggatgacctatgaactttagtctaaagaattgagactaccgtaattgagactactgtagtgacatctgagaaatgggatggaagagtgaccatgttttattttcttgttcttgtcactattgtattttattttgcataatcatgcccttcactgacagtctccttaacatcatctgtttactctgctcagtgtaaactacaatgctctgtcatctccctactgggtctcctgggaggaggggagccatccagggtgcaaactcaaaggcagagggcacagcgtgcttaggcccaagcttagaattcaattgagaagttctgttgttcatccttacctcagcaggtagaaaagaggtggagatcagaagccagggattagagattgaattgctttccctgggagtgtgcagtatctcattaaaatgttgtatattcaaaaaaatacagacacacacaagtgcctatataatgataaaacatatccaaagcacccaaacctgtgattccagaaaagtagatcctatttttgtttatttttattggctttagctgtgtcttttgaaaggactattatcctctaaaatgtatgtgtatgaagatcctggcttgcagctcgggagctttacacaccttgtgtcactttatcttggtaacgagccaagatcatgcaaccagttcatccatgtctgacccaagagctcttaactgctatgctgcactgcctcattcagagatagatgcctgcatgggtcctggcgattattttaatgctggctacacccccacaggtgacttggattcagaaatacaatttatatttcttctttttaaattgttttattttatttttcttttaatagttatatgtcagtgagaacaatttatatgtcttacactgagaaataaaactgctcataagtgaaaa

SEQ ID NO: 4371 - protein, 395 aa, Homo sapiens
MASAASVTSLADEVNCPICQGTLREPVTIDCGHNFCRACLTRYCEIPGPDLEESPTCPLCKEPFRPGSFRPNWQLANVVENIERLQLVSTLGLGEEDVCQEHGEKIYFFCEDDEMQLCVVCREAGEHATHTMRFLEDAAAPYREQIHKCLKCLRKEREEIQEIQSRENKRMQVLLTQVSTKRQQVISEFAHLRKFLEEQQSILLAQLESQDGDILRQRDEFDLLVAGEICRFSALIEELEEKNERPARELLTDIRSTLIRCETRKCRKPVAVSPELGQRIRDFPQQALPLQREMKMFLEKLCFELDYEPAHISLDPQTSHPKLLLSEDHQRAQFSYKWQNSPDNPQRFDRATCVLAHTGITGGRHTWVWMARVPGDSGCCQFCSPPSVLGTEVAA

SEQ ID NO: 4372 - DNA, 3830 bp, Homo sapiens
aatatttcttctgacagtggacagctgacatatcaccactttccttctactgtgagtgtctctggatgggcagaaaggaatggccagcccctggttatggtcatctaaggtcacctctgaaatgctgtgagcccctcttccttcctctcctctgctatttcccatctctgctgttggcaggagaatagaaccctggctgccagagatgcaagtgtgtgacgatatgggtgctggtgcatatttagtatgtgcctgtgtccagccatgtgcatgtgtgggtgtgtgagtgtgtgacccagcccttcccccgtggccaagcagagagagtggccttgaggaagccatagcagcaggaccagcatggcctctgctgcctctgtgaccagcctggcagatgaagtcaactgccccatctgtcagggtaccctgagggagccggtcactatcgactgcggccacaacttctgccgggcctgccttacccgctactgtgagataccaggcccagacctggaggagtcccctacttgcccactctgcaaagaacccttccgtcctgggagcttccggcccaactggcagctggctaacgtggtggagaacattgagcgcctccagctggtgtccacactgggtttgggagaggaggatgtctgccaagagcacggagagaagatctacttcttctgtgaggatgatgagatgcagttgtgcgtggtgtgccgggaggctggggagcacgctacccacaccatgcgcttcctggaggatgcagcggctccctatagggaacaaatccataagtgtcttaaatgtctaagaaaagagagagaggagattcaagaaatccagtcaagagaaaataaaaggatgcaagtcctcctgactcaggtgtccaccaagagacaacaggtgatttctgagttcgcacacctgaggaagtttctagaggaacagcagagcatcctcttagcacaattggagagccaggatggggacatcttgaggcaacgggatgaatttgatttgctggttgctggggagatctgccggtttagtgctcttattgaagaactggaggagaagaatgagaggccagcaagggagctcctgacggacatcagaagcactctaataagatgtgaaaccagaaagtgccggaaaccggtggctgtgtcgccagagctgggccagaggattcgggactttccccagcaggccctcccgctgcagagggagatgaagatgtttctggaaaaactatgctttgagttggactatgagccagctcacatttctctagaccctcagacttcccaccccaagctcctcttgtccgaggaccaccagcgagctcagttctcctacaaatggcagaactcaccagacaacccccaacgttttgaccgggccacctgtgttctggcccacactggcatcacaggggggagacacacgtgggtggtgagtatagacctggcccatgggggcagctgcaccgtgggcgtggtgagcgaggatgtgcagcggaagggggagcttcggctgcggccagaggagggggtgtgggctgtgaggctggcttggggcttcgtctcggctctgggctccttccccacacggctgaccctgaaggagcagccccggcaggtgagggtgtctcttgactatgaggtgggctgggtgaccttcaccaacgctgtcacccgagagcccatctacaccttcactgcctccttcactaggaaggtcattcccttctttgggctctggggccgagggtccagtttctccctgagctcctgagaaggagcagttacctactctcctctaagtacaggactcatatcaacccaagtaccatgtggacttgatccctggctgaatcacctggatgacttggaatagaaatgactgctttagaagatgggatggggccgggtggtaagggatagaagagaggactctcaatctactgatcaagtcctttccccaatgcccagtggatggccagggtacctggggactcaggctgctgccagttctgctcaccaccatccgtgcttggcacagaagtagctgcatagaaagggcactggatttgaagtcagaagacctgggttcttgaaccagcctgtcaaccagttgtatgactttaaacaaggcatctcacctcttttcatcttgttttcttccaataatgttagagttcatgtaatcacattctctagaaccatttagtttgtgttaactatgaaccaagcagtgtggtggccactggtgacttgaaaatatagagaaaaaaaaaacctgctctatatctgaaagagctcttgggaagacagagaaacataaagaggaaattacagcacagtgtggtgggtgttacgggaagtccaaccccagcattatgggagttcaggggaaggggcatagcccagcctggaaggagagggtgagtgggggatggctttctgaaaagggtggtctaaaggatgcctatggtcaatagggaaaagaggggaagaagcatcttaagaagaggaaacagcagagaactggctggatgacctgtgactctggagcactgggttgtctccattgtcattatgggcagatgtgtgccatccccagccgacgccactcactgcctccttcctcctggtgttgccacttctgggtgagattaaggtgcagggcctgggggcaggaggacataaggtatagccataaatcataacccagggaccacactcaaccctagggaaattgtcttcctgatcagttgattaccatctgaggtcaagaaatgagatagtgggagcaaatgggtcacaaatagctcagctgtgggctcagaaactgctaggtaaaagaattccagaaggaggccagggcataagttggatgacctatgaactttagtctaaagaattgagactaccgtaattgagactactgtagtgacatctgagaaatgggatggaagagtgaccatgttttattttcttgttcttgtcactattgtattttattttgcataatcatgcccttcactgacagtctccttaacatcatctgtttactctgctcagtgtaaactacaatgctctgtcatctccctactgggtctcctgggaggaggggagccatccagggtgcaaactcaaaggcagagggcacagcgtgcttaggcccaagcttagaattcaattgagaagttctgttgttcatccttacctcagcaggtagaaaagaggtggagatcagaagccagggattagagattgaattgctttccctgggagtgtgcagtatctcattaaaatgttgtatattcaaaaaaatacagacacacacaagtgcctatataatgataaaacatatccaaagcacccaaacctgtgattccagaaaagtagatcctatttttgtttatttttattggctttagctgtgtcttttgaaaggactattatcctctaaaatgtatgtgtatgaagatcctggcttgcagctcgggagctttacacaccttgtgtcactttatcttggtaacgagccaagatcatgcaaccagttcatccatgtctgacccaagagctcttaactgctatgctgcactgcctcattcagagatagatgcctgcatgggtcctggcgattattttaatgctggctacacccccacaggtgacttggattcagaaatacaatttatatttcttctttttaaattgttttattttatttttcttttaatagttatatgtcagtgagaacaatttatatgtcttacactgagaaataaaactgctcataagtgaaaa

SEQ ID NO: 4373 - protein, 481 aa, Homo sapiens
MASAASVTSLADEVNCPICQGTLREPVTIDCGHNFCRACLTRYCEIPGPDLEESPTCPLCKEPFRPGSFRPNWQLANVVENIERLQLVSTLGLGEEDVCQEHGEKIYFFCEDDEMQLCVVCREAGEHATHTMRFLEDAAAPYREQIHKCLKCLRKEREEIQEIQSRENKRMQVLLTQVSTKRQQVISEFAHLRKFLEEQQSILLAQLESQDGDILRQRDEFDLLVAGEICRFSALIEELEEKNERPARELLTDIRSTLIRCETRKCRKPVAVSPELGQRIRDFPQQALPLQREMKMFLEKLCFELDYEPAHISLDPQTSHPKLLLSEDHQRAQFSYKWQNSPDNPQRFDRATCVLAHTGITGGRHTWVVSIDLAHGGSCTVGVVSEDVQRKGELRLRPEEGVWAVRLAWGFVSALGSFPTRLTLKEQPRQVRVSLDYEVGWVTFTNAVTREPIYTFTASFTRKVIPFFGLWGRGSSFSLSS

SEQ ID NO: 4374 - DNA, 643 bp, Homo sapiens
agataattgatttcagtaacaagggagggttgttatttacacatgttcctttgggatgagtcggaaactcagaatgatttcagtgcggggcatatcaaactcagtacagaccccagataccacttacccgaagcaaaacacaatagaatatgaccagctgagtctggagacattattaaggatgataattcccagacccagccatttctgtgcccctagatgtgaaaccagaaagtgccggaaaccggtggctgtgtcgccagagctgggccagaggattcgggactttccccagcaggccctcccgctgcagagggagatgaagatgtttctgggtaagagaaccccaggcctccacagagcgcaggtggccatgaagcctgggtttaggagtggcctccacgctccactgctgaaaggtgtgactttggcaagccttattccttcctgtgccttgatttccttatttgcagatttttataaaatctgcctattaggatattgtgacaatgaagaaagagaataaaggtgaatatttctggtgaaaaagttaaactgattttaaaataattcaacaaatctgattagtggtcattaagcaatatgaaagataatgattaacaatatatcattcttaataagt

SEQ ID NO: 4375 - protein, 156 aa, Homo sapiens [sequence omitted]

SEQ ID NO: 4376 - DNA, 2226 bp, Homo sapiens
gctgtgggcacgcctcagagccagaagtttatggctcccacctgctcaatctgacaggaagcttctgctccccagttctccccagccactgtggtctacagattccaggaaacccatccccctgtgacctcatggtgtgctctgttctccaccctagggaccagaaggagccaggagtaaagaactggcttacttggccgccactgggaaattctgggtaattcgagacgccctggaatttggacccactccgctgataggtggtggccagggttctagggaacacaagaggcggagccaggtggcttccctgtgctggcattcttgcctctctctctctttctctctctctgtctcttagccttgcagccgtttccctctgcgattcatgtaagtgtgactcgatttcagggaaagggaactcgcgtgggctgaggagaccggagtggacgggctggggaaggcaccgtgatgcccgcaaccccgtccctgaaggtggtccatgagctgcctgcctgtaccctctgtgcggggccgctggaggatgcggtgaccattccctgtggacacaccttctgccggctctgcctccccgcgctctcccagatgggggcccaatcctcgggcaagatcctgctctgcccgctctgccaagaggaggagcaggcagagactcccatggcccctgtgcccctgggcccgctgggagaaacttactgcgaggagcacggcgagaagatctacttcttctgcgagaacgatgccgagttcctctgtgtgttctgcagggagggtcccacgcaccaggcgcacaccgtggggttcctggacgaggccattcagccctaccgggatcgtctcaggagtcgactggaagctctgagcacggagagagatgagattgaggatgtaaagtgtcaagaagaccagaagcttcaagtgctgctgactcagatcgaaagcaagaagcatcaggtggaaacagcttttgagaggctgcagcaggagctggagcagcagcgatgtctcctgctggccaggctgagggagctggagcagcagatttggaaggagagggatgaatatatcacaaaggtctctgaggaagtcacccggcttggagcccaggtcaaggagctggaggagaagtgtcagcagccagcaagtgagcttctacaagatgtcagagtcaaccagagcaggtgtgagatgaagacttttgtgagtcctgaggccatttctcctgaccttgtcaagaagatccgtgatttccacaggaaaatactcaccctcccagagatgatgaggatgttctcagaaaacttggcgcatcatctggaaatagattcaggggtcatcactctggaccctcagaccgccagccggagcctggttctctcggaagacaggaagtcagtgaggtacacccggcagaagaagagcctgccagacagccccctgcgcttcgacggcctcccggcggttctgggcttcccgggcttctcctccgggcgccaccgctggcaggttgacctgcagctgggcgacggcggcggctgcacggtgggggtggccggggagggggtgaggaggaagggagagatgggactcagcgccgaggacggcgtctgggccgtgatcatctcgcaccagcagtgctgggccagcacctccccgggcaccgacctgccgctgagcgagatcccgcgcggcgtgagagtcgccctggactacgaggcggggcaggtgaccctccacaacgcccagacccaggagcccatcttcaccttcactgcctctttctccggcaaagtcttccctttctttgccgtctggaaaaaaggttcctgccttacgctgaaaggctgaagtggggcgcgcgaagggcggcgaagcggagacggcggctctccgggatccagctccgcccctggccagtgtgcggcccgggggctccctgtgcccgcgtgaggcgagagaacaggggacttgagtctcgaacagcggttgtttttactttatttatcttaggccctcagctccctgacgtcctgagcctccctgtgacgctctggccttctctgtacctcagagtgcagaaccacagacggcttcggctgtgcctagggcaacagccaacctaggagccagcgggctttcggggaaaaaaaagaaaaagacatctaaaataaaatgtttaaactgtttcaaaataattatcttggg

SEQ ID NO: 4377 - protein, 465 aa, Homo sapiens [sequence omitted]

SEQ ID NO: 4378 - DNA, 2355 bp, Homo sapiens
gcctctctctctctttctctctctctgtctcttagccttgcagccgtttccctctgcgattcatgtaagtgtgactcgatttcagggaaagggaactcgcgtgggctgaggagaccggagtggacgggctggggaaggcaccgtgatgcccgcaaccccgtccctgaaggtggtccatgagctgcctgcctgtaccctctgtgcggggccgctggaggatgcggtgaccattccctgtggacacaccttctgccggctctgcctccccgcgctctcccagatgggggcccaatcctcgggcaagatcctgctctgcccgctctgccaagaggaggagcaggcagagactcccatggcccctgtgcccctgggcccgctgggagaaacttactgcgaggagcacggcgagaagatctacttcttctgcgagaacgatgccgagttcctctgtgtgttctgcagggagggtcccacgcaccaggcgcacaccgtggggttcctggacgaggccattcagccctaccgggatcgtctcaggagtcgactggaagctctgagcacggagagagatgagattgaggatgtaaagtgtcaagaagaccagaagcttcaagtgctgctgactcagatcgaaagcaagaagcatcaggtggaaacagcttttgagaggctgcagcaggagctggagcagcagcgatgtctcctgctggccaggctgagggagctggagcagcagatttggaaggagagggatgaatatatcacaaaggtctctgaggaagtcacccggcttggagcccaggtcaaggagctggaggagaagtgtcagcagccagcaagtgagcttctacaagatgtcagagtcaaccagagcaggtgtgagatgaagacttttgtgagtcctgaggccatttctcctgaccttgtcaagaagatccgtgatttccacaggaaaatactcaccctcccagagatgatgaggatgttctcagaaaacttggcgcatcatctggaaatagattcaggggtcatcactctggaccctcagaccgccagccggagcctggttctctcggaagacaggaagtcagtgaggtacacccggcagaagaagagcctgccagacagccccctgcgcttcgacggcctcccggcggttctgggcttcccgggcttctcctccgggcgccaccgctggcaggttgacctgcagctgggcgacggcggcggctgcacggtgggggtggccggggagggggtgaggaggaagggagagatgggactcagcgccgaggacggcgtctgggccgtgatcatctcgcaccagcagtgctgggccagcacctccccgggcaccgacctgccgctgagcgagatcccgcgcggcgtgagagtcgccctggactacgaggcggggcaggtgaccctccacaacgcccagacccaggagcccatcttcaccttcactgcctctttctccggcaaagtcttccctttctttgccgtctggaaaaaaggttcctgccttacgctgaaaggctgaagtggggcgcgcgaagggcggcgaagcggagacggcggctctccgggatccagctccgcccctggccagtgtgcggcccgggggctccctgtgcccgcgtgaggcgagagaacaggggacttgagtctcgaacagcggttgtttttactttatttatcttaggccctcagctccctgacgtcctgagcctccctgtgacgctctggccttctctgtacctcagagtgcagaaccacagacggcttcggctgtgcctagggcaacagccaacctaggagccagcgggctttcggggaaaaaaaagaaaaagacatctaaaataaaatgtttaaactgtttcaaaataattatcttgggaaaaatcagggttttgctggacttgcactaatttgtacagttaacttcgtactttgacacacacctgaagatgcctccacctttgtagggcttagggcctttttatcagccctgggtggaccccagggccccttcctttcccttcccttctggtcatttctctggacttgtagagaatgtcctaagaaagtgtgactcacagacctctggattccatgtgtccaattagcgctgatgggactggagaaaggcttaaatccaatgggatctgcctgtgttggcaatttagggccgagatggctcgagggagtagatgcagagaggaagggtgatgatccctctgtgaccaagacacaatcctgtcccttcttttagtcaggatatccctgatgacagacagtgggacaatcaccaggccccattgtttaagaaaacgaggcttttgctcaggtcta

SEQ ID NO: 4379 - protein, 465 aa, Homo sapiens [sequence omitted]

SEQ ID NO: 4380 - DNA, 431 bp, Homo sapiens
atgcccgcaaccccgtccctgaaggtggtccatgagctgcctgcctgtaccctctgtgcggggccgctggaggatgcggtgaccattccctgtggacacaccttctgccggctctgcctccccgcgctctcccagatgggggcccaatcctcgggcaagatcctgctctgcccgctctgccaagaggaggagcaggcagagactcccatggcccctgtgcccctgggcccgctgggagaaacttactgcgaggagcacggcgagaagatctacttcttctgcgagaacgatgccgagttccttctgtacctcagagtgcagaaccacagacggcttcggctgtgcctagggcaacagccaacctaggagccagcgggctttcggggaaaaaaaagaaaaagacatctaaaataaaatgtttaaactgtttc

SEQ ID NO: 4381 - protein, 121 aa, Homo sapiens
MPATPSLKVVHELPACTLCAGPLEDAVTIPCGHTFCRLCLPALSQMGAQSSGKILLCPLCQEEEQAETPMAPVPLGPLGETYCEEHGEKIYFFCENDAEFLLYLRVQNHRRLRLCLGQQPT

SEQ ID NO: 4382 - DNA, 903 bp, Homo sapiens
atgcccgcaaccccgtccctgaaggtggtccatgagctgcctgcctgtaccctctgtgcggggccgctggaggatgcggtgaccattccctgtggacacaccttctgccggctctgcctccccgcgctctcccagatgggggcccaatcctcgggcaagatcctgctctgcccgctctgccaagaggaggagcaggcagagactcccatggcccctgtgcccctgggcccgctgggagaaacttactgcgaggagcacggcgagaagatctacttcttctgcgagaacgatgccgagttccttctgtacctcagagtgcagaaccacagacggcttcggctgtgcctagggcaacagccaacctaggagccagcgggctttcggggaaaaaaaagaaaaagacatctaaaataaaatgtttaaactgtttcaaaataattatcttgggaaaaatcagggttttgctggacttgcactaatttgtacagttaacttcgtactttgacacacacctgaagatgcctccacctttgtagggcttagggcctttttatcagccctgggtggaccccagggccccttcctttcccttcccttctggtcatttctctggacttgtagagaatgtcctaagaaagtgtgactcacagacctctggattccatgtgtccaattagcgctgatgggactggagaaaggcttaaatccaatgggatctgcctgtgttggcaatttagggccgagatggctcgagggagtagatgcagagaggaagggtgatgatccctctgtgaccaagacacaatcctgtcccttcttttagtcaggatatccctgatgacagacagtgggacaatcaccaggccccattgtttaagaaaacgaggcttttgctcaggtcta

SEQ ID NO: 4383 - protein, 121 aa, Homo sapiens; identical to SEQ ID NO: 4381

SEQ ID NO: 4384 - DNA, 910 bp, Homo sapiens
cccacgcaccaggcgcacaccgtggggttcctggacgaggccattcagccctaccgggatcgtctcaggagtcgactggaagctctgagcacggagagagatgagattgaggatgtaaagtgtcaagaagaccagaacagccagcaagtgagcttctacaagtgagatgtgcggcccgggggctccctgtgcccgcgtgaggcgagagaacaggggacttgagtctcgaacagcggttgtttttactttatttatcttaggccctcagctccctgacgtcctgagcctccctgtgacgctctggccttctctgtacctcagagtgcagaaccacagacggcttcggctgtgcctagggcaacagccaacctaggagccagcgggctttcggggaaaaaaaagaaaaagacatctaaaataaaatgtttaaactgtttcaaaataattatcttgggaaaaatcagggttttgctggacttgcactaatttgtacagttaacttcgtactttgacacacacctgaagatgcctccacctttgtagggcttagggcctttttatcagccctgggtggaccccagggccccttcctttcccttcccttctggtcatttctctggacttgtagagaatgtcctaagaaagtgtgactcacagacctctggattccatgtgtccaattagcgctgatgggactggagaaaggcttaaatccaatgggatctgcctgtgttggcaatttagggccgagatggctcgagggagtagatgcagagaggaagggtgatgatccctctgtgaccaagacacaatcctgtcccttcttttagtcaggatatccctgatgacagacagtgggacaatcaccaggccccattgtttaagaaaacgaggcttttgctcaggtcta

SEQ ID NO: 4385 - protein, 68 aa, Homo sapiens
MCGPGAPCARVRRENRGLESRTAVVFTLFILGPQLPDVLSLPVTLWPSLYLRVQNHRRLRLCLGQQPT

SEQ ID NO: 4386 - DNA, 426 bp, Homo sapiens
ggtttaactgaaatgcctactattttagtaactacacatttccagcaaaagtaaagaaatgatactcaatttcattattcaccacagacgccaagatcattctttagtctgattttagcctcacgtggtctcacccgaacatttgtttttggaatttggacctaactggttaccaaacctgtctgcaggtgtgagatgaagacttttgtgagtcctgaggccatttctcctgaccttgtcaagaagatccgtgatttccacaggaaaatactcaccctcccagagatgatgaggatgttctcagaaaacttggcgcatcatctggaaatagattcaggtaaacagcttgggatttggggagtcattcttccattcatccattcaatccatggcagcaaacagagcaataaaatgcatgaattctgg

SEQ ID NO: 4387 - protein, 76 aa, Homo sapiens
MKTFVSPEAISPDLVKKIRDFHRKILTLPEMMRMFSENLAHHLEIDSGKQLGIWGVILPFIHSIHGSKQSNKMHEF

SEQ ID NO: 4388 - DNA, 1737 bp, Homo sapiens
ctatggggatggatatgacgactgggaaacggacgaagatgaggaatcgttgggcgatgaagaggaagaagaggaggaggaagaggaggaagttctggaaagctgcatggtgggggtggctagagactctgtgaagaggaagggagacctctccctgcggccagaggatggcgtgtgggcgctgcgcctctcctcctccggcatctgggccaacaccagccccgaggctgagcttttcccagcactgcggccccggagagtgggcatcgccctggattatgaagggggcaccgtgactttcaccaacgcagagtcacaggaactcatctacaccttcactgccaccttcacccggcgcctggtccccttcctgtggctcaagtggccaggaacacgcctcctgctaagaccctgagccctgacatctgcccccagccccaaccctcagatgcttcacttctttggaattccaggactctcaatggggggacgggatgcctggcctaagcacctggagcaggggaccccatatccactggtagccacctccccattgctgtggccccctgaaatctcactcagtgctgttgctccatctactgccctaatggggctcttttcccacctcctgctggtttcccgagggaacttctgaccctggagtccatgagggctcctttcctttttgaccacgaccttggccccagctctgcactctctggaataagggcccgatgcagcattttcttgcccagtgtggcaagacctcagaaaaaccagtcaattacgcctaagatcattttgctgtccttaaaccccccaggttccttcttgcacaaatccactctgctgcccaccttccctggcattttaaacagacctaccccaccccaactcagagttaagcatacatggcaatgctgaaaataaacaaaatccactgaggcttcccaggccatttaaagcctggagtaccagcgcatatcatctcatggggtccagagtggagtccaggcttctctgaaaccagggctgagcatatttccatagccaaggaggtgggactccctggagctatctgtggtcttagggaaggatccagacatacacggctttggggtacaagctgtgatcactgatcaataaattatctctagattggtccttgtgaggggagttttaagaatccagaacatcttgctcttgatcagcacatccaaaaacaccaagacaaacatccagtggagcagaacctctcctgcctcgggagttctgaccgggttccccagcagggtgttaagcctctgtctctggccctaccagcatccaggttccactttcctaggagagagtggagatgggaagacagggaaaggaaggcagcaggaggccacaagcccaccagccaaattgatctcccagtcttgtccttacccattccaagtgctctgccagcccctgttcatccaagttttaagtcctccaccctgttctaagagactgttccaacggctctgggcctcagtggtcacttgaccaccattgtctcagagctgcccactttgtgtgtgtcacatgctgcctgagtcacatgtacatcttatttctgcctctagttttgtaagctcctggagggcggataacatcttatactactcttgtattctcatggcacctagtgcagtgctgggcacagagtaggtgctcaataaagacttgttgaatgaacagcctgga

SEQ ID NO: 4389 - protein, 102 aa, Homo sapiens [sequence omitted]

SEQ ID NO: 4390 - DNA, 1106 bp, Homo sapiens
acagtgagcgtcaccctggacccacagtcggccagtgggtacctgcagctgtcagaggactggaagtgcgtgacctacaccagcctgtacaagagtgcctacctgcacccccagcagtttgactgtgagcctggggtgctaggcagcaagggcttcacctggggcaaggtctactgggaagtggaagtggagagggagggctggtctgaggatgaagaagagggggatgaggaggaagagggagaagaggaggaggaggaagaggaggccggctatggggatggatatgacgactgggaaacggacgaagatgaggaatcgttgggcgatgaagaggaagaagaggaggaggaagaggaggaagttctggaaagctgcatggtgggggtggctagagactctgtgaagaggaagggagacctctccctgcggccagaggatggcgtgtgggcgctgcgcctctcctcctccggcatctgggccaacaccagccccgaggctgagcttttcccagcactgcggccccggagagtgggcatcgccctggattatgaagggggcaccgtgactttcaccaacgcagagtcacaggaactcatctacaccttcactgccaccttcacccggcgcctggtccccttcctgtggctcaagtggccaggaacacgcctcctgctaagaccctgagccctgacatctgcccccagccccaaccctcagatgcttcacttctttggaattccaggactctcaatggggggacgggatgcctggccaaattgatctcccagtcttgtccttacccattccaagtgctctgccagcccctgttcatccaagttttaagtcctccaccctgttctaagagactgttccaacggctctgggcctcagtggtcacttgaccaccattgtctcagagctgcccactttgtgtgtgtcacatgctgcctgagtcacatgtacatcttatttctgcctctagttttgtaagctcctggagggcggataacatcttatactactcttgtattctcatggcacctagtgcagtgctgggcacagagtaggtgctcaataaagacttgttgaatgaacagcctgga

SEQ ID NO: 4391 - protein, 32 aa, Homo sapiens
MPGQIDLPVLSLPIPSALPAPVHPSFKSSTLF

SEQ ID NO: 4392 - DNA, 3123 bp, Homo sapiens
catgcatatccagccctgcgcagtctggcctctgccgttctcaccaagccctttcctgttttaccttacctctcttcatccggccagtacttcttatccgtcaattctctgcgcaggtatctcccagagaggttgcccatgtcatctcccagccattgtggcttctgtcattgtgccgattttgtttgttttcttgttgttttatgcagtgaccccactggaatgtcagctccataaaaaagggaccacatttgttttgttcactgatatgtcccatctctgctacagtgttgggtgcagatgcattgaagtcttatttgattcatattgatacttgtgcttttttctttcccttctaggacacgagagacttcctaaacaggtaaaagagtctcctctccatggcgtacctcatcccccttgtttatgttcccccgcttctgaccaggtgcatttgaattcatggggagtggtatggtgccagaggtactcacatcccatggttcatcctgatgcccttctgaggagcaggacacatcattgagaactggagacttgctctcctccttatggttctctgtgtagccccagctccttggcccactggccttatttgaggtgggacagagcagagaggttagaaacatggcttagtagacagagcgccctggatgtggagtctactgatgttctgaagccctggttcagctggtgtctttgggccactgtttttctgtcacttgtttggggataatcatacctttcctctccccttcataattgccatgaggattgagagataagtatgaaggaaagtaagaagagctgagtaacagcttgttatgtatgtcatcttcttaggtatccacggaagaagttctgggttgggaaacccattgctcgagtggttaaaaaaaagaccggagaattctcagataaactcctctctctgcaacgaggcctgagggaattccaggggaagctgctgagagacttggaatataagacagtgagcgtcaccctggacccacagtcggccagtgggtacctgcagctgtcagaggactggaagtgcgtgacctacaccagcctgtacaagagtgcctacctgcacccccagcagtttgactgtgagcctggggtgctaggcagcaagggcttcacctggggcaaggtctactgggaagtggaagtggagagggagggctggtctgaggatgaagaagagggggatgaggaggaagagggagaagaggaggaggaggaagaggaggccggctatggggatggatatgacgactgggaaacggacgaagatgaggaatcgttgggcgatgaagaggaagaagaggaggaggaagaggaggaagttctggaaagctgcatggtgggggtggctagagactctgtgaagaggaagggagacctctccctgcggccagaggatggcgtgtgggcgctgcgcctctcctcctccggcatctgggccaacaccagccccgaggctgagcttttcccagcactgcggccccggagagtgggcatcgccctggattatgaagggggcaccgtgactttcaccaacgcagagtcacaggaactcatctacaccttcactgccaccttcacccggcgcctggtccccttcctgtggctcaagtggccaggaacacgcctcctgctaagaccctgagccctgacatctgcccccagccccaaccctcagatgcttcacttctttggaattccaggactctcaatggggggacgggatgcctggcctaagcacctggagcaggggaccccatatccactggtagccacctccccattgctgtggccccctgaaatctcactcagtgctgttgctccatctactgccctaatggggctcttttcccacctcctgctggtttcccgagggaacttctgaccctggagtccatgagggctcctttcctttttgaccacgaccttggccccagctctgcactctctggaataagggcccgatgcagcattttcttgcccagtgtggcaagacctcagaaaaaccagtcaattacgcctaagatcattttgctgtccttaaaccccccaggttccttcttgcacaaatccactctgctgcccaccttccctggcattttaaacagacctaccccaccccaactcagagttaagcatacatggcaatgctgaaaataaacaaaatccactgaggcttcccaggccatttaaagcctggagtaccagcgcatatcatctcatggggtccagagtggagtccaggcttctctgaaaccagggctgagcatatttccatagccaaggaggtgggactccctggagctatctgtggtcttagggaaggatccagacatacacggctttggggtacaagctgtgatcactgatcaataaattatctctagattggtccttgtgaggggagttttaagaatccagaacatcttgctcttgatcagcacatccaaaaacaccaagacaaacatccagtggagcagaacctctcctgcctcgggagttctgaccgggttccccagcagggtgttaagcctctgtctctggccctaccagcatccaggttccactttcctaggagagagtggagatgggaagacagggaaaggaaggcagcaggaggccacaagcccaccaggtcttcatgtcaagagagggagtaacatgtcttctcattgcccacggacccaacctctgtccaggtgcccctcatcatcacagtttaacacaagctcccctgctccagccaaattgatctcccagtcttgtccttacccattccaagtgctctgccagcccctgttcatccaagttttaagtcctccaccctgttctaagagactgttccaacggctctgggcctcagtggtcacttgaccaccattgtctcagagctgcccactttgtgtgtgtcacatgctgcctgagtcacatgtacatcttatttctgcctctagttttgtaagctcctggagggcggataacatcttatactactcttgtattctcatggcacctagtgcagtgctgggcacagagtaggtgctcaataaagacttgttgaatgaacagcctgga

SEQ ID NO: 4393 - protein, 109 aa, Homo sapiens
MHIQPCAVWPLPFSPSPFLFYLTSLHPASTSYPSILCAGISQRGCPCHLPAIVASVIVPILFVFLLFYAVTPLECQLHKKGTTFVLFTDMSHLCYSVGCRCIEVLFDSY

SEQ ID NO: 4394 - DNA, 3260 bp, Homo sapiens
ggagtcaggaatggagagaagggtaatggttttacctcttattgtggaaacctgttgagatcacagagaatatactgacggcataaaagggcagaaccatagcagggtgcgcgctgctgtagttgccttccatggatctataggagagcaagtcctccaggagaagaagtcctcaccagtgaacggagacctctctgaactaaggataccatggccacgtcagccccactacggagcctggaagaggaggtgacctgctccatctgtcttgattacctgcgggaccctgtgaccattgactgtggccacgtcttctgccgcagctgcaccacagacgtccgccccatctcagggagccgccccgtctgcccactctgcaagaagccttttaagaaggagaacatccgacccgtgtggcaactggccagcctggtggagaacattgagcggctgaaggtggacaagggcaggcagccgggagaggtgacccgggagcagcaggatgcaaagttgtgcgagcgacaccgagagaagctgcactactactgtgaggacgacgggaagctgctgtgcgtgatgtgccgggagtcccgggagcacaggccccacacggccgtcctcatggagaaggccgcccagccccacagggaaaaaatcctgaaccacctgagtaccctaaggagggacagagacaaaattcagggcttccaggcaaagggagaagctgatatcctggccgcgctgaagaagctccaggaccagaggcagtacattgtggctgagtttgagcagggtcatcagttcctgagggagcgggaggaacacctgctggaacagctggcgaagctggagcaggagctcacggagggcagggagaagttcaagagccggggcgtcggggagcttgcccggctggccctggtcatctccgaactggagggcaaggcgcagcagccagctgcagagctcatgcaggacacgagagacttcctaaacaggtatccacggaagaagttctgggttgggaaacccattgctcgagtggttaaaaaaaagaccggagaattctcagataaactcctctctctgcaacgaggcctgagggaattccaggggaagctgctgagagacttggaatataagacagtgagcgtcaccctggacccacagtcggccagtgggtacctgcagctgtcagaggactggaagtgcgtgacctacaccagcctgtacaagagtgcctacctgcacccccagcagtttgactgtgagcctggggtgctaggcagcaagggcttcacctggggcaaggtctactgggaagtggaagtggagagggagggctggtctgaggatgaagaagagggggatgaggaggaagagggagaagaggaggaggaggaagaggaggccggctatggggatggatatgacgactgggaaacggacgaagatgaggaatcgttgggcgatgaagaggaagaagaggaggaggaagaggaggaagttctggaaagctgcatggtgggggtggctagagactctgtgaagaggaagggagacctctccctgcggccagaggatggcgtgtgggcgctgcgcctctcctcctccggcatctgggccaacaccagccccgaggctgagcttttcccagcactgcggccccggagagtgggcatcgccctggattatgaagggggcaccgtgactttcaccaacgcagagtcacaggaactcatctacaccttcactgccaccttcacccggcgcctggtccccttcctgtggctcaagtggccaggaacacgcctcctgctaagaccctgagccctgacatctgcccccagccccaaccctcagatgcttcacttctttggaattccaggactctcaatggggggacgggatgcctggcctaagcacctggagcaggggaccccatatccactggtagccacctccccattgctgtggccccctgaaatctcactcagtgctgttgctccatctactgccctaatggggctcttttcccacctcctgctggtttcccgagggaacttctgaccctggagtccatgagggctcctttcctttttgaccacgaccttggccccagctctgcactctctggaataagggcccgatgcagcattttcttgcccagtgtggcaagacctcagaaaaaccagtcaattacgcctaagatcattttgctgtccttaaaccccccaggttccttcttgcacaaatccactctgctgcccaccttccctggcattttaaacagacctaccccaccccaactcagagttaagcatacatggcaatgctgaaaataaacaaaatccactgaggcttcccaggccatttaaagcctggagtaccagcgcatatcatctcatggggtccagagtggagtccaggcttctctgaaaccagggctgagcatatttccatagccaaggaggtgggactccctggagctatctgtggtcttagggaaggatccagacatacacggctttggggtacaagctgtgatcactgatcaataaattatctctagattggtccttgtgaggggagttttaagaatccagaacatcttgctcttgatcagcacatccaaaaacaccaagacaaacatccagtggagcagaacctctcctgcctcgggagttctgaccgggttccccagcagggtgttaagcctctgtctctggccctaccagcatccaggttccactttcctaggagagagtggagatgggaagacagggaaaggaaggcagcaggaggccacaagcccaccaggtcttcatgtcaagagagggagtaacatgtcttctcattgcccacggacccaacctctgtccaggtgcccctcatcatcacagtttaacacaagctcccctgctccagccaaattgatctcccagtcttgtccttacccattccaagtgctctgccagcccctgttcatccaagttttaagtcctccaccctgttctaagagactgttccaacggctctgggcctcagtggtcacttgaccaccattgtctcagagctgcccactttgtgtgtgtcacatgctgcctgagtcacatgtacatcttatttctgcctctagttttgtaagctcctggagggcggataacatcttatactactcttgtattctcatggcacctagtgcagtgctgggcacagagtaggtgctcaataaagacttgttgaatgaacagcctgga

SEQ ID NO: 4395 - protein, 539 aa, Homo sapiens; identical to SEQ ID NO: 513

SEQ ID NO: 4396 - DNA, 3242 bp, Homo sapiens
ggtgccggccgggattcgcggcccggagctcgggaccggttgcttcattccagcctcgcagtcacctctgtgccctgctggttgtcttcccagcgctgctgtagttgccttccatggatctataggagagcaagtcctccaggagaagaagtcctcaccagtgaacggagacctctctgaactaaggataccatggccacgtcagccccactacggagcctggaagaggaggtgacctgctccatctgtcttgattacctgcgggaccctgtgaccattgactgtggccacgtcttctgccgcagctgcaccacagacgtccgccccatctcagggagccgccccgtctgcccactctgcaagaagccttttaagaaggagaacatccgacccgtgtggcaactggccagcctggtggagaacattgagcggctgaaggtggacaagggcaggcagccgggagaggtgacccgggagcagcaggatgcaaagttgtgcgagcgacaccgagagaagctgcactactactgtgaggacgacgggaagctgctgtgcgtgatgtgccgggagtcccgggagcacaggccccacacggccgtcctcatggagaaggccgcccagccccacagggaaaaaatcctgaaccacctgagtaccctaaggagggacagagacaaaattcagggcttccaggcaaagggagaagctgatatcctggccgcgctgaagaagctccaggaccagaggcagtacattgtggctgagtttgagcagggtcatcagttcctgagggagcgggaggaacacctgctggaacagctggcgaagctggagcaggagctcacggagggcagggagaagttcaagagccggggcgtcggggagcttgcccggctggccctggtcatctccgaactggagggcaaggcgcagcagccagctgcagagctcatgcaggacacgagagacttcctaaacaggtatccacggaagaagttctgggttgggaaacccattgctcgagtggttaaaaaaaagaccggagaattctcagataaactcctctctctgcaacgaggcctgagggaattccaggggaagctgctgagagacttggaatataagacagtgagcgtcaccctggacccacagtcggccagtgggtacctgcagctgtcagaggactggaagtgcgtgacctacaccagcctgtacaagagtgcctacctgcacccccagcagtttgactgtgagcctggggtgctaggcagcaagggcttcacctggggcaaggtctactgggaagtggaagtggagagggagggctggtctgaggatgaagaagagggggatgaggaggaagagggagaagaggaggaggaggaagaggaggccggctatggggatggatatgacgactgggaaacggacgaagatgaggaatcgttgggcgatgaagaggaagaagaggaggaggaagaggaggaagttctggaaagctgcatggtgggggtggctagagactctgtgaagaggaagggagacctctccctgcggccagaggatggcgtgtgggcgctgcgcctctcctcctccggcatctgggccaacaccagccccgaggctgagcttttcccagcactgcggccccggagagtgggcatcgccctggattatgaagggggcaccgtgactttcaccaacgcagagtcacaggaactcatctacaccttcactgccaccttcacccggcgcctggtccccttcctgtggctcaagtggccaggaacacgcctcctgctaagaccctgagccctgacatctgcccccagccccaaccctcagatgcttcacttctttggaattccaggactctcaatggggggacgggatgcctggcctaagcacctggagcaggggaccccatatccactggtagccacctccccattgctgtggccccctgaaatctcactcagtgctgttgctccatctactgccctaatggggctcttttcccacctcctgctggtttcccgagggaacttctgaccctggagtccatgagggctcctttcctttttgaccacgaccttggccccagctctgcactctctggaataagggcccgatgcagcattttcttgcccagtgtggcaagacctcagaaaaaccagtcaattacgcctaagatcattttgctgtccttaaaccccccaggttccttcttgcacaaatccactctgctgcccaccttccctggcattttaaacagacctaccccaccccaactcagagttaagcatacatggcaatgctgaaaataaacaaaatccactgaggcttcccaggccatttaaagcctggagtaccagcgcatatcatctcatggggtccagagtggagtccaggcttctctgaaaccagggctgagcatatttccatagccaaggaggtgggactccctggagctatctgtggtcttagggaaggatccagacatacacggctttggggtacaagctgtgatcactgatcaataaattatctctagattggtccttgtgaggggagttttaagaatccagaacatcttgctcttgatcagcacatccaaaaacaccaagacaaacatccagtggagcagaacctctcctgcctcgggagttctgaccgggttccccagcagggtgttaagcctctgtctctggccctaccagcatccaggttccactttcctaggagagagtggagatgggaagacagggaaaggaaggcagcaggaggccacaagcccaccaggtcttcatgtcaagagagggagtaacatgtcttctcattgcccacggacccaacctctgtccaggtgcccctcatcatcacagtttaacacaagctcccctgctccagccaaattgatctcccagtcttgtccttacccattccaagtgctctgccagcccctgttcatccaagttttaagtcctccaccctgttctaagagactgttccaacggctctgggcctcagtggtcacttgaccaccattgtctcagagctgcccactttgtgtgtgtcacatgctgcctgagtcacatgtacatcttatttctgcctctagttttgtaagctcctggagggcggataacatcttatactactcttgtattctcatggcacctagtgcagtgctgggcacagagtaggtgctcaataaagacttgttgaatgaacagcctgga

SEQ ID NO: 4397 - protein, 539 aa, Homo sapiens; identical to SEQ ID NO: 513

SEQ ID NO: 4398 - DNA, 3469 bp, Homo sapiens
aggaggggtgccggccgggattcgcggcccggagctcgggaccggagtcaggaatggagagaagggtaatggttttacctcttattgtggaaacctgttgagatcacagagaatatactgacggcataaaagggcagaaccatagcagggtgcggttgcttcattccagcctcgcagtcacctctgtgccctgctggttgtcttcccagcgctgctgtagttgccttccatggatctataggagagcaagtcctccaggagctggtggtgtctgtcgattgactgagtgctggagctggcagccctgtgcaggctgccacctttgcccctttactgtgcttgctcctgactctatgtcgcgtctccaaggagaagaagtcctcaccagtgaacggagacctctctgaactaaggataccatggccacgtcagccccactacggagcctggaagaggaggtgacctgctccatctgtcttgattacctgcgggaccctgtgaccattgactgtggccacgtcttctgccgcagctgcaccacagacgtccgccccatctcagggagccgccccgtctgcccactctgcaagaagccttttaagaaggagaacatccgacccgtgtggcaactggccagcctggtggagaacattgagcggctgaaggtggacaagggcaggcagccgggagaggtgacccgggagcagcaggatgcaaagttgtgcgagcgacaccgagagaagctgcactactactgtgaggacgacgggaagctgctgtgcgtgatgtgccgggagtcccgggagcacaggccccacacggccgtcctcatggagaaggccgcccagccccacagggaaaaaatcctgaaccacctgagtaccctaaggagggacagagacaaaattcagggcttccaggcaaagggagaagctgatatcctggccgcgctgaagaagctccaggaccagaggcagtacattgtggctgagtttgagcagggtcatcagttcctgagggagcgggaggaacacctgctggaacagctggcgaagctggagcaggagctcacggagggcagggagaagttcaagagccggggcgtcggggagcttgcccggctggccctggtcatctccgaactggagggcaaggcgcagcagccagctgcagagctcatgcaggacacgagagacttcctaaacaggtatccacggaagaagttctgggttgggaaacccattgctcgagtggttaaaaaaaagaccggagaattctcagataaactcctctctctgcaacgaggcctgagggaattccaggggaagctgctgagagacttggaatataagacagtgagcgtcaccctggacccacagtcggccagtgggtacctgcagctgtcagaggactggaagtgcgtgacctacaccagcctgtacaagagtgcctacctgcacccccagcagtttgactgtgagcctggggtgctaggcagcaagggcttcacctggggcaaggtctactgggaagtggaagtggagagggagggctggtctgaggatgaagaagagggggatgaggaggaagagggagaagaggaggaggaggaagaggaggccggctatggggatggatatgacgactgggaaacggacgaagatgaggaatcgttgggcgatgaagaggaagaagaggaggaggaagaggaggaagttctggaaagctgcatggtgggggtggctagagactctgtgaagaggaagggagacctctccctgcggccagaggatggcgtgtgggcgctgcgcctctcctcctccggcatctgggccaacaccagccccgaggctgagcttttcccagcactgcggccccggagagtgggcatcgccctggattatgaagggggcaccgtgactttcaccaacgcagagtcacaggaactcatctacaccttcactgccaccttcacccggcgcctggtccccttcctgtggctcaagtggccaggaacacgcctcctgctaagaccctgagccctgacatctgcccccagccccaaccctcagatgcttcacttctttggaattccaggactctcaatggggggacgggatgcctggcctaagcacctggagcaggggaccccatatccactggtagccacctccccattgctgtggccccctgaaatctcactcagtgctgttgctccatctactgccctaatggggctcttttcccacctcctgctggtttcccgagggaacttctgaccctggagtccatgagggctcctttcctttttgaccacgaccttggccccagctctgcactctctggaataagggcccgatgcagcattttcttgcccagtgtggcaagacctcagaaaaaccagtcaattacgcctaagatcattttgctgtccttaaaccccccaggttccttcttgcacaaatccactctgctgcccaccttccctggcattttaaacagacctaccccaccccaactcagagttaagcatacatggcaatgctgaaaataaacaaaatccactgaggcttcccaggccatttaaagcctggagtaccagcgcatatcatctcatggggtccagagtggagtccaggcttctctgaaaccagggctgagcatatttccatagccaaggaggtgggactccctggagctatctgtggtcttagggaaggatccagacatacacggctttggggtacaagctgtgatcactgatcaataaattatctctagattggtccttgtgaggggagttttaagaatccagaacatcttgctcttgatcagcacatccaaaaacaccaagacaaacatccagtggagcagaacctctcctgcctcgggagttctgaccgggttccccagcagggtgttaagcctctgtctctggccctaccagcatccaggttccactttcctaggagagagtggagatgggaagacagggaaaggaaggcagcaggaggccacaagcccaccaggtcttcatgtcaagagagggagtaacatgtcttctcattgcccacggacccaacctctgtccaggtgcccctcatcatcacagtttaacacaagctcccctgctccagccaaattgatctcccagtcttgtccttacccattccaagtgctctgccagcccctgttcatccaagttttaagtcctccaccctgttctaagagactgttccaacggctctgggcctcagtggtcacttgaccaccattgtctcagagctgcccactttgtgtgtgtcacatgctgcctgagtcacatgtacatcttatttctgcctctagttttgtaagctcctggagggcggataacatcttatactactcttgtattctcatggcacctagtgcagtgctgggcacagagtaggtgctcaataaagacttgttgaatgaacagcctgga

SEQ ID NO: 4399 - protein, 539 aa, Homo sapiens; identical to SEQ ID NO: 513

SEQ ID NO: 4400 - DNA, 297 bp, Homo sapiens
ggagtcaggaatggagagaagggtaatggttttacctcttattgtggaaacctgttgagatcacagagaatatactgacggcataaaagggcagaaccatagcagggtgcggttgcttcattccagcctcgcagtcacctctgtgccctgctggttgtcttcccagcgctgctgtagttgccttccatggatctataggagaggcggataacatcttatactactcttgtattctcatggcacctagtgcagtgctgggcacagagtaggtgctcaataaagacttgttgaatgaac

SEQ ID NO: 4401 - protein, 50 aa, Homo sapiens
DHREYTDGIKGQNHSRVRLLHSSLAVTSVPCWLSSQRCCSCLPWIYRRGG

SEQ ID NO: 4402 - DNA, 1180 bp, Homo sapiens
ggggatgaggaggaagagggagaagaggaggaggaggaagaggaggccggctatggggatggatatgacgactgggaaacggacgaagatgaggaatcgttgggcgatgaagaggaagaagaggaggaggaagaggaggaagttctggaaagctgcatggtgggggtggctagagactctgtgaagaggaagggagacctctccctgcggccagaggatggcgtgtgggcgctgcgcctctcctcctccggcatctgggccaacaccagccccgaggctgagcttttcccagcactgcggccccggagagtgggcatcgccctggattatgaagggggcaccgtgactttcaccaacgcagagtcacaggaactcatctacaccttcactgccaccttcacccggcgcctggtccccttcctgtggctcaagtggccaggaacacgcctcctgctaagaccctgagccctgacatctgcccccagccccaaccctcagatgcttcacttctttggaattccaggactctcaatggggggacgggatgcctggcctaagcacctggagcaggggaccccatatccactggtagccacctccccattgctgtggccccctgaaatctcactcagtgctgttgctccatctactgccctaatggggctcttttcccacctcctgctggtttcccgagggaacttctgaccctggagtccatgagggctcctttcctttttgaccacgaccttggccccagctctgcactctctggaataagggcccgatgcagcattttcttgcccagtgtggcaagacctcagaaaaaccagtcaattacgcctaagatcattttgctgtccttaaaccccccagtcttgtccttacccattccaagtgctctgccagcccctgttcatccaagttttaagtcctccaccctgttctaagagactgttccaacggctctgggcctcagtggtcacttgaccaccattgtctcagagctgcccactttgtgtgtgtcacatgctgcctgagtcacatgtacatcttatttctgcctctagttttgtaagctcctggagggcggataacatcttatactactcttgtattctcatggcacctagtgcagtgctgggcacagagtaggtgctcaataaagacttgttgaatgaac

SEQ ID NO: 4403 - protein, 76 aa, Homo sapiens
MRAPFLFDHDLGPSSALSGIRARCSIFLPSVARPQKNQSITPKIILLSLNPPVLSLPIPSALPAPVHPSFKSSTLF

SEQ ID NO: 4404 - DNA, 980 bp, Homo sapiens
acagtgagcgtcaccctggacccacagtcggccagtgggtacctgcagctgtcagaggactggaagtgcgtgacctacaccagcctgtacaagagtgcctacctgcacccccagcagtttgactgtgagcctggggtgctaggcagcaagggcttcacctggggcaaggtctactgggaagtggaagtggagagggagggctggtctgaggatgaagaagagggggatgaggaggaagagggagaagaggaggaggaggaagaggaggccggctatggggatggatatgacgactgggaaacggacgaagatgaggaatcgttgggcgatgaagaggaagaagaggaggaggaagaggaggaagttctggaaagctgcatggtgggggtggctagagactctgtgaagaggaagggagacctctccctgcggccagaggatggcgtgtgggcgctgcgcctctcctcctccggcatctgggccaacaccagccccgaggctgagcttttcccagcactgcggccccggagagtgggcatcgccctggattatgaagggggcaccgtgactttcaccaacgcagagtcacaggaactcatctacaccttcactgccaccttcacccggcgcctggtccccttcctgtggctcaagtggccaggaacacgcctcctgctaagaccctgagccctgacatctgcccccacccctgttcatccaagttttaagtcctccaccctgttctaagagactgttccaacggctctgggcctcagtggtcacttgaccaccattgtctcagagctgcccactttgtgtgtgtcacatgctgcctgagtcacatgtacatcttatttctgcctctagttttgtaagctcctggagggcggataacatcttatactactcttgtattctcatggcacctagtgcagtgctgggcacagagtaggtgctcaataaagacttgttgaatgaac

SEQ ID NO: 4405 - protein, 102 aa, Homo sapiens [sequence omitted]

SEQ ID NO: 4406 - DNA, 469 bp, Homo sapiens
gattcgcggcccggagctcgggaccggagtcaggaatggagagaagggtaatggttttacctcttattgtggaaacctgttgagatcacagagaatatactgacggcataaaagggcagaaccatagcagggtgcggttgcttcattccagcctcgcagtcacctctgtgccctgctggttgtcttcccagcgctgctgtagttgccttccatggatctataggagagcaagtcctccagagactgttccaacggctctgggcctcagtggtcacttgaccaccattgtctcagagctgcccactttgtgtgtgtcacatgctgcctgagtcacatgtacatcttatttctgcctctagttttgtaagctcctggagggcggataacatcttatactactcttgtattctcatggcacctagtgcagtgctgggcacagagtaggtgctcaataaagacttgttgaatg

SEQ ID NO: 4407 - protein, 41 aa, Homo sapiens
MLPESHVHLISASSFVSSWRADNILYYSCILMAPSAVLGTE

SEQ ID NO: 4408 - DNA, 596 bp, Homo sapiens
acagaccgccgtgagagaggaggggtgccggccgggattcgcggcccggagctcgggaccggagtcaggaatggagagaagggtaatggttttacctcttattgtggaaacctgttgagatcacagagaatatactgacggcataaaagggcagaaccatagcagggtgcggttgcttcattccagcctcgcagtcacctctgtgccctgctggttgtcttcccagcgctgctgtagttgccttccatggatctataggagagcaagtcctccagctgcaccacagacgtccgccccatctcagggagccgccccgtctgcccactctgcaagaagccttttaagaaggagaacatccgacccgtgtggcaactggccagcctggtggagaacattgagcggctgaaggtggacaagggcaggcagccgggagaggtgacccgggagcagcaggatgcaaagttgtgcgagcgacaccgagagaagctgcactactactgtgaggacgacgggaagctgctgtgcgtgatgtgccgggagtcccgggagcacaggccccacacggccgtcctcatggagaaggccgcccagcccca

SEQ ID NO: 4409 - protein, 95 aa, Homo sapiens
DHREYTDGIKGQNHSRVRLLHSSLAVTSVPCWLSSQRCCSCLPWIYRRASPPAAPQTSAPSQGAAPSAHSARSLLRRRTSDPCGNWPAWWRTLSG

SEQ ID NO: 4410 - DNA, 276 bp, Homo sapiens
cgggacccggaacagaccgccgtgagagaggaggggtgccggccgggattcgcggcccggagctcgggaccggagaagaagtcctcaccagtgaacggagacctctctgaactaaggataccatggccacgtcagccccactacggagcctggaagaggaggtgacctgctccatctgtcttgattacctgcgggaccctgtgaccattgactgtggccacgtcttctgccgcagctgcaccacagacgtccgccccatctcagggagccgccccg

SEQ ID NO: 4411 - protein, 50 aa, Homo sapiens
MATSAPLRSLEEEVTCSICLDYLRDPVTIDCGHVFCRSCTTDVRPISGSR

SEQ ID NO: 4412 - DNA, 619 bp, Homo sapiens
ccaggagcccttaaatggagtacccacagggaatggagctctaggctaagtgctttgggattacaggtgctttgctcttgtttggaggtccagacatatgcttgagaagcagcttgggatactcaagagaggcctgaactggtaccctggaggccaggatgaaaacccaggcctctccatttactttcttgggccccagagtccacatttgggattcactgtctaccagggcacctctctgggtggcatctaggagccggaggcaggccagagtttcacccaggctggagtgcagtggcgcagtcatggctgtctgcagcctcaacttcccgggctcggcagtcctcctgccttagcctcccacagtgctggaattacaggcacaagcccccgtgcccggctttcagctagtttttgtagctcatagtgattattcttggagccaataatcgtgcatgcatccacatcttgaaattacatggtgtcaccttgaccagtctgttgacatatgcagattaggtatttatgagatccagagacttataggggaggggtggatttcagggaaaagggaacctcttagagaaaggtagggagtgtctgcagttctgcctgtgag

SEQ ID NO: 4413 - protein, 65 aa, Homo sapiens [sequence omitted]

SEQ ID NO: 4414 - DNA, 732 bp, Homo sapiens
gttctttccacttctggggctgtgacttgagtttctccgcaggagcagatagtgtttgtgtagggactgcggacttttgcattacagcctccctgctttgcccgcctgctgctggaagcttagcagatacatttcatcaatgaagccttctggacctggagtttcctatatgagaaggattttgattacacattcaatttctacaatcaatatatgactggccacattttctatctcttctcaggccacaccgtagtcatagagcaagaggactcagatacagtttggttggtcctttaccttcaaaagttcaagtgctggctgccgagacttctccaactcagtgatcagggtcccaagctggaccacctcctcagaacccttgatgacacggctgttcctccttttgagacacttactgatgcaaaggagactgaacagtgaaggatctcactcagaatcctgtccacaatctgtccagtttacaccttaccccaaagagaggtagcctgttatacaacgttcttcacctcattctctcacttcacaatatatcttggagatcttaccaaaagcacacagagacctcctgcgttgtgattagattttcattgcataatattccattgttcgtgtgtgtgtgagtgtttagttagtctcaaattgataggtgcatgaatttttccaatcttttgttaaggcaagcagtattgaataaacttgtacataata

SEQ ID NO: 4415 - protein, 76 aa, Homo sapiens [sequence omitted]

SEQ ID NO: 4416 - DNA, 744 bp, Homo sapiens
taagaagacatgaagaaaacaaagaagttgtgagtttaatgaacatcaaaatggaacccatgagaaaatagtttttatgttcaaactgctcccaaccttttttctcaaaatccaaagtcccttccagagcactactcagaacacgttctggcttgcagtgttagatgaatgttaattttaggcagctagctctgctgtaagcatttcaaagggtgctcatatatgtaatttttttttcctgggcgacagagccagactccgtcacaaaagaagagaaaagaaaagaatgcactaggttcatccacaggtctgttattcatacactgcctgagaaatctcttcatcatggtttaaactaatttttttcaaacatgttttgaaacatcacagtaaaaaagtcactcatgtcccagtctaatatacatgcatatgcacacacagacacacacacacacacattttgttgggtaccatttttctttattatttgtaatatattctgatttttaaattacagtccgttttaaaaatgctggttataacctgcaaaattggtttcatgacagtaggtatcacctacattttgaaaaacaaatcaaaccacaactttatcactaacagtgacctctacctacagatgcaaactctggggagctaccaaggcctactgaaccaccacttgaatcttgcaccttaaactcacacatccaaatccactatctctctcattcttcctattcctca

SEQ ID NO: 4417 - protein, 55 aa, Homo sapiens [sequence omitted]

SEQ ID NO: 4418 - DNA, 4926 bp, Homo sapiens
gagacctgggccgcgactccgtgagtccgaggatggagcggcgggcgccgtgggtggagcaggaggggctggagtattgggaccaggagacacggaacgccaagggccacgcgcagatttaccgagtgaacctgcggaccctgctccgctattacaaccagagcgaggccggtatgaacagttcgcctacgatggcaaggattacatcgccctgaacgaggacctgcactcctggaccgccgcgaacacagcggctcagatctcccagcacaagtgggaagcggacaaatactcagagcaggtcagggcctacctgagggcaagtgcatggagtggctccgcagacacctggagaacgggaaggagacgctgcagcacgcggatcccccaaaggcacatgtgacccagcaccccatctctgaccatgaggccaccctgaggtgctgggccctgggcctctaccctgcggagatcacactgacctggcagcaggatggggaggaccagacccaggacacggagcttgtggagaccaggcctgcaggggacggaaccttccagaagtgggtggctgtagtggtgccttccggagaggagcagagatacatgtgccatgtgcagcatgaggggctgccagagcccctcaccctgagatgggagccgtcttctcagcccaccatccccatcgtgggcatcgttgctggcctgtttctccttggagctgtggtcactggagctgtggttgctgctgcgatgtggaggaagaaaagctcaggcagcaattgtgctcagtactctgatgcatctcatgatacttgtaaagaggactatgcctgttcctgttctggtgtctgcgttctgatctctttctcccctgggtgtccctcatctctgacagcagcaggagtcatttttcctgtcattaaccccacaaggtggaaggcagcccctgcacacagaagtctgtggtattaagagatgaattttcaagcccgtgcagcttttaccctatttccagggctctttcttggattgtattttctatcttttccccaacctttttaaaggaactagattctgaaattagcagagaagagggatgccacaagttctcatcttaggtaactttctagtggaactcctcttctgctcagctctcctacccactctcccttccctgagttgtagtaatcctagcactggctctaatgcaaactcatggatctataaagcaaagtctaacttagatttatatttgtttggaaattgggattcatagtcaaagattgttctttcctaagagggaaatataattgcatgctgcagtgtgcagagggttggtgtgaaggagggatgcagggaggaagggagggaggacacacaagcagcactgctgggaaaagcacaggcggcctggatgtcagtgtgaggggaccttgtgctgtcgttgctgcaaaaccgcatttggcctgaggctatgttaataaagatactgcctttagaataggaggtgctctacagtgatgattcattcagccgacatttgctgtctgccagacatatgacagaatgtttttgcatctggggaaagtcattgaagtaaaatcagaaaaatctctagccttgtggagcatgtgttccagtgggaagaggcagacggtacatacactctaatatatgcagagtaaatgaggaaagtgttagaaggtgataagtgctgtggaacaggtgatcagagtatgggttgtgggacagagaaggtagctattgtgccggggttgtcagcgtgggccttgttgggaaggtgacctttgatgaaatatttgaaggacataaaggaatttgtcatgagggtatctggaagaagttttttctagggagtaggaaccttcagtgtcagtgtaccagggcaggatcatgtctgtgtgttctgggaagaacacgggatcgggtatggctagagcagagagtcactgagataaggtcaggggtttggtcagatcatgtgggcatagggctcaagtatgtgggaaggattttgattttgaatgagatagttttaagcagaataaagacatgccacaacttctcttttaaaaggatcactgtagctgctctgctgagaacagaatccaaaggccggcgatgagcaaggcaggtgggaaaactgtaggaaatgagtgcagtatttcaggctggagatgtcggttacttcaactggggtgtgagcagtggaaatagtgggacgtgattggattcctactatttccaatcactttataccgcattttctaatggactaaatctggggtatgagaaagaagagtaaaggataccaaaaatgtcagactgtgactaaaaagagttgccatcagctgagaatgagaagactagcaggagcatatgagaggaggggacgtcgcaggcagtcactatgggagacgtgggatctgagatgccgctgagaaataccagtgaggtagtcgggttggcagttggacagatgaatctggagacatttaggagaaatagacttgggaggtgatgtcatataacagttatttaaagccttgagtctgaatgacgtctccaagggagtgattggctgtagaagagaacaggaacaaggactgaacactaggcctctgttgctaaaggatctgatcagacaacacacctagatcagactgcacagtcctgaccccacatctagaaggtacatagaccagggagttctagactttcctgtggacaggaatcacctggacatcaccttaagtctaagctgatctggaatcgagaatgagatttcctacttatataatgttgctgttggcgctgatgctgctggtcttcagatcccacttttggtagcaagaacacagaccaggattcctaggctatgcatcagcctcgcctgtgaggcttgttaataagcaattcctgcactccatgcgcaacattctgacacaggggcatctgtggagaggcctgagtattctacaacaagcccacagcaaacctggtgctcagccagatttgatatcactgagatcagtagttggagaatgcccaggatggggaggggtctcagacccacatttaagtgttgctttattctgggttttttatttatttatttatttatttttaaggaggatgtgtttctttaattataagacaggatgctgagagataaatgtcattttctctatcatggggtatagccagatggaagattgagaagtggctcacagctcagcagaatgaaaaaatatctgaatgctgctttctgaaactactctccagaatgatttcacactcactccttggagcaaacaatgacttgcaaatttttctaatttaaacataaaggagtgtacatattggtattagtattcattttattttggggaagggcactgtattagtccatagtccgttttcacactgccgataaagacatacccaacattgggaagaaaaagaggtttaattggacttacagttccatttggctggggaggcctcagaatcatggtgggaggcgaaaggcacttcttacatggtggtggcaagagaaaatgaggaagaagcaaatgccaaaacccctgataaacacattggatctcaggagacttattcattatcatgagaatagcatgggaaagactggcccccatgattcaattacctccccctgggtccctcccacaacatgtgggaattctgggagatacaattcaagttgagatttgggtggggacacagccaaaccacattggacacagaaccaggtttgaagctacacagccaggaacataatccacagccaccctaattcagatctctcataggaaccactgtccctgctcctgagcacagatgctactgcatatacctctgataccctgatggccgacactgggccctgtggcaaagactgctatcactgctgctcctgagaactgctccactactgctcctcagccatctttaccaaaatgcagtatttactgtcccagcctctctgtgtcatctcatcctgattagaagcccacatgtggttatctaaattgtgcagccaaagcctcttgcagtgtttaactgcaataatgttggggaaagtgaatttttctcctttgtagaaggaggtagtccctgccttctaataagactcttcaacataggaagagaattcagttgctggaggtagaggggtgagggatggaaaaagaatgacaaatttcaattcctagaatcatgttctgagactagaactttatctagtacattgcaggcacctgggtttggttgagtgtataataaatgacatagttcaacttattcccttgacagtttgttttggggtccagcttttgtctaccccagttttcacacacagatacgtggagaagcattgtgtgatggtaaaatgtttacttgaaagcctttttccctatctttgtctcttgctaggattaaaaacccgtatctgtaagacatcagaggatccatgtatacactgacattttatataaatttttaatattttgttctatctgcacatgctcctagggagagttatctatacattcaccagttttaatgtgactgctcacagaagcctaaaaaaccatcctaatttagatgccattttactcaaactattgtatgaacagctgataaccatactgtttttagaagacccagtgacatggtataaatgctcatcttttgcttgactgttactagtctgggatgagataaagtagaggtttacttgcatagttcactcacaatttctatatgtatagtattgtgggctgctaacaaacagtccacagaccagtgctagcccacagactgcactttgagagtagcattggtctagatgtacttgtattccagcatctacctcggtgt

SEQ ID NO: 4419 - protein, 215 aa, Homo sapiens; identical to SEQ ID NO: 515

SEQ ID NO: 4420 - DNA, 3136 bp, Homo sapiens
ggaagccgcgccgaggctcgtgtcagtggaagctggggtgtcggcgggcggccgcggccgggtctagcggtgcctgcggaagaaggaggaggagggctggcgatgagaagcagcagggggaatcaagggcaagaagggacccagaggggcaggtggctgagatgctggcgtccaggtgacccgaggaatcctctggagatacaggcccgcgcatgcgcgtgctcgagcgctgaagcccattgcccgcagggcgctggactggcgccccggccggcgaggctgtctagtccaggctccaggccccggctctggccaggcgccgccgcctcccggtgcagctgaaagtcgacgaagagggcggggcgggggcggcttgtggacttccacacttttcctctcttcgggccagtctggggagagggtggctagctgtggcggcggccaattacgtggcggacctgcggggctaagctggcacgtcacttccgactagtggagtttttagccttttaacattcaaggattaggtaagttctccccgcggtagacttcaaatactctttgtcctgcccctgcttggcgaaatttaccgaaattatctacctatcccgctggagtgggagccgggggagagctggaaccgcgtctctgctgctcacctttgtgtccttagctccttcgcatggggtccgaccgcaacacgtgcgctggataaacgcttgttaactggagctccctctttgcccactagcagggcattagctggtgctgaagacagtggctgcttggcgagcctggatctccaagtgaccccctcagcaactcctgatgaacaggactgaagccaatattaaagcaagtcaaccaaaggttctctggtgtagacaagacagcaaaaggacagactaccttgtggaacctagcattgttctccttctgcagcactaagtaacatttgttctccgttaagatctttgcaaaccacacacaagaattgctggtcatcctgccaatagatgctgctcacagaaccaaatttcctgtgctgaattgtcactcatgggcttgagagtaggagactggagaccaaggtggctagaatccagttgggcctgatgtctccctgttgaaagggctccttgtggaatgaatagcacatggctcctgtggtggatctgatagtggcatagcaccaagtgatgcaggcctgccaggggccacagacacagaagatgctcccggggtcccccatgtactccagacacactgcaggccacctctcccagcaggttgccagtcatgggccccatcatcatgacttctgtccaaggtactgtgtgcagaaatgtgattgagattcaagtcagggcctctctgcccttttccctccagaaacaaaaccaagataatttatcctgaacacggtgaaaaaaggaagggagggaggagaaaaagtccgggtctcacctgggattctctgtctcctgcaacatgaaggatttagcctgggaggaggtggtgagaactctgggagagaaaaaagaaggaaagaatagttttacccatgctgaagttaatttaaaccttcacctagagaagcaaaaaaaaaaaacccacactttcccattttgtgcctcccttcctagagttttagccaaaggtttagctaagtaattggttttaccagcgcactcactcctcctatcccaagtctgtttgactccctccccatcatcctcctcacctcttttcaggcagggtggggatagcagcaggaggagattttgggagcctggcaactcctgcaaggaccgcaggacagcccctctgtggggatgcgtggtgccccatctgccgcccttctgaagaatgcactgccttcactttttactgtgttagagtccatccagactgttctatccaaaaaagtttctttttcccccacaggcaatcaggaaatgattcctttcccgactgcttctgtctagtgcctgggaatcttgagtcaatccctcagtaagtcagtgactagggaaatccctctctgagcctcccagttcatgttgcttagggaacctgatattttcgtgaaacctgcctacacatgggcagcccaacagcagaacaaatggtggtgaccaaagtgaacaaagaagtatagttgtgccagcttcgtagttgcccatgtggacaagtcagcaggatcaggacacgaggaagagtaaatgtgagacagtcaatgtgacttctgcgataaacagatttttaaaccccgaaattttgcaaaattttggtgaaacctgaactttcttcgttgcatatactggcactatctgtaccatcatacaactgtctcacattaaagctatttttcttgggcactgatgagtaaggttggtataagttcctcagatcaacaaaaacccattttcctgtaagtcttacatttagtatttaaggaactaaaacttaaatacattttgtgaaatggttgacacttcactgataatgatttattgcttggattaataaattttccaaaagttgtcttatgtagaatatggtttgcaaccagcagaaccattaatctatactgcaatgatatgcactatgtataattgtttaaaagcctctacttaatgatgtaaaatgctctatttaattacacatttgggtaaactgtatactaacatctgatggcatttttccactgtttgttgcttttttcaaatactttattgtacaaagctgttcttaatatttttcaagtttttttctttgaattttgctaatgttttccttgaattatgagcactgacagaatgtgcttagcacttttggctattcacacagcttttgagcatgatttgcatccaatatttacattgctagcaataataagccatctgtgagttttgtcaaaagttattggggattttttaaattttagaaatgcaaattattgtttctttgaactaactcttatgcagttgcaaaggcatttccagttgttatagtttgtgtacaatatcaggtgttccagattatgattcattattaatatcattgcttccttgttccctctgaggtccagaagattcatgtttacaatatttagaaacaatgttaaaaaggt

SEQ ID NO: 4421 - protein, 51 aa, Homo sapiens
MQACQGPQTQKMLPGSPMYSRHTAGHLSQQVASHGPHHHDFCPRYCVQKCD

SEQ ID NO: 4422 - DNA, 5007 bp, Homo sapiens
ggaagccgcgccgaggctcgtgtcagtggaagctggggtgtcggcgggcggccgcggccgggtctagcggtgcctgcggaagaaggaggaggagggctggcgatgagaagcagcagggggaatcaagggcaagaagggacccagaggggcaggtggctgagatgctggcgtccaggtgacccgaggaatcctctggagatacaggcccgcgcatgcgcgtgctcgagcgctgaagcccattgcccgcagggcgctggactggcgccccggccggcgaggctgtctagtccaggctccaggccccggctctggccaggcgccgccgcctcccggtgcagctgaaagtcgacgaagagggcggggcgggggcggcttgtggacttccacacttttcctctcttcgggccagtctggggagagggtggctagctgtggcggcggccaattacgtggcggacctgcggggctaagctggcacgtcacttccgactagtggagtttttagccttttaacattcaaggattaggtaagttctccccgcggtagacttcaaatactctttgtcctgcccctgcttggcgaaatttaccgaaattatctacctatcccgctggagtgggagccgggggagagctggaaccgcgtctctgctgctcacctttgtgtccttagctccttcgcatggggtccgaccgcaacacgtgcgctggataaacgcttgttaactggagctccctctttgcccactagcagggcattagctggtgctgaagacagtggctgcttggcgagcctggatctccaagtgaccccctcagcaactcctgatgaacaggactgaagccaatattaaagcaagtcaaccaaaggttctctggtgtagacaagacagcaaaaggacagactaccttgtggaacctagcattgttctccttctgcagcactaagtaacatttgttctccgttaagatctttgcaaaccacacacaagaattgctggtcatcctgccaatagatgctgctcacagaaccaaatttcctgtgctgaattgtcactcatgggcttgagagtaggagactggagaccaaggtggctagaatccagttgggcctgatgtctccctgttgaaagggctccttgtggaatgaatagcacatggctcctgtggtggatctgatagtggcatagcaccaagtgatgcaggcctgccaggggccacagacacagaagatgctcccggggtcccccatgtactccagacacactgcaggccacctctcccagcaggttgccagtcatgggccccatcatcatgacttctgtccaaggtgtgctcggaaatctcttccttaactgtgactttctgacaggtggaggatgtggtcaggagtgggaaaaggattcgagacgggaagagggaggggttcaggatgaagagagataatctgtgccacagatgctggccctgcagttagctcccacctagtccgtgcacacacattctaatcccctcccattcctttacatgctgcggccagagaggcctttctcaaagtggaagtctcatcctcacttctctggttacagtgctgggccatggtaacttacaaggcttagcaggaactgtctgcgcactcccccttcctgcccactaccttgtttccctccagttgcgagagaaaacattgattgagcattaactatgtgccaggcttgtcctaagtcctttgcatgtattcactcaaacaatcctcacaacattcctatcacatctcccatttcacagtgagggttctaaagcacgtagtgggtgaggaacttgtccagggtcacacaactaagtgggggtggagaaacatcaaatctaggtggtccaggtggtggccagaacccatcagcacctcactacagctgcctccagtttctcgctctaggaaatactcttccctgtcaactcctgttgtcctctgggctcagttgacatgtcatctccttgaggaggacatcctgagatgctccccgactagggtgggcacccacttccacactccaaatgcctatttgacctgtgtatcgctgcatccccactgcctggcagatagcaggcccctaataaatatgatttgagcaaataaatatagttcttcaaaaaatagggaggacttcttgcttcaggtaatggtaggctaggacatttggaccaaccctcctgcagaaaatagccatttattttgatgcaatatatctggctatgactagagatttcaaatatttggagggctattatgtgaagaactaaacttactctttgtgacatagaggtcagaaattggtcgtttccatagagtatgagagagacagaattgtgctcatcataagtatcttttttaaaagttagacttaataaaatgggctgccttggtaggtggtgagttctctgtcacgaaagagattcagccacttgctctgagaaagcatggagaatatcaacattgtaagggtcgaccacctcatctctgaggccccctcctcacttaggttgccattgcaggtggaacactgggctgagtgtcaaagaacctgggttccacaagctgtgcgaccatggctggttgttttggatctcattcctaatatctgttagttaagctgacccgtcaatactgacccacttcacagagttatgaagggattaaattaggtattacatgtaaatctgttttgtttgctttttgttgttcttttttgttttgcttttttctttgcattatgaaatcccaagtcaactttttccattcttttatttttttaaaaattgacatcatcattataaccacaaaataatttttaaaatggaaaaaaaaaactcacctgcaaccccacaatctaatacaataatcatacttttttccctttattctcctttattgtgaccaaggatgactttgggcattgctgtgaggaactatttcgtttaacaccctactacctgaacatgatgcgtactcagcctttcaccaccccccaagtagctacacatgatgtgataatagtattggtggtggttttagagagttggagagaaaactgaagttggatttgggtaaaagaaaaaagagtgggaattattttttctccattctaaagcccataaagcaatgttaattgttcccacccctctgctattctgtctcctcaggtactgtgtgcagaaatgtgattgagattcaagtcagggcctctctgcccttttccctccagaaacaaaaccaagataatttatcctgaacacggtgaaaaaaggaagggagggaggagaaaaagtccgggtctcacctgggattctctgtctcctgcaacatgaaggatttagcctgggaggaggtggtgagaactctgggagagaaaaaagaaggaaagaatagttttacccatgctgaagttaatttaaaccttcacctagagaagcaaaaaaaaaaaacccacactttcccattttgtgcctcccttcctagagttttagccaaaggtttagctaagtaattggttttaccagcgcactcactcctcctatcccaagtctgtttgactccctccccatcatcctcctcacctcttttcaggcagggtggggatagcagcaggaggagattttgggagcctggcaactcctgcaaggaccgcaggacagcccctctgtggggatgcgtggtgccccatctgccgcccttctgaagaatgcactgccttcactttttactgtgttagagtccatccagactgttctatccaaaaaagtttctttttcccccacaggcaatcaggaaatgattcctttcccgactgcttctgtctagtgcctgggaatcttgagtcaatccctcagtaagtcagtgactagggaaatccctctctgagcctcccagttcatgttgcttagggaacctgatattttcgtgaaacctgcctacacatgggcagcccaacagcagaacaaatggtggtgaccaaagtgaacaaagaagtatagttgtgccagcttcgtagttgcccatgtggacaagtcagcaggatcaggacacgaggaagagtaaatgtgagacagtcaatgtgacttctgcgataaacagatttttaaaccccgaaattttgcaaaattttggtgaaacctgaactttcttcgttgcatatactggcactatctgtaccatcatacaactgtctcacattaaagctatttttcttgggcactgatgagtaaggttggtataagttcctcagatcaacaaaaacccattttcctgtaagtcttacatttagtatttaaggaactaaaacttaaatacattttgtgaaatggttgacacttcactgataatgatttattgcttggattaataaattttccaaaagttgtcttatgtagaatatggtttgcaaccagcagaaccattaatctatactgcaatgatatgcactatgtataattgtttaaaagcctctacttaatgatgtaaaatgctctatttaattacacatttgggtaaactgtatactaacatctgatggcatttttccactgtttgttgcttttttcaaatactttattgtacaaagctgttcttaatatttttcaagtttttttctttgaattttgctaatgttttccttgaattatgagcactgacagaatgtgcttagcacttttggctattcacacagcttttgagcatgatttgcatccaatatttacattgctagcaataataagccatctgtgagttttgtcaaaagttattggggattttttaaattttagaaatgcaaattattgtttctttgaactaactcttatgcagttgcaaaggcatttccagttgttatagtttgtgtacaatatcaggtgttccagattatgattcattattaatatcattgcttccttgttccctctgaggtccagaagattcatgtttacaatatttagaaacaatgttaaaaaggt

SEQ ID NO: 4423 - protein, 39 aa, Homo sapiens
MNRTEANIKASQPKVLWCRQDSKRTDYLVEPSIVLLLQH

SEQ ID NO: 4424 - DNA, 2715 bp, Homo sapiens
cggggcggcaaaacgtccgcccgggcccgaggcgggcggaggcagctgtggttacgtgcggggggccggtgacgcagtcgcggggcgctgggacgcggcttgcggagccggccggcgagcgcaggccccaggctcgggcgcggcggcgggacagcacctaccttcccggcttcgggtccgggagtgcggggcgcggagccgccggagcgctgcctccctccttcctcctcccctcgcccccgccccgcggcgcgacacacaatactcgccggaagcggaagccgcgccgaggctcgtgtcagtggaagctggggtgtcggcgggcggccgcggccgggtctagcggtgcctgcggaagaaggaggaggagggctggcgatgagaagcagcagggggaatcaagggcaagaagggacccagaggggcaggtggctgagatgctggcgtccaggtgacccgaggaatcctctggagatacaggcccgcgcatgcgcgtgctcgagcgctgaagcccattgcccgcagggcgctggactggcgccccggccggcgaggctgtctagtccaggctccaggccccggctctggccaggcgccgccgcctcccggtgcagctgaaagtcgacgaagagggcggggcgggggcggcttgtggacttccacacttttcctctcttcgggccagtctggggagagggtggctagctgtggcggcggccaattacgtggcggacctgcggggctaagctggcacgtcacttccgactagtggagtttttagccttttaacattcaaggattagagctccctctttgcccactagcagggcattagctggtgctgaagacagtggctgcttggcgagcctggatctccaagtgaccccctcagcaactcctgatgaacaggtactgtgtgcagaaatgtgattgagattcaagtcagggcctctctgcccttttccctccagaaacaaaaccaagataatttatcctgaacacggtgaaaaaaggaagggagggaggagaaaaagtccgggtctcacctgggattctctgtctcctgcaacatgaaggatttagcctgggaggaggtggtgagaactctgggagagaaaaaagaaggaaagaatagttttacccatgctgaagttaatttaaaccttcacctagagaagcaaaaaaaaaaaacccacactttcccattttgtgcctcccttcctagagttttagccaaaggtttagctaagtaattggttttaccagcgcactcactcctcctatcccaagtctgtttgactccctccccatcatcctcctcacctcttttcaggcagggtggggatagcagcaggaggagattttgggagcctggcaactcctgcaaggaccgcaggacagcccctctgtggggatgcgtggtgccccatctgccgcccttctgaagaatgcactgccttcactttttactgtgttagagtccatccagactgttctatccaaaaaagtttctttttcccccacaggcaatcaggaaatgattcctttcccgactgcttctgtctagtgcctgggaatcttgagtcaatccctcagtaagtcagtgactagggaaatccctctctgagcctcccagttcatgttgcttagggaacctgatattttcgtgaaacctgcctacacatgggcagcccaacagcagaacaaatggtggtgaccaaagtgaacaaagaagtatagttgtgccagcttcgtagttgcccatgtggacaagtcagcaggatcaggacacgaggaagagtaaatgtgagacagtcaatgtgacttctgcgataaacagatttttaaaccccgaaattttgcaaaattttggtgaaacctgaactttcttcgttgcatatactggcactatctgtaccatcatacaactgtctcacattaaagctatttttcttgggcactgatgagtaaggttggtataagttcctcagatcaacaaaaacccattttcctgtaagtcttacatttagtatttaaggaactaaaacttaaatacattttgtgaaatggttgacacttcactgataatgatttattgcttggattaataaattttccaaaagttgtcttatgtagaatatggtttgcaaccagcagaaccattaatctatactgcaatgatatgcactatgtataattgtttaaaagcctctacttaatgatgtaaaatgctctatttaattacacatttgggtaaactgtatactaacatctgatggcatttttccactgtttgttgcttttttcaaatactttattgtacaaagctgttcttaatatttttcaagtttttttctttgaattttgctaatgttttccttgaattatgagcactgacagaatgtgcttagcacttttggctattcacacagcttttgagcatgatttgcatccaatatttacattgctagcaataataagccatctgtgagttttgtcaaaagttattggggattttttaaattttagaaatgcaaattattgtttctttgaactaactcttatgcagttgcaaaggcatttccagttgttatagtttgtgtacaatatcaggtgttccagattatgattcattattaatatcattgcttccttgttccctctgaggtccagaagattcatgtttacaatatttagaaacaatgttaaaaaggt

SEQ ID NO: 4425 - protein, 79 aa, Homo sapiens [sequence omitted]

SEQ ID NO: 4426 - DNA, 3209 bp, Homo sapiens
cggggcggcaaaacgtccgcccgggcccgaggcgggcggaggcagctgtggttacgtgcggggggccggtgacgcagtcgcggggcgctgggacgcggcttgcggagccggccggcgagcgcaggccccaggctcgggcgcggcggcgggacagcacctaccttcccggcttcgggtccgggagtgcggggcgcggagccgccggagcgctgcctccctccttcctcctcccctcgcccccgccccgcggcgcgacacacaatactcgccggaagcggaagccgcgccgaggctcgtgtcagtggaagctggggtgtcggcgggcggccgcggccgggtctagcggtgcctgcggaagaaggaggaggagggctggcgatgagaagcagcagggggaatcaagggcaagaagggacccagaggggcaggtggctgagatgctggcgtccaggtgacccgaggaatcctctggagatacaggcccgcgcatgcgcgtgctcgagcgctgaagcccattgcccgcagggcgctggactggcgccccggccggcgaggctgtctagtccaggctccaggccccggctctggccaggcgccgccgcctcccggtgcagctgaaagtcgacgaagagggcggggcgggggcggcttgtggacttccacacttttcctctcttcgggccagtctggggagagggtggctagctgtggcggcggccaattacgtggcggacctgcggggctaagctggcacgtcacttccgactagtggagtttttagccttttaacattcaaggattagagctccctctttgcccactagcagggcattagctggtgctgaagacagtggctgcttggcgagcctggatctccaagtgaccccctcagcaactcctgatgaacaggactgaagccaatattaaagcaagtcaaccaaaggttctctggtgtagacaagacagcaaaaggacagactaccttgtggaacctagcattgttctccttctgcagcactaagtaacatttgttctccgttaagatctttgcaaaccacacacaagaattgctggtcatcctgccaatagatgctgctcacagaaccaaatttcctgtgctgaattgtcactcatgggcttgagagtaggagactggagaccaaggtggctagaatccagttgggcctgatgtctccctgttgaaagggctccttgtggaatgaatagcacatggctcctgtggtggatctgatagtggcatagcaccaagtgatgcaggcctgccaggggccacagacacagaagatgctcccggggtcccccatgtactccagacacactgcaggccacctctcccagcaggttgccagtcatgggccccatcatcatgacttctgtccaaggtactgtgtgcagaaatgtgattgagattcaagtcagggcctctctgcccttttccctccagaaacaaaaccaagataatttatcctgaacacggtgaaaaaaggaagggagggaggagaaaaagtccgggtctcacctgggattctctgtctcctgcaacatgaaggatttagcctgggaggaggtggtgagaactctgggagagaaaaaagaaggaaagaatagttttacccatgctgaagttaatttaaaccttcacctagagaagcaaaaaaaaaaaacccacactttcccattttgtgcctcccttcctagagttttagccaaaggtttagctaagtaattggttttaccagcgcactcactcctcctatcccaagtctgtttgactccctccccatcatcctcctcacctcttttcaggcagggtggggatagcagcaggaggagattttgggagcctggcaactcctgcaaggaccgcaggacagcccctctgtggggatgcgtggtgccccatctgccgcccttctgaagaatgcactgccttcactttttactgtgttagagtccatccagactgttctatccaaaaaagtttctttttcccccacaggcaatcaggaaatgattcctttcccgactgcttctgtctagtgcctgggaatcttgagtcaatccctcagtaagtcagtgactagggaaatccctctctgagcctcccagttcatgttgcttagggaacctgatattttcgtgaaacctgcctacacatgggcagcccaacagcagaacaaatggtggtgaccaaagtgaacaaagaagtatagttgtgccagcttcgtagttgcccatgtggacaagtcagcaggatcaggacacgaggaagagtaaatgtgagacagtcaatgtgacttctgcgataaacagatttttaaaccccgaaattttgcaaaattttggtgaaacctgaactttcttcgttgcatatactggcactatctgtaccatcatacaactgtctcacattaaagctatttttcttgggcactgatgagtaaggttggtataagttcctcagatcaacaaaaacccattttcctgtaagtcttacatttagtatttaaggaactaaaacttaaatacattttgtgaaatggttgacacttcactgataatgatttattgcttggattaataaattttccaaaagttgtcttatgtagaatatggtttgcaaccagcagaaccattaatctatactgcaatgatatgcactatgtataattgtttaaaagcctctacttaatgatgtaaaatgctctatttaattacacatttgggtaaactgtatactaacatctgatggcatttttccactgtttgttgcttttttcaaatactttattgtacaaagctgttcttaatatttttcaagtttttttctttgaattttgctaatgttttccttgaattatgagcactgacagaatgtgcttagcacttttggctattcacacagcttttgagcatgatttgcatccaatatttacattgctagcaataataagccatctgtgagttttgtcaaaagttattggggattttttaaattttagaaatgcaaattattgtttctttgaactaactcttatgcagttgcaaaggcatttccagttgttatagtttgtgtacaatatcaggtgttccagattatgattcattattaatatcattgcttccttgttccctctgaggtccagaagattcatgtttacaatatttagaaacaatgttaaaaaggt

SEQ ID NO: 4427 - protein, 51 aa, Homo sapiens; identical to SEQ ID NO: 4421

SEQ ID NO: 4428 - DNA, 3202 bp, Homo sapiens
gatctggggctggggcattggagaggggaaagaggaaacgtcgtggctggcaggcggaagccgcgccgaggctcgtgtcagtggaagctggggtgtcggcgggcggccgcggccgggtctagcggtgcctgcggaagaaggaggaggagggctggcgatgagaagcagcagggggaatcaagggcaagaagggacccagaggggcaggtggctgagatgctggcgtccaggtgacccgaggaatcctctggagatacaggcccgcgcatgcgcgtgctcgagcgctgaagcccattgcccgcagggcgctggactggcgccccggccggcgaggctgtctagtccaggctccaggccccggctctggccaggcgccgccgcctcccggtgcagctgaaagtcgacgaagagggcggggcgggggcggcttgtggacttccacacttttcctctcttcgggccagtctggggagagggtggctagctgtggcggcggccaattacgtggcggacctgcggggctaagctggcacgtcacttccgactagtggagtttttagccttttaacattcaaggattaggtaaaagtcttgcagtgaaaaacccgaggacccttaccgcaagtgtcttttgctcccagctactgatactggattccactcgtgattctccctttcttagcgcattcatgatatagacatcagtctctgagctggaggaggacaaaggcagcggtcctgtgaattctatgctctagcttgggttaagggatttggaattgcacttgtttcagagagctccctctttgcccactagcagggcattagctggtgctgaagacagtggctgcttggcgagcctggatctccaagtgaccccctcagcaactcctgatgaacaggactgaagccaatattaaagcaagtcaaccaaaggttctctggtgtagacaagacagcaaaaggacagactaccttgtggaacctagcattgttctccttctgcagcactaagtaacatttgttctccgttaagatctttgcaaaccacacacaagaattgctggtcatcctgccaatagatgctgctcacagaaccaaatttcctgtgctgaattgtcactcatgggcttgagagtaggagactggagaccaaggtggctagaatccagttgggcctgatgtctccctgttgaaagggctccttgtggaatgaatagcacatggctcctgtggtggatctgatagtggcatagcaccaagtgatgcaggcctgccaggggccacagacacagaagatgctcccggggtcccccatgtactccagacacactgcaggccacctctcccagcaggttgccagtcatgggccccatcatcatgacttctgtccaaggtactgtgtgcagaaatgtgattgagattcaagtcagggcctctctgcccttttccctccagaaacaaaaccaagataatttatcctgaacacggtgaaaaaaggaagggagggaggagaaaaagtccgggtctcacctgggattctctgtctcctgcaacatgaaggatttagcctgggaggaggtggtgagaactctgggagagaaaaaagaaggaaagaatagttttacccatgctgaagttaatttaaaccttcacctagagaagcaaaaaaaaaaaacccacactttcccattttgtgcctcccttcctagagttttagccaaaggtttagctaagtaattggttttaccagcgcactcactcctcctatcccaagtctgtttgactccctccccatcatcctcctcacctcttttcaggcagggtggggatagcagcaggaggagattttgggagcctggcaactcctgcaaggaccgcaggacagcccctctgtggggatgcgtggtgccccatctgccgcccttctgaagaatgcactgccttcactttttactgtgttagagtccatccagactgttctatccaaaaaagtttctttttcccccacaggcaatcaggaaatgattcctttcccgactgcttctgtctagtgcctgggaatcttgagtcaatccctcagtaagtcagtgactagggaaatccctctctgagcctcccagttcatgttgcttagggaacctgatattttcgtgaaacctgcctacacatgggcagcccaacagcagaacaaatggtggtgaccaaagtgaacaaagaagtatagttgtgccagcttcgtagttgcccatgtggacaagtcagcaggatcaggacacgaggaagagtaaatgtgagacagtcaatgtgacttctgcgataaacagatttttaaaccccgaaattttgcaaaattttggtgaaacctgaactttcttcgttgcatatactggcactatctgtaccatcatacaactgtctcacattaaagctatttttcttgggcactgatgagtaaggttggtataagttcctcagatcaacaaaaacccattttcctgtaagtcttacatttagtatttaaggaactaaaacttaaatacattttgtgaaatggttgacacttcactgataatgatttattgcttggattaataaattttccaaaagttgtcttatgtagaatatggtttgcaaccagcagaaccattaatctatactgcaatgatatgcactatgtataattgtttaaaagcctctacttaatgatgtaaaatgctctatttaattacacatttgggtaaactgtatactaacatctgatggcatttttccactgtttgttgcttttttcaaatactttattgtacaaagctgttcttaatatttttcaagtttttttctttgaattttgctaatgttttccttgaattatgagcactgacagaatgtgcttagcacttttggctattcacacagcttttgagcatgatttgcatccaatatttacattgctagcaataataagccatctgtgagttttgtcaaaagttattggggattttttaaattttagaaatgcaaattattgtttctttgaactaactcttatgcagttgcaaaggcatttccagttgttatagtttgtgtacaatatcaggtgttccagattatgattcattattaatatcattgcttccttgttccctctgaggtccagaagattcatgtttacaatatttagaaacaatgttaaaaaggt

SEQ ID NO: 4429 - protein, 51 aa, Homo sapiens; identical to SEQ ID NO: 4421

SEQ ID NO: 4430 - DNA, 2453 bp, Homo sapiens
cggggcggcaaaacgtccgcccgggcccgaggcgggcggaggcagctgtggttacgtgcggggggccggtgacgcagtcgcggggcgctgggacgcggcttgcggagccggccggcgagcgcaggccccaggctcgggcgcggcggcgggacagcacctaccttcccggcttcgggtccgggagtgcggggcgcggagccgccggagcgctgcctccctccttcctcctcccctcgcccccgccccgcggcgcgacacacaatactcgccggaagcggaagccgcgccgaggctcgtgtcagtggaagctggggtgtcggcgggcggccgcggccgggtctagcggtgcctgcggaagaaggaggaggagggctggcgatgagaagcagcagggggaatcaagggcaagaagggacccagaggggcaggtggctgagatgctggcgtccaggtgacccgaggaatcctctggagatacaggcccgcgcatgcgcgtgctcgagcgctgaagcccattgcccgcagggcgctggactggcgccccggccggcgaggctgtctagtccaggctccaggccccggctctggccaggcgccgccgcctcccggtgcagctgaaagtcgacgaagagggcggggcgggggcggcttgtggacttccacacttttcctctcttcgggccagtctggggagagggtggctagctgtggcggcggccaattacgtggcggacctgcggggctaagctggcacgtcacttccgactagtggagtttttagccttttaacattcaaggattagagctccctctttgcccactagcagggcattagctggtgctgaagacagtggctgcttggcgagcctggatctccaagtgaccccctcagcaactcctgatgaacaggactgaagccaatattaaagcaagtcaaccaaaggttctctggtgtagacaagacagcaaaaggacagactaccttgtggaacctagcattgttctccttctgcagcactaagtaacatttgttctccgttaagatctttgcaaaccacacacaagaattgctggtcatcctgccaatagatgctgctcacagaaccaaatttcctgtgctgaattgtcactcatgggcttgagagtaggagactggagaccaaggtggctagaatccagttgggcctgatgtctccctgttgaaagggctccttgtggaatgaatagcacatggctcctgtggtggatctgatagtggcatagcaccaagtgatgcaggcctgccaggggccacagacacagaagatgctcccggggtcccccatgtactccagacacactgcaggccacctctcccagcaggttgccagtcatgggccccatcatcatgacttctgtccaaggtactgtgtgcagaaatgtgattgagattcaagtcagggcctctctgcccttttccctccagaaacaaaaccaagataatttatcctgaacacggtgaaaaaaggaagggagggaggagaaaaagtccgggtctcacctgggattctctgtctcctgcaacatgaaggatttagcctgggaggaggtggtgagaactctgggagagaaaaaagaaggaaagaatagttttacccatgctgaagttaatttaaaccttcacctagagaagcaaaaaaaaaaaacccacactttcccattttgtgcctcccttcctagagttttagccaaaggtttagctaagtaattggttttaccagcgcactcactcctcctatcccaagtctgtttgactccctccccatcatcctcctcacctcttttcaggcagggtggggatagcagcaggaggagattttgggagcctggcaactcctgcaaggaccgcaggacagcccctctgtggggatgcgtggtgccccatctgccgcccttctgaagaatgcactgccttcactttttactgtgttagagtccatccagactgttctatccaaaaaagtttctttttcccccacaggcaatcaggaaatgattcctttcccgactgcttctgtctagtgcctgggaatcttgagtcaatccctcagtaagtcagtgactagggaaatccctctctgagcctcccagttcatgttgcttagggaacctgatattttcgtgaaacctgcctacacatgggcagcccaacagcagaacaaatggtggtgaccaaagtgaacaaagaagtatagttgtgccagcttcgtagttgcccatgtggacaagtcagcaggatcaggacacgaggaagagtaaatgtgagacagtcaatgtgacttctgcgataaacagatttttaaaccccgaaattttgcaaaattttggtgaaacctgaactttcttcgttgcatatactggcactatctgtaccatcatacaactgtctcacattaaagctatttttcttgggc

SEQ ID NO: 4431 - protein, 51 aa, Homo sapiens; identical to SEQ ID NO: 4421

SEQ ID NO: 4432 - DNA, 2380 bp, Homo sapiens
ggaagccgcgccgaggctcgtgtcagtggaagctggggtgtcggcgggcggccgcggccgggtctagcggtgcctgcggaagaaggaggaggagggctggcgatgagaagcagcagggggaatcaagggcaagaagggacccagaggggcaggtggctgagatgctggcgtccaggtgacccgaggaatcctctggagatacaggcccgcgcatgcgcgtgctcgagcgctgaagcccattgcccgcagggcgctggactggcgccccggccggcgaggctgtctagtccaggctccaggccccggctctggccaggcgccgccgcctcccggtgcagctgaaagtcgacgaagagggcggggcgggggcggcttgtggacttccacacttttcctctcttcgggccagtctggggagagggtggctagctgtggcggcggccaattacgtggcggacctgcggggctaagctggcacgtcacttccgactagtggagtttttagccttttaacattcaaggattaggtaagttctccccgcggtagacttcaaatactctttgtcctgcccctgcttggcgaaatttaccgaaattatctacctatcccgctggagtgggagccgggggagagctggaaccgcgtctctgctgctcacctttgtgtccttagctccttcgcatggggtccgaccgcaacacgtgcgctggataaacgcttgttaactggagctccctctttgcccactagcagggcattagctggtgctgaagacagtggctgcttggcgagcctggatctccaagtgaccccctcagcaactcctgatgaacaggactgaagccaatattaaagcaagtcaaccaaaggttctctggtgtagacaagacagcaaaaggacagactaccttgtggaacctagcattgttctccttctgcagcactaagtaacatttgttctccgttaagatctttgcaaaccacacacaagaattgctggtcatcctgccaatagatgctgctcacagaaccaaatttcctgtgctgaattgtcactcatgggcttgagagtaggagactggagaccaaggtggctagaatccagttgggcctgatgtctccctgttgaaagggctccttgtggaatgaatagcacatggctcctgtggtggatctgatagtggcatagcaccaagtgatgcaggcctgccaggggccacagacacagaagatgctcccggggtcccccatgtactccagacacactgcaggccacctctcccagcaggttgccagtcatgggccccatcatcatgacttctgtccaaggtactgtgtgcagaaatgtgattgagattcaagtcagggcctctctgcccttttccctccagaaacaaaaccaagataatttatcctgaacacggtgaaaaaaggaagggagggaggagaaaaagtccgggtctcacctgggattctctgtctcctgcaacatgaaggatttagcctgggaggaggtggtgagaactctgggagagaaaaaagaaggaaagaatagttttacccatgctgaagttaatttaaaccttcacctagagaagcaaaaaaaaaaaacccacactttcccattttgtgcctcccttcctagagttttagccaaaggtttagctaagtaattggttttaccagcgcactcactcctcctatcccaagtctgtttgactccctccccatcatcctcctcacctcttttcaggcagggtggggatagcagcaggaggagattttgggagcctggcaactcctgcaaggaccgcaggacagcccctctgtggggatgcgtggtgccccatctgccgcccttctgaagaatgcactgccttcactttttactgtgttagagtccatccagactgttctatccaaaaaagtttctttttcccccacaggcaatcaggaaatgattcctttcccgactgcttctgtctagtgcctgggaatcttgagtcaatccctcagtaagtcagtgactagggaaatccctctctgagcctcccagttcatgttgcttagggaacctgatattttcgtgaaacctgcctacacatgggcagcccaacagcagaacaaatggtggtgaccaaagtgaacaaagaagtatagttgtgccagcttcgtagttgcccatgtggacaagtcagcaggatcaggacacgaggaagagtaaatgtgagacagtcaatgtgacttctgcgataaacagatttttaaaccccgaaattttgcaaaattttggtgaaacctgaactttcttcgttgcatatactggcactatctgtaccatcatacaactgtctcacattaaagctatttttcttgggc

SEQ ID NO: 4433 - protein, 51 aa, Homo sapiens; identical to SEQ ID NO: 4421

SEQ ID NO: 4434 - DNA, 4251 bp, Homo sapiens
ggaagccgcgccgaggctcgtgtcagtggaagctggggtgtcggcgggcggccgcggccgggtctagcggtgcctgcggaagaaggaggaggagggctggcgatgagaagcagcagggggaatcaagggcaagaagggacccagaggggcaggtggctgagatgctggcgtccaggtgacccgaggaatcctctggagatacaggcccgcgcatgcgcgtgctcgagcgctgaagcccattgcccgcagggcgctggactggcgccccggccggcgaggctgtctagtccaggctccaggccccggctctggccaggcgccgccgcctcccggtgcagctgaaagtcgacgaagagggcggggcgggggcggcttgtggacttccacacttttcctctcttcgggccagtctggggagagggtggctagctgtggcggcggccaattacgtggcggacctgcggggctaagctggcacgtcacttccgactagtggagtttttagccttttaacattcaaggattaggtaagttctccccgcggtagacttcaaatactctttgtcctgcccctgcttggcgaaatttaccgaaattatctacctatcccgctggagtgggagccgggggagagctggaaccgcgtctctgctgctcacctttgtgtccttagctccttcgcatggggtccgaccgcaacacgtgcgctggataaacgcttgttaactggagctccctctttgcccactagcagggcattagctggtgctgaagacagtggctgcttggcgagcctggatctccaagtgaccccctcagcaactcctgatgaacaggactgaagccaatattaaagcaagtcaaccaaaggttctctggtgtagacaagacagcaaaaggacagactaccttgtggaacctagcattgttctccttctgcagcactaagtaacatttgttctccgttaagatctttgcaaaccacacacaagaattgctggtcatcctgccaatagatgctgctcacagaaccaaatttcctgtgctgaattgtcactcatgggcttgagagtaggagactggagaccaaggtggctagaatccagttgggcctgatgtctccctgttgaaagggctccttgtggaatgaatagcacatggctcctgtggtggatctgatagtggcatagcaccaagtgatgcaggcctgccaggggccacagacacagaagatgctcccggggtcccccatgtactccagacacactgcaggccacctctcccagcaggttgccagtcatgggccccatcatcatgacttctgtccaaggtgtgctcggaaatctcttccttaactgtgactttctgacaggtggaggatgtggtcaggagtgggaaaaggattcgagacgggaagagggaggggttcaggatgaagagagataatctgtgccacagatgctggccctgcagttagctcccacctagtccgtgcacacacattctaatcccctcccattcctttacatgctgcggccagagaggcctttctcaaagtggaagtctcatcctcacttctctggttacagtgctgggccatggtaacttacaaggcttagcaggaactgtctgcgcactcccccttcctgcccactaccttgtttccctccagttgcgagagaaaacattgattgagcattaactatgtgccaggcttgtcctaagtcctttgcatgtattcactcaaacaatcctcacaacattcctatcacatctcccatttcacagtgagggttctaaagcacgtagtgggtgaggaacttgtccagggtcacacaactaagtgggggtggagaaacatcaaatctaggtggtccaggtggtggccagaacccatcagcacctcactacagctgcctccagtttctcgctctaggaaatactcttccctgtcaactcctgttgtcctctgggctcagttgacatgtcatctccttgaggaggacatcctgagatgctccccgactagggtgggcacccacttccacactccaaatgcctatttgacctgtgtatcgctgcatccccactgcctggcagatagcaggcccctaataaatatgatttgagcaaataaatatagttcttcaaaaaatagggaggacttcttgcttcaggtaatggtaggctaggacatttggaccaaccctcctgcagaaaatagccatttattttgatgcaatatatctggctatgactagagatttcaaatatttggagggctattatgtgaagaactaaacttactctttgtgacatagaggtcagaaattggtcgtttccatagagtatgagagagacagaattgtgctcatcataagtatcttttttaaaagttagacttaataaaatgggctgccttggtaggtggtgagttctctgtcacgaaagagattcagccacttgctctgagaaagcatggagaatatcaacattgtaagggtcgaccacctcatctctgaggccccctcctcacttaggttgccattgcaggtggaacactgggctgagtgtcaaagaacctgggttccacaagctgtgcgaccatggctggttgttttggatctcattcctaatatctgttagttaagctgacccgtcaatactgacccacttcacagagttatgaagggattaaattaggtattacatgtaaatctgttttgtttgctttttgttgttcttttttgttttgcttttttctttgcattatgaaatcccaagtcaactttttccattcttttatttttttaaaaattgacatcatcattataaccacaaaataatttttaaaatggaaaaaaaaaactcacctgcaaccccacaatctaatacaataatcatacttttttccctttattctcctttattgtgaccaaggatgactttgggcattgctgtgaggaactatttcgtttaacaccctactacctgaacatgatgcgtactcagcctttcaccaccccccaagtagctacacatgatgtgataatagtattggtggtggttttagagagttggagagaaaactgaagttggatttgggtaaaagaaaaaagagtgggaattattttttctccattctaaagcccataaagcaatgttaattgttcccacccctctgctattctgtctcctcaggtactgtgtgcagaaatgtgattgagattcaagtcagggcctctctgcccttttccctccagaaacaaaaccaagataatttatcctgaacacggtgaaaaaaggaagggagggaggagaaaaagtccgggtctcacctgggattctctgtctcctgcaacatgaaggatttagcctgggaggaggtggtgagaactctgggagagaaaaaagaaggaaagaatagttttacccatgctgaagttaatttaaaccttcacctagagaagcaaaaaaaaaaaacccacactttcccattttgtgcctcccttcctagagttttagccaaaggtttagctaagtaattggttttaccagcgcactcactcctcctatcccaagtctgtttgactccctccccatcatcctcctcacctcttttcaggcagggtggggatagcagcaggaggagattttgggagcctggcaactcctgcaaggaccgcaggacagcccctctgtggggatgcgtggtgccccatctgccgcccttctgaagaatgcactgccttcactttttactgtgttagagtccatccagactgttctatccaaaaaagtttctttttcccccacaggcaatcaggaaatgattcctttcccgactgcttctgtctagtgcctgggaatcttgagtcaatccctcagtaagtcagtgactagggaaatccctctctgagcctcccagttcatgttgcttagggaacctgatattttcgtgaaacctgcctacacatgggcagcccaacagcagaacaaatggtggtgaccaaagtgaacaaagaagtatagttgtgccagcttcgtagttgcccatgtggacaagtcagcaggatcaggacacgaggaagagtaaatgtgagacagtcaatgtgacttctgcgataaacagatttttaaaccccgaaattttgcaaaattttggtgaaacctgaactttcttcgttgcatatactggcactatctgtaccatcatacaactgtctcacattaaagctatttttcttgggc

SEQ ID NO: 4435 - protein, 39 aa, Homo sapiens; identical to SEQ ID NO: 4423

SEQ ID NO: 4436 - DNA, 1959 bp, Homo sapiens
cggggcggcaaaacgtccgcccgggcccgaggcgggcggaggcagctgtggttacgtgcggggggccggtgacgcagtcgcggggcgctgggacgcggcttgcggagccggccggcgagcgcaggccccaggctcgggcgcggcggcgggacagcacctaccttcccggcttcgggtccgggagtgcggggcgcggagccgccggagcgctgcctccctccttcctcctcccctcgcccccgccccgcggcgcgacacacaatactcgccggaagcggaagccgcgccgaggctcgtgtcagtggaagctggggtgtcggcgggcggccgcggccgggtctagcggtgcctgcggaagaaggaggaggagggctggcgatgagaagcagcagggggaatcaagggcaagaagggacccagaggggcaggtggctgagatgctggcgtccaggtgacccgaggaatcctctggagatacaggcccgcgcatgcgcgtgctcgagcgctgaagcccattgcccgcagggcgctggactggcgccccggccggcgaggctgtctagtccaggctccaggccccggctctggccaggcgccgccgcctcccggtgcagctgaaagtcgacgaagagggcggggcgggggcggcttgtggacttccacacttttcctctcttcgggccagtctggggagagggtggctagctgtggcggcggccaattacgtggcggacctgcggggctaagctggcacgtcacttccgactagtggagtttttagccttttaacattcaaggattagagctccctctttgcccactagcagggcattagctggtgctgaagacagtggctgcttggcgagcctggatctccaagtgaccccctcagcaactcctgatgaacaggtactgtgtgcagaaatgtgattgagattcaagtcagggcctctctgcccttttccctccagaaacaaaaccaagataatttatcctgaacacggtgaaaaaaggaagggagggaggagaaaaagtccgggtctcacctgggattctctgtctcctgcaacatgaaggatttagcctgggaggaggtggtgagaactctgggagagaaaaaagaaggaaagaatagttttacccatgctgaagttaatttaaaccttcacctagagaagcaaaaaaaaaaaacccacactttcccattttgtgcctcccttcctagagttttagccaaaggtttagctaagtaattggttttaccagcgcactcactcctcctatcccaagtctgtttgactccctccccatcatcctcctcacctcttttcaggcagggtggggatagcagcaggaggagattttgggagcctggcaactcctgcaaggaccgcaggacagcccctctgtggggatgcgtggtgccccatctgccgcccttctgaagaatgcactgccttcactttttactgtgttagagtccatccagactgttctatccaaaaaagtttctttttcccccacaggcaatcaggaaatgattcctttcccgactgcttctgtctagtgcctgggaatcttgagtcaatccctcagtaagtcagtgactagggaaatccctctctgagcctcccagttcatgttgcttagggaacctgatattttcgtgaaacctgcctacacatgggcagcccaacagcagaacaaatggtggtgaccaaagtgaacaaagaagtatagttgtgccagcttcgtagttgcccatgtggacaagtcagcaggatcaggacacgaggaagagtaaatgtgagacagtcaatgtgacttctgcgataaacagatttttaaaccccgaaattttgcaaaattttggtgaaacctgaactttcttcgttgcatatactggcactatctgtaccatcatacaactgtctcacattaaagctatttttcttgggc

SEQ ID NO: 4437 - protein, 79 aa, Homo sapiens [sequence omitted]

SEQ ID NO: 4438 - DNA, 2222 bp, Homo sapiens
cggggcggcaaaacgtccgcccgggcccgaggcgggcggaggcagctgtggttacgtgcggggggccggtgacgcagtcgcggggcgctgggacgcggcttgcggagccggccggcgagcgcaggccccaggctcgggcgcggcggcgggacagcacctaccttcccggcttcgggtccgggagtgcggggcgcggagccgccggagcgctgcctccctccttcctcctcccctcgcccccgccccgcggcgcgacacacaatactcgccggaagcggaagccgcgccgaggctcgtgtcagtggaagctggggtgtcggcgggcggccgcggccgggtctagcggtgcctgcggaagaaggaggaggagggctggcgatgagaagcagcagggggaatcaagggcaagaagggacccagaggggcaggtggctgagatgctggcgtccaggtgacccgaggaatcctctggagatacaggcccgcgcatgcgcgtgctcgagcgctgaagcccattgcccgcagggcgctggactggcgccccggccggcgaggctgtctagtccaggctccaggccccggctctggccaggcgccgccgcctcccggtgcagctgaaagtcgacgaagagggcggggcgggggcggcttgtggacttccacacttttcctctcttcgggccagtctggggagagggtggctagctgtggcggcggccaattacgtggcggacctgcggggctaagctggcacgtcacttccgactagtggagtttttagccttttaacattcaaggattagagctccctctttgcccactagcagggcattagctggtgctgaagacagtggctgcttggcgagcctggatctccaagtgaccccctcagcaactcctgatgaacaggactgaagccaatattaaagcaagtcaaccaaaggttctctggtgtagacaagacagcaaaaggacagactaccttgtggaacctagcattgttctccttctgcagcactaagtaacatttgttctccgttaagatctttgcaaaccacacacaagaattgctggtcatcctgccaatagatgctgctcacagaaccaaatttcctgtgctgaattgtcactcatgggcttgagagtaggagactggagaccaaggtggctagaatccagttgggcctgatgtctccctgttgaaagggctccttgtggaatgaatagcacatggctcctgtggtggatctgatagtggcatagcaccaagtgatgcaggcctgccaggggccacagacacagaagatgctcccggggtcccccatgtactccagacacactgcaggccacctctcccagcaggttgccagtcatgggccccatcatcatgacttctgtccaaggtgtgctcggaaatctcttccttaactgtgactttctgacaggtggaggatgtggtcaggagtgggaaaaggattcgagacgggaagagggaggggttcaggatgaagagagataatctgtgccacagatgctggccctgcagttagctcccacctagtccgtgcacacacattctaatcccctcccattcctttacatgctgcggccagagaggcctttctcaaagtggaagtctcatcctcacttctctggttacagtgctgggccatggtaacttacaaggcttagcaggaactgtctgcgcactcccccttcctgcccactaccttgtttccctccagttgcgagagaaaacattgattgagcattaactatgtgccaggcttgtcctaagtcctttgcatgtattcactcaaacaatcctcacaacattcctatcacatctcccatttcacagtgagggttctaaagcacgtagtgggtgaggaacttgtccagggtcacacaactaagtgggggtggagaaacatcaaatctaggtggtccaggtggtggccagaacccatcagcacctcactacagctgcctccagtttctcgctctaggaaatactcttccctgtcaactcctgttgtcctctgggctcagttgacatgtcatctccttgaggaggacatcctgagatgctccccgactagggtgggcacccacttccacactccaaatgcctatttgacctgtgtatcgctgcatccccactgcctggcagatagcaggcccctaataaatatgatttgagcaaataaatatagttcttc

SEQ ID NO: 4439 - protein, 39 aa, Homo sapiens; identical to SEQ ID NO: 4423

SEQ ID NO: 4440 - DNA, 327 bp, Homo sapiens
cctgttctttccacttctggggctgtgacttgagtttctccgcaggagcagatagtgtttgtgtagggactgcggacttttgcattacagcctccctgctttgcccgcctgctgctggaagcttagcaggtgaggaaagaggacttcctgtatatctctatccttttgtttccattactcactttctgtggctgctgctgcagaagccactgctgactgatgtggatacctcaatctttggtttacaaaaagcctaggtgtcttttggcctctctccaggttgatagccatggctcctgaaagaaataaaagatgatcatctttcta

SEQ ID NO: 4441 - protein, 84 aa, Homo sapiens
CSFHFWGCDLSFSAGADSVCVGTADFCITASLLCPPAAGSLAGEERGLPVYLYPFVSITHFLWLLLQKPLLTDVDTSIFGLQKA

SEQ ID NO: 4442 - DNA, 3621 bp, Homo sapiens
agcgtcatagcggcgggcatcccatctgcacgtcacacctctttctcacctggacacgcatcccttcctaccctgccagccacgacgtttcctctttcccctctccaatgccccagccccagatctggcggaagaagatggagaacgggggtgggacagagttgtggacaacctctcaggagagggtcgcaaggtgggaccctgaacagtggtagaaacaaaatgagattgtccctgaagtttgcccttcagctgagacacaaggagtagaggaagaggaaggactaacgcagaggcactcaaggtctcactatgactgtagttgagagtcctctcccttcttccctaaccctttccccatttctctcaccacttctttgccagtctagatccgtcctggtgccttactgtgcatacagttctactcgtctcagattcctttcttgtctgttagaaacgtatgtcaaacgaggatacagtgtctggaactattggttctaagatataagtggaatgagcctggatcaggagaagtatgctgagctagagttgaaggaagcttctctttctaacaagagaaagcagagttaaattatggcagagacaagtctgttagaggctggggcctctgcagcctctacagctgcggctttggagaacttacaggtggaggcgagctgctctgtgtgcctggagtatctgaaggaacctgtcatcattgagtgtgggcacaacttctgcaaagcttgcatcacccgctggtgggaggacctagagagggacttcccttgtcctgtctgtcgaaagacatcccgctaccgcagtctccgacctaatcggcaactaggcagtatggtggaaattgccaagcagctccaggccgtcaagcggaagatccgggatgagagcctctgcccccaacaccatgaggccctcagccttttctgttatgaggaccaggaggctgtatgcttgatatgtgcaatttcccacacccaccgggcccacaccgttgtgccactggacgatgctacacaggagtacaaggaaaaactgcagaagtgtctggagcccctggaacagaagctgcaggagatcactcgctgcaagtcctctgaggagaagaagcctggtgagctcaagagactagtggaaagtcgccgacagcagatcttgagggagtttgaagagcttcataggcggctggatgaagagcagcaggtgttgctttcacgactggaagaagaggaacaggacattctgcagcgactccgagaaaatgctgctcaccttggggacaagcgccgggacctggcccacttggctgccgaggtggagggcaagtgcttacagtcaggcttcgagatgcttaaggatgtcaaaagtaccctggaaaagaatattcctagaaagttcggaggctcactctcaacgatctgtccacgggatcataaggctctccttggattagtaaaagaaatcaacagatgtgaaaaggtgaagaccatggaggtgacttcagtatccatagagctggaaaagaacttcagcaattttccccgacagtactttgccctaaggaaaatccttaaacagctaattgcggatgtgaccctggaccctgagacagctcatcctaacctagtcctgtcagaggatcgtaagagcgtcaagttcgtggagacaagactccgggatctccctgacacaccaaggcgtttcaccttctacccttgcgtcctggctactgagggtttcacctcaggtcgacactactgggaggtggaggtgggcgacaagacccactgggcagtgggtgtatgccgggactccgtgagccgaaagggcgagttgactccactccctgagactggctactggcgggtgcggctatggaatggggacaaatatgcagccaccaccacaccttttacccctttgcacatcaaggtgaaacccaagcgggtaggcatattcctagactatgaggccggcacactgtctttctacaatgtcacagaccgctctcatatctacaccttcactgatacttttactgagaaactttggcccctcttctacccaggcatccgggctggacggaagaatgctgcaccacttaccatcaggcccccaacagattgggagtgacaggttgggatgtgggaatgactggggtgaggcagggtcaagtgctacgggcctccttcccgtgtcctgctggaacgtcttcgtgtccacctgggtccagtcctgaatcatcttggagaaacaccttggtttctaggatggttttgtgtggagggggaggtaggactgggctggatgagagagcacagctgtgacttcctcctaactgtcagggtggggagctggttcccagaggattgtctaccctgaagtccatcaggttttctgttgcacaaggacgggtcaggaaggaaggagaggcttttccagaaacaaaaaatctgtgagggtctgacttgctcaaaccagaggaggaaacagaaacccctgcacatctttttagggggttctttgacccaggatagtcttgcttcttgaggtagatcacaggggtctgtgtacctctgaattcatgagagatgaatgacagatgctctcatgggtctagatattgaggagtttttctgagggcagagattggacatcaacaaggctagaagggtcagggaagtgggctaaaggaacagattcctagagattaatgaagaggagggaggtttctttggtcttctattccaagggtaaggttgcgattatgggtaagattggccagaggtaggaatgtggggagaaggagaggctgaaaagaaagcagaggagaacccaggtccctgcctcagccttcagcagagttggcttattgcctgcctctataccaataagtcagtcaccttgctcctctccagaggcaaagtggaagagatcctgcaagacacatctatcctttcacagtgttcccaagggaacttggaaaggagagtcaggtattagaggaaagagaagggtatttgtatacaaagccctggccttaaagaatgttacttagtagctactcccaaattgtcagccttcttacctggccaaggtgtccaagccagaaaggaaaaaaggttatggagtctttctcaccctaaggacagggtggaagagggtggtatatagggaagggccagataggcaacttcatttggcttgtgtgcatctggcctggaactggtgttaagccaggcttttgcttgtttgttgccatccctcaccctttgccatttcccttttcagagaatgtaaatgattttcatgttaggccaaaataaacaacttatagggtacatatgttgtcataaaaggtaaaagtgatgcatgccaaaccaaactaaaccaatttggattatctgctattcgggtaatcttcacagaaatgactgagagaagaatctgcagtttactgagggcatttcagttcctcctaccacctcaacaggactttgtccagactctcctcctcttacctttgtgccttgactgtggttctttgtggcaagatactttggttggttaaaataatatggaacaaaggatccactgaagtga

SEQ ID NO: 4443 - protein, 518 aa, Homo sapiens; identical to SEQ ID NO: 517

SEQ ID NO: 4444 - DNA, 3531 bp, Homo sapiens
agcgtcatagcggcgggcatcccatctgcacgtcacacctctttctcacctggacacgcatcccttcctaccctgccagccacgacgtttcctctttcccctctccaatgccccagccccagatctggcggaagaagatggagaacgggggtgggacagagttgtggacaacctctcaggagagggtcgcaaggtgggaccctgaacagtggtagaaacaaaatgagattgtccctgaagtttgcccttcagctgagacacaaggagtagaggaagaggaaggactaacgcagaggcactcaaggtctcactatgactgtagttgagagtcctctcccttcttccctaaccctttccccatttctctcaccacttctttgccagtctagatccgtcctggtgccttactgtgcatacagttctactcgtctcagattcctttcttgtctgttagaaacgtatgtcaaacgaggatacagtgtctggaactattggttctaagatataagtggaatgagcctggatcaggagaagtatgctgagctagagttgaaggaagcttctctttctaacaagagaaagcagagttaaattatggcagagacaagtctgttagaggctggggcctctgcagcctctacagctgcggctttggagaacttacaggtggaggcgagctgctctgtgtgcctggagtatctgaaggaacctgtcatcattgagtgtgggcacaacttctgcaaagcttgcatcacccgctggtgggaggacctagagagggacttcccttgtcctgtctgtcgaaagacatcccgctaccgcagtctccgacctaatcggcaactaggcagtatggtggaaattgccaagcagctccaggccgtcaagcggaagatccgggatgagagcctctgcccccaacaccatgaggccctcagccttttctgttatgaggaccaggaggctgtatgcttgatatgtgcaatttcccacacccaccgggcccacaccgttgtgccactggacgatgctacacaggagtacaaggaaaaactgcagaagtgtctggagcccctggaacagaagctgcaggagatcactcgctgcaagtcctctgaggagaagaagcctggtgagctcaagagactagtggaaagtcgccgacagcagatcttgagggagtttgaagagcttcataggcggctggatgaagagcagcaggtgttgctttcacgactggaagaagaggaacaggacattctgcagcgactccgagaaaatgctgctcaccttggggacaagcgccgggacctggcccacttggctgccgaggtggagggcaagtgcttacagtcaggcttcgagatgcttaaggatgtcaaaagtaccctggaaaaatgtgaaaaggtgaagaccatggaggtgacttcagtatccatagagctggaaaagaacttcagcaattttccccgacagtactttgccctaaggaaaatccttaaacagctaattgcggatgtgaccctggaccctgagacagctcatcctaacctagtcctgtcagaggatcgtaagagcgtcaagttcgtggagacaagactccgggatctccctgacacaccaaggcgtttcaccttctacccttgcgtcctggctactgagggtttcacctcaggtcgacactactgggaggtggaggtgggcgacaagacccactgggcagtgggtgtatgccgggactccgtgagccgaaagggcgagttgactccactccctgagactggctactggcgggtgcggctatggaatggggacaaatatgcagccaccaccacaccttttacccctttgcacatcaaggtgaaacccaagcgggtaggcatattcctagactatgaggccggcacactgtctttctacaatgtcacagaccgctctcatatctacaccttcactgatacttttactgagaaactttggcccctcttctacccaggcatccgggctggacggaagaatgctgcaccacttaccatcaggcccccaacagattgggagtgacaggttgggatgtgggaatgactggggtgaggcagggtcaagtgctacgggcctccttcccgtgtcctgctggaacgtcttcgtgtccacctgggtccagtcctgaatcatcttggagaaacaccttggtttctaggatggttttgtgtggagggggaggtaggactgggctggatgagagagcacagctgtgacttcctcctaactgtcagggtggggagctggttcccagaggattgtctaccctgaagtccatcaggttttctgttgcacaaggacgggtcaggaaggaaggagaggcttttccagaaacaaaaaatctgtgagggtctgacttgctcaaaccagaggaggaaacagaaacccctgcacatctttttagggggttctttgacccaggatagtcttgcttcttgaggtagatcacaggggtctgtgtacctctgaattcatgagagatgaatgacagatgctctcatgggtctagatattgaggagtttttctgagggcagagattggacatcaacaaggctagaagggtcagggaagtgggctaaaggaacagattcctagagattaatgaagaggagggaggtttctttggtcttctattccaagggtaaggttgcgattatgggtaagattggccagaggtaggaatgtggggagaaggagaggctgaaaagaaagcagaggagaacccaggtccctgcctcagccttcagcagagttggcttattgcctgcctctataccaataagtcagtcaccttgctcctctccagaggcaaagtggaagagatcctgcaagacacatctatcctttcacagtgttcccaagggaacttggaaaggagagtcaggtattagaggaaagagaagggtatttgtatacaaagccctggccttaaagaatgttacttagtagctactcccaaattgtcagccttcttacctggccaaggtgtccaagccagaaaggaaaaaaggttatggagtctttctcaccctaaggacagggtggaagagggtggtatatagggaagggccagataggcaacttcatttggcttgtgtgcatctggcctggaactggtgttaagccaggcttttgcttgtttgttgccatccctcaccctttgccatttcccttttcagagaatgtaaatgattttcatgttaggccaaaataaacaacttatagggtacatatgttgtcataaaaggtaaaagtgatgcatgccaaaccaaactaaaccaatttggattatctgctattcgggtaatcttcacagaaatgactgagagaagaatctgcagtttactgagggcatttcagttcctcctaccacctcaacaggactttgtccagactctcctcctcttacctttgtgccttgactgtggttctttgtggcaagatactttggttggttaaaataatatggaacaaaggatccactgaagtga

SEQ ID NO: 4445 - protein, 488 aa, Homo sapiens; identical to SEQ ID NO: 519

SEQ ID NO: 4446 - DNA, 552 bp, Homo sapiens
gcgaggggtggggctgcgggaggccctggagcgcggcggtgatggcggggccggtgaaggaccgcgaggccttccagaggctcaacttcctgtaccaggccgcccattgtgtccttgcccaggaccccgagaaccaggcgctggcgaggttttactgctacactgagaggaccattgcgaagcggctcgtcttgcggcgggatccctcggtgaagaggactctctgtcgaggctgctcttccctcctcgtcccgggcctcacctgcacccagcgccagagacgctgcaggggacagcgctggaccgtacagacctgcctaacatgccagcgcagccaacgcttcctcaatgatcccgggcatttactctggggagacaggcctgaggcccagctcgggagccaagcagattccaaaccactacaacccttgccaaacacagcccactccatttcagaccgccttcctgaggagaaaatgcagactcagggttccagtaaccagtgatggattcaccccatctcccaaataaagtttacttgttttacattcc

SEQ ID NO: 4447 - protein, 154 aa, Homo sapiens; identical to SEQ ID NO: 521

SEQ ID NO: 4448 - DNA, 589 bp, Homo sapiens
gcgaggggtggggctgcgggaggccctggagcgcggcggtgatggcggggccggtgaaggaccgcgaggccttccagaggctcaacttcctgtaccaggccgcccattgtgtccttgcccaggaccccgagaaccaggcgctggcgaggttttactgctacactgagaggaccattgcgaagcggctcgtcttgcggcgggatccctcggtgaagaggactctctgtcgaggctgctcttccctcctcgtcccgggcctcacctgcacccagcgccagagacgctgcaggggacagcgctggaccgtacagacctgcctaacatgccagcgcagccaacgcttcctcaatgatcccgggcatttactctggggagacaggcctgaggcccagctcgggagccaagcagattccaaaccactacaacccttgccaaacacagcccactccatttcagaccgccttcctgaggagaaaatgcagactcagggttccagtaaccagtgatggattcaccccatctcccaaataaagtttacttgttttacattccatgattctgttctgtgggtatttcaactcttaattcc

SEQ ID NO: 4449 - protein, 154 aa, Homo sapiens; identical to SEQ ID NO: 521

SEQ ID NO: 4450 - DNA, 1092 bp, Homo sapiens
ggctgcgggaggccctggagcgcggcggtgatggcggggccggtgaaggaccgcgaggccttccagaggctcaacttcctgtaccaggccgcccattgtgtccttgcccaggaccccgagaaccaggcgctggcgaggttttactgctacactgagaggaccattgcgaagcggctcgtcttgcggcggtgagacagccacggggcgggcggcgggcgggacgcgggaggaacgcgagagggagcgcgggcgccagaccactatcctcctccgcccccagggatccctcggtgaagaggactctctgtcgaggctgctcttccctcctcgtcccgggcctcacctgcacccagcgccagagacgtgagtgctccaacggaggtggaagactgcggagcattgggggcgcggaggggggcggggtggggggcgggcactggaggccaacagcgcctttctcactgtagatggatgttgggtgtgggattcgcaggagtcttccttcttcgggtttggattaagttcctaacgccacttgcacaaactagggtttgggctcggctgttttttttttttttcttccagtgtgggcaataaataataacttttaagaggcaaccccacccatgcacaataatagatgttgttcggctttgtggaggacgattcccatcaccattcatttattaagcaaatacttattttctaaaatgtgtcaggtactgtgctagattcattattctcattgaaattacggtctgatgggacagactaagaaacaaaatggtgtagaaaaagattaactgggggagtagaatgctcacttactcatgccagtggtggcgaagtttatgataagcaaagggagtgagagatggaaattctaggcatgtgtgcagactctgagacaagagagcttgtggtgctgtcaaagaaatgagagttcaggaggctggagtttgaggtaggagggcaaaacatgagactggagggggaaacaggccagttcttgaagtcttgttagggagtttgaactttatcttaaagagttccaggaaatcgatggagcttatgccgaggcctgacaccatc

SEQ ID NO: 4451 - protein, 53 aa, Homo sapiens
MAGPVKDREAFQRLNFLYQAAHCVLAQDPENQALARFYCYTERTIAKRLVLRR

SEQ ID NO: 4452 - DNA, 450 bp, Homo sapiens
aggccctggagcgcggcggtgatggcggggccggtgaaggaccgcgaggccttccagaggctcaacttcctgtaccaggccgcccattgtgtccttgcccaggaccccgagaaccaggcgctggcgaggttttactgctacactgagaggaccattgcgaagcggctcgtcttgcggcggctgcaggggacagcgctggaccgtacagacctgcctaacatgccagcgcagccaacgcttcctcaatgatcccgggcatttactctggggagacaggcctgaggcccagctcgggagccaagcagattccaaaccactacaacccttgccaaacacagcccactccatttcagaccgccttcctgaggagaaaatgcagactcagggttccagtaaccagtgatggattcaccccatctcccaaataaagtttacttgttttacattcca

SEQ ID NO: 4453 - protein, 75 aa, Homo sapiens
MAGPVKDREAFQRLNFLYQAAHCVLAQDPENQALARFYCYTERTIAKRLVLRRLQGTALDRTDLPNMPAQPTLPQ

SEQ ID NO: 4454 - DNA, 621 bp, Homo sapiens
cctggagcgcggcggtgatggcggggccggtgaaggaccgcgaggccttccagaggctcaacttcctgtaccaggccgcccattgtgtccttgcccaggaccccgagaaccaggcgctggcgaggttttactgctacactgagaggaccattgcgaagcggctcgtcttgcggcggtgagacagccacggggcgggcggcgggcgggacgcgggaggaacgcgagagggagcgcgggcgccagaccactatcctcctccgcccccagggatccctcggtgaagaggactctctgtcgaggctgctcttccctcctcgtcccgggcctcacctgcacccagcgccagagacgctgcaggggacagcgctggaccgtacagacctgcctaacatgccagcgcagccaacgcttcctcaatgatcccgggcatttactctggggagacaggcctgaggcccagctcgggagccaagcagattccaaaccactacaacccttgccaaacacagcccactccatttcagaccgccttcctgaggagaaaatgcagactcagggttccagtaaccagtgatggattcaccccatctcccaaataaagtttacttgttttacattcca

SEQ ID NO: 4455 - protein, 60 aa, Homo sapiens
MIPGIYSGETGLRPSSGAKQIPNHYNPCQTQPTPFQTAFLRRKCRLRVPVTSDGFTPSPK

SEQ ID NO: 4456 - DNA, 595 bp, Homo sapiens
ggagcgcggcggtgatggcggggccggtgaaggaccgcgaggccttccagaggctcaacttcctgtaccaggtgagtctgcgacaagggccccacggggacggtgctcggcgtcccagagtgactgctcccctcccgcaggccgcccattgtgtccttgcccaggaccccgagaaccaggcgctggcgaggttttactgctacactgagaggaccattgcgaagcggctcgtcttgcggcgggatccctcggtgaagaggactctctgtcgaggctgctcttccctcctcgtcccgggcctcacctgcacccagcgccagagacgctgcaggggacagcgctggaccgtacagacctgcctaacatgccagcgcagccaacgcttcctcaatgatcccgggcatttactctggggagacaggcctgaggcccagctcgggagccaagcagattccaaaccactacaacccttgccaaacacagcccactccatttcagaccgccttcctgaggagaaaatgcagactcagggttccagtaaccagtgatggattcaccccatctcccaaataaagtttacttgttttacattcca

SEQ ID NO: 4457 - protein, 177 aa, Homo sapiens
MAGPVKDREAFQRLNFLYQVSLRQGPHGDGARRPRVTAPLPQAAHCVLAQDPENQALARFYCYTERTIAKRLVLRRDPSVKRTLCRGCSSLLVPGLTCTQRQRRCRGQRWTVQTCLTCQRSQRFLNDPGHLLWGDRPEAQLGSQADSKPLQPLPNTAHSISDRLPEEKMQTQGSSNQ

SEQ ID NO: 4458 - DNA, 914 bp, Homo sapiens
cttccagtgtgggcaataaataataacttttaagaggcaaccccacccatgcacaataatagatgttgttcggctttgtggaggacgattcccatcaccattcatttattaagcaaatacttattttctaaaatgtgtcaggtactgtgctagattcattattctcattgaaattacggtctgatgggacagactaagaaacaaaatggtgtagaaaaagattaactgggggagtagaatgctcacttactcatgccagtggtggcgaagtttatgataagcaaagggagtgagagatggaaattctaggcatgtgtgcagactctgagacaagagagcttgtggtgctgtcaaagaaatgagagttcaggaggctggagtttgaggtaggagggcaaaacatgagactggagggggaaacaggccagttcttgaagtcttgttagggagtttgaactttatcttaaagagttccaggaaatcgatggagcttatgccgaggcctgacaccatcaaatgtgcattcaaattgggggtgtggtgggggagcggggatacctactgaaaaacactggaggcaaaactggcagcaagagaccgttacttctaaacgtggacagtctttttcccatgttcaccctaggctgcaggggacagcgctggaccgtacagacctgcctaacatgccagcgcagccaacgcttcctcaatgatcccgggcatttactctggggagacaggcctgaggcccagctcgggagccaagcagattccaaaccactacaacccttgccaaacacagcccactccatttcagaccgccttcctgaggagaaaatgcagactcagggttccagtaaccagtgatggattcaccccatctcccaaataaagtttacttgttttacattcca

SEQ ID NO: 4459 - protein, 116 aa, Homo sapiens [sequence omitted]

SEQ ID NO: 4460 - DNA, 4429 bp, Homo sapiens
gcggcatcgtggggcgggggtggggcgggactgagggcggagtgtgagcgggctcggttttgggccgcggcgggagcgggagtcgccgccactcgagtgcgcaggcgcctggcgattaccggtctcaccatggagcggaaagtgcttgcgctccaggcccgaaagaaaaggaccaaggccaagaaggacaaagcccaaaggaaatctgaaactcagcaccgaggctctgctccccactctgagagtgatctaccagagcaggaagaggagattctgggatctgatgatgatgagcaagaagatcctaatgattattgtaaaggaggttatcatcttgtgaaaattggagatctattcaatgggagataccatgtgatccgaaagttaggctggggacacttttcaacagtatggttatcatgggatattcaggggaagaaatttgtggcaatgaaagtagttaaaagtgctgaacattacactgaaacagcactagatgaaatccggttgctgaagtcagttcgcaattcagaccctaatgatccaaatagagaaatggttgttcaactactagatgactttaaaatatcaggagttaatggaacacatatctgcatggtatttgaagttttggggcatcatctgctcaagtggatcatcaaatccaattatcaggggcttccactgccttgtgtcaaaaaaattattcagcaagtgttacagggtcttgattatttacataccaagtgccgtatcatccacactgacattaaaccagagaacatcttattgtcagtgaatgagcagtacattcggaggctggctgcagaagcaacagaatggcagcgatctggagctcctccgccttccggatctgcagtcagtactgctccccagcctaaaccagctgacaaaatgtcaaagaataagaagaagaaattgaagaagaagcagaagcgccaggcagaattactagagaagcgaatgcaggaaattgaggaaatggagaaagagtcgggccctgggcaaaaaagaccaaacaagcaagaagaatcagagagtcctgttgaaagacccttgaaagagaacccacctaataaaatgacccaagaaaaacttgaagagtcaagtaccattggccaggatcaaacgcttatggaacgtgatacagagggtggtgcagcagaaattaattgcaatggagtgattgaagtcattaattatactcagaacagtaataatgaaacattgagacataaagaggatctacataatgctaatgactgtgatgtccaaaatttgaatcaggaatctagtttcctaagctcccaaaatggagacagcagcacatctcaagaaacagactcttgtacacctataacatctgaggtgtcagacaccatggtgtgccagtcttcctcaactgtaggtcagtcattcagtgaacaacacattagccaacttcaagaaagcattcgggcagagataccctgtgaagatgaacaagagcaagaacataacggaccactggacaacaaaggaaaatccacggctggaaattttcttgttaatccccttgagccaaaaaatgcagaaaagctcaaggtgaagattgctgaccttggaaatgcttgttgggtgcacaaacatttcactgaagatattcaaacaaggcaatatcgttccttggaagttctaatcggatctggctataatacccctgctgacatttggagcacggcatgcatggcctttgaactggccacaggtgactatttgtttgaacctcattcaggggaagagtacactcgagatgaagatcacattgcattgatcatagaacttctggggaaggtgcctcgcaagctcattgtggcaggaaaatattccaaggaatttttcaccaaaaaaggtgacctgaaacatatcacgaagctgaaaccttggggcctttttgaggttctagtggagaagtatgagtggtcgcaggaagaggcagctggcttcacagatttcttactgcccatgttggagctgatccctgagaagagagccactgccgccgagtgtctccggcacccttggcttaactcctaagcccctgcccagcaccacagcagagatcacacactgaccctccgcccttccccttcaagcattttcctcttcccttttcagggtgaagctcttccttcaagagtttctagatcttgttttttttttaatccaacatgttcatttgggtttgcttacttgaccctgtggagatccccacagccattgggcatcctaggtgaatttggccttggttgggctctgccaaagactaatggactaaaatgtgaaacagcctcttgccctgtacctttccttcccattaggacatcctttaaattataagcatcctttttgaaaagagctatgaaggtgtatgagcccatccttttattcattgactctaagagtcaaattttctagtgcatatcctattgccagcataaggatgaggagggggaaagggtcttaattctatgtacagcagagacattaaacttgctgtgtccgggctgcatcatcttcctggactgtttctgttgttctctgtgttcacattttttcctgcaacttttaagctactgtcttttttaaatagctatatgaacaccaaatttgggtaccattttatcactgttcaaagcactgtcaaattcctttcatcctttaatagttaagatctttgaatcttcagtctgatttttaatgtaagcaaaaacagaaccattgaatagtaatttcttgagaacctcaggtgttctataaacagtcctttcctgtatgtcttctattaccctaagaccagagttattttggttggttgttttgttttattttttgtttttgtatccatggctggcactttactcattgcacttgagtttattgccccataactaaaggatcaggatgatggtagaacggagatctgggtttcagagctttcccatttaagaaaaatagatcttgagattctgattcttttccaaacagtcccctgctttcatgtacagctttttctttaccttacccaaaattctggccttgaagcagttttcctctatggctttgcctttctgattttctcagaggctcgagtctttaatataaccccaaatgaaagaaccaaggggaggggtgggatggcacttttttttgttggtcttgttttgttttgttttttggttggttggttcgttattttttaagattagccattctctgctgctatttccctacataatgtcaatttttaaccataattttgacatgattgagatgtacttgaggcttttttgttttaattgagaaaagactttgcaattttttttttaggatgagcctctcctagacttgacctagaatattacatattcctccagtaagtaatactgaagagcaaaagagaggcaggattggggtcacagccgcttcttcagcatggaccaagtgggccttggggattgcagcgttctcgaagtggctgtaggactcgaatttacagaaagccacagaggtgcaacttgaggctctgctagcaagccaccagtgaggctattgggtaaccacctttctatacaggagattggaatctactttgtcatttatccaccacagtgacaaaggaaaagtggtgccgttatgcaatccatttaactcataaacatattactctgagtaactggccagccattcatcggatccttcattgggtactcctgaaatcagacatgttcctgtagaaagaattttaagttaggctttctatgcacctatcaagaatcaagagaatagattgtatcaaacaacggcagggaaatccttcagcaattctaatccactttgggttttcagctgtttttacatctaaagcaatagactagaactgaattatcttctacatagtaaaatcacaattgtggaattacaggaattctggtgatattaaggtgaaataacaaaacacaaaaggccctattttaacagttgatgtgacagtaagttttaatagaacctgtaacttcattttggaaatgcttctccaccaaataagggctttttcccctatttaaggagccagatggattgaaagatgtggaaataggcagctgtagatcttgatcttccaggtaccccatgtacctttattgagcttaattataatactgtcaaattgccacgatctcactaaaggatttctatttgctgtcagttaaaaataaagccctaaatacatttttattctttctactgagggcattgtctgttttctttgtaaatgccgtacaataaacaaattatttaataacctacatgtttccaaaaatctctgttcatttgttgtccaaattgctctgccctgagtaaaaggagg

SEQ ID NO: 4461 - protein, 655 aa, Homo sapiens; identical to SEQ ID NO: 523

SEQ ID NO: 4462 - DNA, 4279 bp, Homo sapiens
gagcggtggagcggcctccgccacgaggggcaatggtcgccggggcgaggcccggtgcttgcgctccaggcccgaaagaaaaggaccaaggccaagaaggacaaagcccaaaggaaatctgaaactcagcaccgaggctctgctccccactctgagagtgatctaccagagcaggaagaggagattctgggatctgatgatgatgagcaagaagatcctaatgattattgtaaaggaggttatcatcttgtgaaaattggagatctattcaatgggagataccatgtgatccgaaagttaggctggggacacttttcaacagtatggttatcatgggatattcaggggaagaaatttgtggcaatgaaagtagttaaaagtgctgaacattacactgaaacagcactagatgaaatccggttgctgaagtcagttcgcaattcagaccctaatgatccaaatagagaaatggttgttcaactactagatgactttaaaatatcaggagttaatggaacacatatctgcatggtatttgaagttttggggcatcatctgctcaagtggatcatcaaatccaattatcaggggcttccactgccttgtgtcaaaaaaattattcagcaagtgttacagggtcttgattatttacataccaagtgccgtatcatccacactgacattaaaccagagaacatcttattgtcagtgaatgagcagtacattcggaggctggctgcagaagcaacagaatggcagcgatctggagctcctccgccttccggatctgcagtcagtactgctccccagcctaaaccagctgacaaaatgtcaaagaataagaagaagaaattgaagaagaagcagaagcgccaggcagaattactagagaagcgaatgcaggaaattgaggaaatggagaaagagtcgggccctgggcaaaaaagaccaaacaagcaagaagaatcagagagtcctgttgaaagacccttgaaagagaacccacctaataaaatgacccaagaaaaacttgaagagtcaagtaccattggccaggatcaaacgcttatggaacgtgatacagagggtggtgcagcagaaattaattgcaatggagtgattgaagtcattaattatactcagaacagtaataatgaaacattgagacataaagaggatctacataatgctaatgactgtgatgtccaaaatttgaatcaggaatctagtttcctaagctcccaaaatggagacagcagcacatctcaagaaacagactcttgtacacctataacatctgaggtgtcagacaccatggtgtgccagtcttcctcaactgtaggtcagtcattcagtgaacaacacattagccaacttcaagaaagcattcgggcagagataccctgtgaagatgaacaagagcaagaacataacggaccactggacaacaaaggaaaatccacggctggaaattttcttgttaatccccttgagccaaaaaatgcagaaaagctcaaggtgaagattgctgaccttggaaatgcttgttgggtgcacaaacatttcactgaagatattcaaacaaggcaatatcgttccttggaagttctaatcggatctggctataatacccctgctgacatttggagcacggcatgcatggcctttgaactggccacaggtgactatttgtttgaacctcattcaggggaagagtacactcgagatgaagatcacattgcattgatcatagaacttctggggaaggtgcctcgcaagctcattgtggcaggaaaatattccaaggaatttttcaccaaaaaaggtgacctgaaacatatcacgaagctgaaaccttggggcctttttgaggttctagtggagaagtatgagtggtcgcaggaagaggcagctggcttcacagatttcttactgcccatgttggagctgatccctgagaagagagccactgccgccgagtgtctccggcacccttggcttaactcctaagcccctgcccagcaccacagcagagatcacacactgaccctccgcccttccccttcaagcattttcctcttcccttttcagggtgaagctcttccttcaagagtttctagatcttgttttttttttaatccaacatgttcatttgggtttgcttacttgaccctgtggagatccccacagccattgggcatcctaggtgaatttggccttggttgggctctgccaaagactaatggactaaaatgtgaaacagcctcttgccctgtacctttccttcccattaggacatcctttaaattataagcatcctttttgaaaagagctatgaaggtgtatgagcccatccttttattcattgactctaagagtcaaattttctagtgcatatcctattgccagcataaggatgaggagggggaaagggtcttaattctatgtacagcagagacattaaacttgctgtgtccgggctgcatcatcttcctggactgtttctgttgttctctgtgttcacattttttcctgcaacttttaagctactgtcttttttaaatagctatatgaacaccaaatttgggtaccattttatcactgttcaaagcactgtcaaattcctttcatcctttaatagttaagatctttgaatcttcagtctgatttttaatgtaagcaaaaacagaaccattgaatagtaatttcttgagaacctcaggtgttctataaacagtcctttcctgtatgtcttctattaccctaagaccagagttattttggttggttgttttgttttattttttgtttttgtatccatggctggcactttactcattgcacttgagtttattgccccataactaaaggatcaggatgatggtagaacggagatctgggtttcagagctttcccatttaagaaaaatagatcttgagattctgattcttttccaaacagtcccctgctttcatgtacagctttttctttaccttacccaaaattctggccttgaagcagttttcctctatggctttgcctttctgattttctcagaggctcgagtctttaatataaccccaaatgaaagaaccaaggggaggggtgggatggcacttttttttgttggtcttgttttgttttgttttttggttggttggttcgttattttttaagattagccattctctgctgctatttccctacataatgtcaatttttaaccataattttgacatgattgagatgtacttgaggcttttttgttttaattgagaaaagactttgcaattttttttttaggatgagcctctcctagacttgacctagaatattacatattcctccagtaagtaatactgaagagcaaaagagaggcaggattggggtcacagccgcttcttcagcatggaccaagtgggccttggggattgcagcgttctcgaagtggctgtaggactcgaatttacagaaagccacagaggtgcaacttgaggctctgctagcaagccaccagtgaggctattgggtaaccacctttctatacaggagattggaatctactttgtcatttatccaccacagtgacaaaggaaaagtggtgccgttatgcaatccatttaactcataaacatattactctgagtaactggccagccattcatcggatccttcattgggtactcctgaaatcagacatgttcctgtagaaagaattttaagttaggctttctatgcacctatcaagaatcaagagaatagattgtatcaaacaacggcagggaaatccttcagcaattctaatccactttgggttttcagctgtttttacatctaaagcaatagactagaactgaattatcttctacatagtaaaatcacaattgtggaattacaggaattctggtgatattaaggtgaaataacaaaacacaaaaggccctattttaacagttgatgtgacagtaagttttaatagaacctgtaacttcattttggaaatgcttctccaccaaataagggctttttcccctatttaaggagccagatggattgaaagatgtggaaataggcagctgtagatcttgatcttccaggtaccccatgtacctttattgagcttaattataatactgtcaaattgccacgatctcactaaaggatttctatttgctgtcagttaaaaataaagccctaaatacatttttattctttctactgagggcattgtctgttttctttgtaaatgccgtacaataaacaaattatttaataacct

SEQ ID NO: 4463 - protein, 548 aa, Homo sapiens
MKVVKSAEHYTETALDEIRLLKSVRNSDPNDPNREMVVQLLDDFKISGVNGTHICMVFEVLGHHLLKWIIKSNYQGLPLPCVKKIIQQVLQGLDYLHTKCRIIHTDIKPENILLSVNEQYIRRLAAEATEWQRSGAPPPSGSAVSTAPQPKPADKMSKNKKKKLKKKQKRQAELLEKRMQEIEEMEKESGPGQKRPNKQEESESPVERPLKENPPNKMTQEKLEESSTIGQDQTLMERDTEGGAAEINCNGVIEVINYTQNSNNETLRHKEDLHNANDCDVQNLNQESSFLSSQNGDSSTSQETDSCTPITSEVSDTMVCQSSSTVGQSFSEQHISQLQESIRAEIPCEDEQEQEHNGPLDNKGKSTAGNFLVNPLEPKNAEKLKVKIADLGNACWVHKHFTEDIQTRQYRSLEVLIGSGYNTPADIWSTACMAFELATGDYLFEPHSGEEYTRDEDHIALIIELLGKVPRKLIVAGKYSKEFFTKKGDLKHITKLKPWGLFEVLVEKYEWSQEEAAGFTDFLLPMLELIPEKRATAAECLRHPWLNS

SEQ ID NO: 4464 - DNA, 4761 bp, Homo sapiens
ggtctcaccatggagcggaaaggtgagcggtggagcggcctccgccacgaggggcaatggtcgccggggcgaggcccgggtcagcgccgggagcttcgcttaactgccgcggttcggttcccggacgtgcggcgcccctccactgaggtggcgccgccccacaccccctgcctctgggctgcgggtccgcgcccctcagtccgggcgtcctctggcgccggccgtagccgccccttgttccccgccaggccggctcgcgccttggggccactccagggcccggcccttggcgggcgacgcagacccccacccgcccgccccctgacccggcctgagacccctccggcgcatcccgcccgggcgctgctctgcgccccgtgggccgccagccccacggccggccgcctcgccggagcccgcagccgcccccgaggcaggccccgcagccgggcctggcgcccctgctgggtctccaccctcaccttggtcgcctcctttcctccacattcgcccttcatccatccctctctcctgcagtgcttgcgctccaggcccgaaagaaaaggaccaaggccaagaaggacaaagcccaaaggaaatctgaaactcagcaccgaggctctgctccccactctgagagtgatctaccagagcaggaagaggagattctgggatctgatgatgatgagcaagaagatcctaatgattattgtaaaggaggttatcatcttgtgaaaattggagatctattcaatgggagataccatgtgatccgaaagttaggctggggacacttttcaacagtatggttatcatgggatattcaggggaagaaatttgtggcaatgaaagtagttaaaagtgctgaacattacactgaaacagcactagatgaaatccggttgctgaagtcagttcgcaattcagaccctaatgatccaaatagagaaatggttgttcaactactagatgactttaaaatatcaggagttaatggaacacatatctgcatggtatttgaagttttggggcatcatctgctcaagtggatcatcaaatccaattatcaggggcttccactgccttgtgtcaaaaaaattattcagcaagtgttacagggtcttgattatttacataccaagtgccgtatcatccacactgacattaaaccagagaacatcttattgtcagtgaatgagcagtacattcggaggctggctgcagaagcaacagaatggcagcgatctggagctcctccgccttccggatctgcagtcagtactgctccccagcctaaaccagctgacaaaatgtcaaagaataagaagaagaaattgaagaagaagcagaagcgccaggcagaattactagagaagcgaatgcaggaaattgaggaaatggagaaagagtcgggccctgggcaaaaaagaccaaacaagcaagaagaatcagagagtcctgttgaaagacccttgaaagagaacccacctaataaaatgacccaagaaaaacttgaagagtcaagtaccattggccaggatcaaacgcttatggaacgtgatacagagggtggtgcagcagaaattaattgcaatggagtgattgaagtcattaattatactcagaacagtaataatgaaacattgagacataaagaggatctacataatgctaatgactgtgatgtccaaaatttgaatcaggaatctagtttcctaagctcccaaaatggagacagcagcacatctcaagaaacagactcttgtacacctataacatctgaggtgtcagacaccatggtgtgccagtcttcctcaactgtaggtcagtcattcagtgaacaacacattagccaacttcaagaaagcattcgggcagagataccctgtgaagatgaacaagagcaagaacataacggaccactggacaacaaaggaaaatccacggctggaaattttcttgttaatccccttgagccaaaaaatgcagaaaagctcaaggtgaagattgctgaccttggaaatgcttgttgggtgcacaaacatttcactgaagatattcaaacaaggcaatatcgttccttggaagttctaatcggatctggctataatacccctgctgacatttggagcacggcatgcatggcctttgaactggccacaggtgactatttgtttgaacctcattcaggggaagagtacactcgagatgaagatcacattgcattgatcatagaacttctggggaaggtgcctcgcaagctcattgtggcaggaaaatattccaaggaatttttcaccaaaaaaggtgacctgaaacatatcacgaagctgaaaccttggggcctttttgaggttctagtggagaagtatgagtggtcgcaggaagaggcagctggcttcacagatttcttactgcccatgttggagctgatccctgagaagagagccactgccgccgagtgtctccggcacccttggcttaactcctaagcccctgcccagcaccacagcagagatcacacactgaccctccgcccttccccttcaagcattttcctcttcccttttcagggtgaagctcttccttcaagagtttctagatcttgttttttttttaatccaacatgttcatttgggtttgcttacttgaccctgtggagatccccacagccattgggcatcctaggtgaatttggccttggttgggctctgccaaagactaatggactaaaatgtgaaacagcctcttgccctgtacctttccttcccattaggacatcctttaaattataagcatcctttttgaaaagagctatgaaggtgtatgagcccatccttttattcattgactctaagagtcaaattttctagtgcatatcctattgccagcataaggatgaggagggggaaagggtcttaattctatgtacagcagagacattaaacttgctgtgtccgggctgcatcatcttcctggactgtttctgttgttctctgtgttcacattttttcctgcaacttttaagctactgtcttttttaaatagctatatgaacaccaaatttgggtaccattttatcactgttcaaagcactgtcaaattcctttcatcctttaatagttaagatctttgaatcttcagtctgatttttaatgtaagcaaaaacagaaccattgaatagtaatttcttgagaacctcaggtgttctataaacagtcctttcctgtatgtcttctattaccctaagaccagagttattttggttggttgttttgttttattttttgtttttgtatccatggctggcactttactcattgcacttgagtttattgccccataactaaaggatcaggatgatggtagaacggagatctgggtttcagagctttcccatttaagaaaaatagatcttgagattctgattcttttccaaacagtcccctgctttcatgtacagctttttctttaccttacccaaaattctggccttgaagcagttttcctctatggctttgcctttctgattttctcagaggctcgagtctttaatataaccccaaatgaaagaaccaaggggaggggtgggatggcacttttttttgttggtcttgttttgttttgttttttggttggttggttcgttattttttaagattagccattctctgctgctatttccctacataatgtcaatttttaaccataattttgacatgattgagatgtacttgaggcttttttgttttaattgagaaaagactttgcaattttttttttaggatgagcctctcctagacttgacctagaatattacatattcctccagtaagtaatactgaagagcaaaagagaggcaggattggggtcacagccgcttcttcagcatggaccaagtgggccttggggattgcagcgttctcgaagtggctgtaggactcgaatttacagaaagccacagaggtgcaacttgaggctctgctagcaagccaccagtgaggctattgggtaaccacctttctatacaggagattggaatctactttgtcatttatccaccacagtgacaaaggaaaagtggtgccgttatgcaatccatttaactcataaacatattactctgagtaactggccagccattcatcggatccttcattgggtactcctgaaatcagacatgttcctgtagaaagaattttaagttaggctttctatgcacctatcaagaatcaagagaatagattgtatcaaacaacggcagggaaatccttcagcaattctaatccactttgggttttcagctgtttttacatctaaagcaatagactagaactgaattatcttctacatagtaaaatcacaattgtggaattacaggaattctggtgatattaaggtgaaataacaaaacacaaaaggccctattttaacagttgatgtgacagtaagttttaatagaacctgtaacttcattttggaaatgcttctccaccaaataagggctttttcccctatttaaggagccagatggattgaaagatgtggaaataggcagctgtagatcttgatcttccaggtaccccatgtacctttattgagcttaattataatactgtcaaattgccacgatctcactaaaggatttctatttgctgtcagttaaaaataaagccctaaatacatttttattctttctactgagggcattgtctgttttctttgtaaatgccgtacaataaacaaattatttaataacct

SEQ ID NO: 4465 - protein, 548 aa, Homo sapiens; identical to SEQ ID NO: 4463

SEQ ID NO: 4466 - DNA, 634 bp, Homo sapiens
gccgccactcgagtgcgcaggcgcctggcgattaccggtctcaccatggagcggaaagtgcttgcgctccaggcccgaaagaaaaggaccaaggccaagaaggacaaagcccaaaggaaatctgaaactcagcaccgaggctctgctccccactctgagagtgatctaccagagcaggaagaggagattctgggatctgatgatgatgagcaagaagatcctaatgattattgtaaaggaggttatcatcttgtgaaaattggagatctattcaatgggagataccatgtgatccgaaagttaggctggggacacttttcaacagtatggttatcatgggatattcaggggaagaaatttgtggcaatgaaagtagttaaaagtgctgaacattacactgaaacagcactagatgaaatccggttgctgaagtcagtgagtattagattatatgtatgaatgtgaagaattataaataaatcaagtttcattgaataaaaacacaccaagtggaggctctttagcatggataattttctctataaagttctagtaaccttaaagaggtaaaggaagacaacaatatttacacataccatgcatgtagtagggaactggtggcaaatgctatgat

SEQ ID NO: 4467 - protein, 137 aa, Homo sapiens
MERKVLALQARKKRTKAKKDKAQRKSETQHRGSAPHSESDLPEQEEEILGSDDDEQEDPNDYCKGGYHLVKIGDLFNGRYHVIRKLGWGHFSTVWLSWDIQGKKFVAMKVVKSAEHYTETALDEIRLLKSVSIRLYV

SEQ ID NO: 4468 - DNA, 466 bp, Homo sapiens
gaaaagccccatgccctcctctatgaaagggagtgtgtggttggtagaacccaaagtaaacacggaaaaattcattcaagaatttccttaaggcctaccgtgaagacgtcggaggcaagttaagacgttggggagcagacggagtctcactctgtaacccaggcttgagtgcagtggtgggatctcggctcactgcaatctctacctcccaggttcaagagattctcctgcctcagcccccagagtagctgggattacaggcatgcaccaccatgaccagctaatttttgtatttttggtagagatgaggtttctccatgttggccaggcgggtcttgaactcctgacttcaggagcagcatcacacctgcgcctaccagagatgcaaactgaggagacagagccagttggagagaaaccatcaggaacgtattggtccctgtctgcaactgaggccttctgcttg

SEQ ID NO: 4469 - protein, 67 aa, Homo sapiens
MHHHDQLIFVFLVEMRFLHVGQAGLELLTSGAASHLRLPEMQTEETEPVGEKPSGTYWSLSATEAFC

SEQ ID NO: 4470 - DNA, 705 bp, Homo sapiens
gaagtgcctttcacctcccaccatgattctgaggcctcccaagccatgtggaactgtttcccgtatcactgtctcggattcatcgatgcttaactcagaggagcctatgaccttccttgacaaggcaaacagcacggcgtcgtgaacgctgaggaacagctgggtcttggtgatgccagcgtcaaagaaatcattcctctcaaatgccctgactatggaagctaaaaaccaaacccagaacacacacaatgtcagatacttggggagcagaggacccagggtgcaaaacagccctctcatagggtgaaggatactcacagtgacaccctgcaatgagtatcaaaatgttggcgttttgaaaggcattgcatatctgtggggggagagaaaaccagtatcagaaggctttatacttgctaggaaaggccttctaattagctaagtttttgtcttgttttgttttggttttttgtgacagagtctcactctgtcacccagatggagtgcagtggcatgatctcggctcactgcaacctccgcctcccaggttcaagtgatttgtccacctcagcctcccaagtagctgagactacaggtgcataccacacgcctggctaatttttgtatttttaatagagacagggtttcaccatattggccaggctggtctcaaactcctgacttcgtgatctgcctgcctcgacg

SEQ ID NO: 4471 - protein, 40 aa, Homo sapiens
MILRPPKPCGTVSRITVSDSSMLNSEEPMTFLDKANSTAS

SEQ ID NO: 4472 - DNA, 2266 bp, Homo sapiens
gctgtgctggctggtattattctgagcaacgtcattccctaccttgaaaccatttctaacctacccagcctgtggaggcaggaccaatatgactgtgctctttggatgatgacattctcatcttcaattttcctgggactggacattggactaattatctcagtagtttctgctttcttcatcaccactgttcgttcacacagagctaagattcttctcctgggtcaaatccctaacaccaacatttatagaagcatcaatgattatcgggagatcatcaccattcctggggtgaaaatcttccagtgctgcagctcaattacatttgtaaatgtttactacctaaagcataagctgttaaaagaggttgatatggtaaaggtgcctcttaaagaagaagaaattttcagcttgtttaattcaagtgacaccaatctacaaggaggaaagatttgcaggtgtttctgcaactgtgatgatctggagccgctgcccaggattctttacacagagcgatttgaaaataaactggatcccgaagcatcctccattaacctgattcactgctcacattttgagagcatgaacacaagccaaactgcatccgaagaccaagtgccatacacagtatcgtccgtgtctcagaaaaatcaagggcaacagtatgaggaggtggaggaagtttggcttcctaataactcatcaagaaacagctcaccaggactgcctgatgtggcggaaagccaggggaggagatcactcatcccttactcagatgcgtctctactgcccagtgtccacaccatcatcctggatttctccatggtacactacgtggattcacgggggttagtcgtattaagacaggtaagtactgaggaggccttggcaggagctctgatccccctcctaccatcccaaccccaccctgatcctgattgaattctgttagtcactgatcagctgctatgagactgctaggccaccagagccttggacaccaaaggcagtacaatataaggtcaatcaaaataaaaagagaatgaaccaattcttttttcttttttcttttttgagatggagcctcactctgttgcccaggctggagtgcagtggcacaatcttggctcactgcaacctccacctcccaggttcaagagattctcctgcctcagcctcctgaatagctggaactacagatatgcaatgcctttcaaaacgccaacattttgatactcattgcagggtgtcactcttccatagtcagggcatttgagaggaatgatttctttgacgctggcatcaccaagacccagctgttcctcagcgttcacgacgccgtgctgtttgccttgtcaaggaaggtcataggctcctctgagttaagcatcgatgaatccgagacagtgatacgggaaacctactcagaaacagacaagaatgacaattcaagatataaaatgagcagcagttttctaggaagccaaaaaaatgtaagtccaggcttcatcaagatccaacagcctgtagaagaggagtcggagttggatttggagctggaatcagaacaagaggctgggctgggtctggacctagacctggatcgggagctggagcctgaaatggagcccaaggctgagaccgagaccaagacccagaccgagatggagccccagcctgagactgagcctgagatggagcccaaccccaaatctaggccaagagctcacacttttcctcagcagcgttactggcctatgtatcatccgtctatggcttccacccagtctcagactcagactcggacatggtcagtggagaggagacgccatcctatggattcatactcaccagagggcaacagcaatgaagatgtctaggagatgaactagaaataaggggtcagataatgctggcaaatcctcctacccaaaaaggggtcaattgtccagagacctagactggatacgaactagcagtacttccttcctgactgtgactcctactacctgccagccttcttccttgctctgcgctgggatcatactcccaaatcacattactaaatgccaacaattatctctgaattccctatccaggctcccctcatttcaccttcagcatatattctagtcatgaatttccttcttcacacaccccacatctctgggctttgtgccagaccatctctaacttaatcctctcatccctgttcccctttctccaaagagatgaagctcaaataaaatgtataactctagtaaca

SEQ ID NO: 4473 - protein, 278 aa, Homo sapiens
MMTFSSSIFLGLDIGLIISVVSAFFITTVRSHRAKILLLGQIPNTNIYRSINDYREIITIPGVKIFQCCSSITFVNVYYLKHKLLKEVDMVKVPLKEEEIFSLFNSSDTNLQGGKICRCFCNCDDLEPLPRILYTERFENKLDPEASSINLIHCSHFESMNTSQTASEDQVPYTVSSVSQKNQGQQYEEVEEVWLPNNSSRNSSPGLPDVAESQGRRSLIPYSDASLLPSVHTIILDFSMVHYVDSRGLVVLRQVSTEEALAGALIPLLPSQPHPDPD

SEQ ID NO: 4474 - DNA, 2866 bp, Homo sapiens
gatggcactggagcagagagaaactaaagcaggaaaatgggaagtgattatctttgtgttttttaagatgaagctccactgaagctgctagatgggcagttacccaagcagcaaacaggagagtgaggggtgggaaatttacttacatgggaagtagggctgacactgaggagctactagggcttttctttccttatatttattttttttttgagatggagtctcactctgtcgccaggctggagtgcagtggcgtgatcttggctcactgcaatctccgtctcccgggttcaagcgattctcctctctcagcctcccaagtagctggaattacaggcacacaccaccaagcccagctaatttttgtatttttagtagagacggggtttcaccatgttggccaggatggtctccatcttttgaccttgtgatctgccggcctcagcctcccaatgtgctaggattacaggtgtgagccaccgcacccggccaactacggcttttctaaattgtgcaaggagaggttaaacttaggaggagatgcaaatcagattttaggagaattcagattcatagcacagagcagtggcagtaaagattcaaatgcccaggacaacgtggagcttttcagggagcatctttccattcatttagggagtatttattgagtacctagtatgtgtttagcactttgataagacttgaaaatgtcagttcaacaaaaatacacttggactgaactcaactccttttaagaaaaattgacatgcttctcaccaagcagaaggcctcagttgcagacagggaccaatacgttcctgatggtttctctccaactggctctgtctcctcagtttgcatctctggtaggcgcaggtgtgatgctgctcctgatggtgaagatgggacactttttctacacactgccaaatgctgtgctggctggtattattctgagcaacgtcattccctaccttgaaaccatttctaacctacccagcctgtggaggcaggaccaatatgactgtgctctttggatgatgacattctcatcttcaattttcctgggactggacattggactaattatctcagtagtttctgctttcttcatcaccactgttcgttcacacagagctaagattcttctcctgggtcaaatccctaacaccaacatttatagaagcatcaatgattatcgggagatcatcaccattcctggggtgaaaatcttccagtgctgcagctcaattacatttgtaaatgtttactacctaaagcataagctgttaaaagaggttgatatggtaaaggtgcctcttaaagaagaagaaattttcagcttgtttaattcaagtgacaccaatctacaaggaggaaagatttgcaggtgtttctgcaactgtgatgatctggagccgctgcccaggattctttacacagagcgatttgaaaataaactggatcccgaagcatcctccattaacctgattcactgctcacattttgagagcatgaacacaagccaaactgcatccgaagaccaagtgccatacacagtatcgtccgtgtctcagaaaaatcaagggcaacagtatgaggaggtggaggaagtttggcttcctaataactcatcaagaaacagctcaccaggactgcctgatgtggcggaaagccaggggaggagatcactcatcccttactcagatgcgtctctactgcccagtgtccacaccatcatcctggatttctccatggtacactacgtggattcacgggggttagtcgtattaagacagatatgcaatgcctttcaaaacgccaacattttgatactcattgcagggtgtcactcttccatagtcagggcatttgagaggaatgatttctttgacgctggcatcaccaagacccagctgttcctcagcgttcacgacgccgtgctgtttgccttgtcaaggaaggtcataggctcctctgagttaagcatcgatgaatccgagacagtgatacgggaaacctactcagaaacagacaagaatgacaattcaagatataaaatgagcagcagttttctaggaagccaaaaaaatgtaagtccaggcttcatcaagatccaacagcctgtagaagaggagtcggagttggatttggagctggaatcagaacaagaggctgggctgggtctggacctagacctggatcgggagctggagcctgaaatggagcccaaggctgagaccgagaccaagacccagaccgagatggagccccagcctgagactgagcctgagatggagcccaaccccaaatctaggccaagagctcacacttttcctcagcagcgttactggcctatgtatcatccgtctatggcttccacccagtctcagactcagactcggacatggtcagtggagaggagacgccatcctatggattcatactcaccagagggcaacagcaatgaagatgtctaggagatgaactagaaataaggggtcagataatgctggcaaatcctcctacccaaaaaggggtcaattgtccagagacctagactggatacgaactagcagtacttccttcctgactgtgactcctactacctgccagccttcttccttgctctgcgctgggatcatactcccaaatcacattactaaatgccaacaattatctctgaattccctatccaggctcccctcatttcaccttcagcatatattctagtcatgaatttccttcttcacacaccccacatctctgggctttgtgccagaccatctctaacttaatcctctcatccctgttcccctttctccaaagagatgaagctcaaataaaatgtataactctagtaaca

SEQ ID NO: 4475 - protein, 552 aa, Homo sapiens
MVSLQLALSPQFASLVGAGVMLLLMVKMGHFFYTLPNAVLAGIILSNVIPYLETISNLPSLWRQDQYDCALWMMTFSSSIFLGLDIGLIISVVSAFFITTVRSHRAKILLLGQIPNTNIYRSINDYREIITIPGVKIFQCCSSITFVNVYYLKHKLLKEVDMVKVPLKEEEIFSLFNSSDTNLQGGKICRCFCNCDDLEPLPRILYTERFENKLDPEASSINLIHCSHFESMNTSQTASEDQVPYTVSSVSQKNQGQQYEEVEEVWLPNNSSRNSSPGLPDVAESQGRRSLIPYSDASLLPSVHTIILDFSMVHYVDSRGLVVLRQICNAFQNANILILIAGCHSSIVRAFERNDFFDAGITKTQLFLSVHDAVLFALSRKVIGSSELSIDESETVIRETYSETDKNDNSRYKMSSSFLGSQKNVSPGFIKIQQPVEEESELDLELESEQEAGLGLDLDLDRELEPEMEPKAETETKTQTEMEPQPETEPEMEPNPKSRPRAHTFPQQRYWPMYHPSMASTQSQTQTRTWSVERRRHPMDSYSPEGNSNEDV

SEQ ID NO: 4476 - DNA, 3150 bp, Homo sapiens
gctgggagacgcctgggcgccgggggctgcaggtcccagggcgggggctgcgtccgtcaccggcaggtacccaggtatgccgcagagccaggcacgccgtgggcactcagtcagtatctgtggaatgaatgaatgatggtcgtccctgggagcttatctctgaggaatggcacaactagagaggagcgccatctctggcttcagctctaagtccaggcgaaactcattcgcatatgatgttaagcgtgaagtatacaatgaggagacctttcaacaggaacacaaaaggaaggcctcctcttctgggaacatgaacatcaacatcaccaccttcagacaccacgtccagtgccgctgctcatggcacaggttcctacgatgcgtgcttacaatctttcccttcctagaatggatgtgtatgtatcgattaaaggattggcttctgggagacttacttgctggtataagtgttggccttgtgcaagttccccaaggcctgacacttagtttgctggcaaggcaactgattcctcctctcaacatcgcttatgcagctttctgttcttcggtaatctatgtaatttttggatcgtgtcatcaaatgtccattggttccttcttcctggtgagtgctctgctgatcaacgttctgaaagtgagcccattcaacaacggtcaactggtcatgggatctttcgtcaagaatgagttttcggccccctcctaccttatgggctataataaatccttgagtgtggtggcaaccacaacttttctgactgggattattcagattattggcttcactgtgattgcaaacaagataagcatggccacagaaaccagccagacgcttattgacatgattccttatagctttctgcttcctgtaacaccagatttcagccttcttcccaagataattttacaagccttctccttatctttggtgagctcctttctgctcatatttctgggcaagaagattgccagtcttcacaattacagtgtcaattccaaccaggatttaatagccatcggcctttgcaatgtcgtcagttcatttttcagatcttgtgtgtttactggtgctattgctaggactattatccaggataaatctggaggaagacaacagtttgcatctctggtaggcgcaggtgtgatgctgctcctgatggtgaagatgggacactttttctacacactgccaaatgctgtgctggctggtattattctgagcaacgtcattccctaccttgaaaccatttctaacctacccagcctgtggaggcaggaccaatatgactgtgctctttggatgatgacattctcatcttcaattttcctgggactggacattggactaattatctcagtagtttctgctttcttcatcaccactgttcgttcacacagagctaagattcttctcctgggtcaaatccctaacaccaacatttatagaagcatcaatgattatcgggagatcatcaccattcctggggtgaaaatcttccagtgctgcagctcaattacatttgtaaatgtttactacctaaagcataagctgttaaaagaggttgatatggtaaaggtgcctcttaaagaagaagaaattttcagcttgtttaattcaagtgacaccaatctacaaggaggaaagatttgcaggtgtttctgcaactgtgatgatctggagccgctgcccaggattctttacacagagcgatttgaaaataaactggatcccgaagcatcctccattaacctgattcactgctcacattttgagagcatgaacacaagccaaactgcatccgaagaccaagtgccatacacagtatcgtccgtgtctcagaaaaatcaagggcaacagtatgaggaggtggaggaagtttggcttcctaataactcatcaagaaacagctcaccaggactgcctgatgtggcggaaagccaggggaggagatcactcatcccttactcagatgcgtctctactgcccagtgtccacaccatcatcctggatttctccatggtacactacgtggattcacgggggttagtcgtattaagacagatatgcaatgcctttcaaaacgccaacattttgatactcattgcagggtgtcactcttccatagtcagggcatttgagaggaatgatttctttgacgctggcatcaccaagacccagctgttcctcagcgttcacgacgccgtgctgtttgccttgtcaaggaaggtcataggctcctctgagttaagcatcgatgaatccgagacagtgatacgggaaacctactcagaaacagacaagaatgacaattcaagatataaaatgagcagcagttttctaggaagccaaaaaaatgtaagtccaggcttcatcaagatccaacagcctgtagaagaggagtcggagttggatttggagctggaatcagaacaagaggctgggctgggtctggacctagacctggatcgggagctggagcctgaaatggagcccaaggctgagaccgagaccaagacccagaccgagatggagccccagcctgagactgagcctgagatggagcccaaccccaaatctaggccaagagctcacacttttcctcagcagcgttactggcctatgtatcatccgtctatggcttccacccagtctcagactcagactcggacatggtcagtggagaggagacgccatcctatggattcatactcaccagagggcaacagcaatgaagatgtctaggagatgaactagaaataaggggtcagataatgctggcaaatcctcctacccaaaaaggggtcaattgtccagagacctagactggatacgaactagcagtacttccttcctgactgtgactcctactacctgccagccttcttccttgctctgcgctgggatcatactcccaaatcacattactaaatgccaacaattatctctgaattccctatccaggctcccctcatttcaccttcagcatatattctagtcatgaatttccttcttcacacaccccacatctctgggctttgtgccagaccatctctaacttaatcctctcatccctgttcccctttctccaaagagatgaagctcaaataaaatgtataactctagtaaca

SEQ ID NO: 4477 - protein, 865 aa, Homo sapiens
MAQLERSAISGFSSKSRRNSFAYDVKREVYNEETFQQEHKRKASSSGNMNINITTFRHHVQCRCSWHRFLRCVLTIFPFLEWMCMYRLKDWLLGDLLAGISVGLVQVPQGLTLSLLARQLIPPLNIAYAAFCSSVIYVIFGSCHQMSIGSFFLVSALLINVLKVSPFNNGQLVMGSFVKNEFSAPSYLMGYNKSLSVVATTTFLTGIIQIIGFTVIANKISMATETSQTLIDMIPYSFLLPVTPDFSLLPKIILQAFSLSLVSSFLLIFLGKKIASLHNYSVNSNQDLIAIGLCNVVSSFFRSCVFTGAIARTIIQDKSGGRQQFASLVGAGVMLLLMVKMGHFFYTLPNAVLAGIILSNVIPYLETISNLPSLWRQDQYDCALWMMTFSSSIFLGLDIGLIISVVSAFFITTVRSHRAKILLLGQIPNTNIYRSINDYREIITIPGVKIFQCCSSITFVNVYYLKHKLLKEVDMVKVPLKEEEIFSLFNSSDTNLQGGKICRCFCNCDDLEPLPRILYTERFENKLDPEASSINLIHCSHFESMNTSQTASEDQVPYTVSSVSQKNQGQQYEEVEEVWLPNNSSRNSSPGLPDVAESQGRRSLIPYSDASLLPSVHTIILDFSMVHYVDSRGLVVLRQICNAFQNANILILIAGCHSSIVRAFERNDFFDAGITKTQLFLSVHDAVLFALSRKVIGSSELSIDESETVIRETYSETDKNDNSRYKMSSSFLGSQKNVSPGFIKIQQPVEEESELDLELESEQEAGLGLDLDLDRELEPEMEPKAETETKTQTEMEPQPETEPEMEPNPKSRPRAHTFPQQRYWPMYHPSMASTQSQTQTRTWSVERRRHPMDSYSPEGNSNEDV

SEQ ID NO: 4478 - DNA, 3410 bp, Homo sapiens
actcccgcccccgccaaggagccaggtgagccgctgctgggagacgcctgggcgccgggggctgcaggtcccagggcgggggctgcgtccgtcaccggcaggtacccaggaatggcacaactagagaggagcgccatctctggcttcagctctaagtccaggcgaaactcattcgcatatgatgttaagcgtgaagtatacaatgaggagacctttcaacaggaacacaaaaggaaggcctcctcttctgggaacatgaacatcaacatcaccaccttcagacaccacgtccagtgccgctgctcatggcacaggttcctacgatgcgtgcttacaatctttcccttcctagaatggatgtgtatgtatcgattaaaggattggcttctgggagacttacttgctggtataagtgttggccttgtgcaagttccccaaggcctgacacttagtttgctggcaaggcaactgattcctcctctcaacatcgcttatgcagctttctgttcttcggtaatctatgtaatttttggatcgtgtcatcaaatgtccattggttccttcttcctggtgagtgctctgctgatcaacgttctgaaagtgagcccattcaacaacggtcaactggtcatgggatctttcgtcaagaatgagttttcggccccctcctaccttatgggctataataaatccttgagtgtggtggcaaccacaacttttctgactgggattattcagctaataatgggcgtattgggtttgggcttcattgccacttaccttccggagtctgcaatgagtgcttacctggctgctgtggcacttcatatcatgctgtcccagctgactttcatctttgggattatgattagtttccatgccggtcccatctccttcttctatgacataattaattactgtgtagctctcccaaaagcgaattccaccagcattctagtatttctaactgttgttgttgctctgcgaatcaacaaatgtatcagaatttctttcaatcagtatcccattgagtttcccatggaattatttctgattattggcttcactgtgattgcaaacaagataagcatggccacagaaaccagccagacgcttattgacatgattccttatagctttctgcttcctgtaacaccagatttcagccttcttcccaagataattttacaagccttctccttatctttggtgagctcctttctgctcatatttctgggcaagaagattgccagtcttcacaattacagtgtcaattccaaccaggatttaatagccatcggcctttgcaatgtcgtcagttcatttttcagatcttgtgtgtttactggtgctattgctaggactattatccaggataaatctggaggaagacaacagtttgcatctctggtaggcgcaggtgtgatgctgctcctgatggtgaagatgggacactttttctacacactgccaaatgctgtgctggctggtattattctgagcaacgtcattccctaccttgaaaccatttctaacctacccagcctgtggaggcaggaccaatatgactgtgctctttggatgatgacattctcatcttcaattttcctgggactggacattggactaattatctcagtagtttctgctttcttcatcaccactgttcgttcacacagagctaagattcttctcctgggtcaaatccctaacaccaacatttatagaagcatcaatgattatcgggagatcatcaccattcctggggtgaaaatcttccagtgctgcagctcaattacatttgtaaatgtttactacctaaagcataagctgttaaaagaggttgatatggtaaaggtgcctcttaaagaagaagaaattttcagcttgtttaattcaagtgacaccaatctacaaggaggaaagatttgcaggtgtttctgcaactgtgatgatctggagccgctgcccaggattctttacacagagcgatttgaaaataaactggatcccgaagcatcctccattaacctgattcactgctcacattttgagagcatgaacacaagccaaactgcatccgaagaccaagtgccatacacagtatcgtccgtgtctcagaaaaatcaagggcaacagtatgaggaggtggaggaagtttggcttcctaataactcatcaagaaacagctcaccaggactgcctgatgtggcggaaagccaggggaggagatcactcatcccttactcagatgcgtctctactgcccagtgtccacaccatcatcctggatttctccatggtacactacgtggattcacgggggttagtcgtattaagacagatatgcaatgcctttcaaaacgccaacattttgatactcattgcagggtgtcactcttccatagtcagggcatttgagaggaatgatttctttgacgctggcatcaccaagacccagctgttcctcagcgttcacgacgccgtgctgtttgccttgtcaaggaaggtcataggctcctctgagttaagcatcgatgaatccgagacagtgatacgggaaacctactcagaaacagacaagaatgacaattcaagatataaaatgagcagcagttttctaggaagccaaaaaaatgtaagtccaggcttcatcaagatccaacagcctgtagaagaggagtcggagttggatttggagctggaatcagaacaagaggctgggctgggtctggacctagacctggatcgggagctggagcctgaaatggagcccaaggctgagaccgagaccaagacccagaccgagatggagccccagcctgagactgagcctgagatggagcccaaccccaaatctaggccaagagctcacacttttcctcagcagcgttactggcctatgtatcatccgtctatggcttccacccagtctcagactcagactcggacatggtcagtggagaggagacgccatcctatggattcatactcaccagagggcaacagcaatgaagatgtctaggagatgaactagaaataaggggtcagataatgctggcaaatcctcctacccaaaaaggggtcaattgtccagagacctagactggatacgaactagcagtacttccttcctgactgtgactcctactacctgccagccttcttccttgctctgcgctgggatcatactcccaaatcacattactaaatgccaacaattatctctgaattccctatccaggctcccctcatttcaccttcagcatatattctagtcatgaatttccttcttcacacaccccacatctctgggctttgtgccagaccatctctaacttaatcctctcatccctgttcccctttctccaaagagatgaagctcaaataaaatgtataactctagtaaca

SEQ ID NO: 4479 - protein, 970 aa, Homo sapiens; identical to SEQ ID NO: 525

SEQ ID NO: 4480 - DNA, 3398 bp, Homo sapiens
ggaaccgccgccggtatccgcgtccgcagcgccgccagccaggcgagagccgtgtgggatcccagcgcccgcactcccgcccccgccaaggagccaggaatggcacaactagagaggagcgccatctctggcttcagctctaagtccaggcgaaactcattcgcatatgatgttaagcgtgaagtatacaatgaggagacctttcaacaggaacacaaaaggaaggcctcctcttctgggaacatgaacatcaacatcaccaccttcagacaccacgtccagtgccgctgctcatggcacaggttcctacgatgcgtgcttacaatctttcccttcctagaatggatgtgtatgtatcgattaaaggattggcttctgggagacttacttgctggtataagtgttggccttgtgcaagttccccaaggcctgacacttagtttgctggcaaggcaactgattcctcctctcaacatcgcttatgcagctttctgttcttcggtaatctatgtaatttttggatcgtgtcatcaaatgtccattggttccttcttcctggtgagtgctctgctgatcaacgttctgaaagtgagcccattcaacaacggtcaactggtcatgggatctttcgtcaagaatgagttttcggccccctcctaccttatgggctataataaatccttgagtgtggtggcaaccacaacttttctgactgggattattcagctaataatgggcgtattgggtttgggcttcattgccacttaccttccggagtctgcaatgagtgcttacctggctgctgtggcacttcatatcatgctgtcccagctgactttcatctttgggattatgattagtttccatgccggtcccatctccttcttctatgacataattaattactgtgtagctctcccaaaagcgaattccaccagcattctagtatttctaactgttgttgttgctctgcgaatcaacaaatgtatcagaatttctttcaatcagtatcccattgagtttcccatggaattatttctgattattggcttcactgtgattgcaaacaagataagcatggccacagaaaccagccagacgcttattgacatgattccttatagctttctgcttcctgtaacaccagatttcagccttcttcccaagataattttacaagccttctccttatctttggtgagctcctttctgctcatatttctgggcaagaagattgccagtcttcacaattacagtgtcaattccaaccaggatttaatagccatcggcctttgcaatgtcgtcagttcatttttcagatcttgtgtgtttactggtgctattgctaggactattatccaggataaatctggaggaagacaacagtttgcatctctggtaggcgcaggtgtgatgctgctcctgatggtgaagatgggacactttttctacacactgccaaatgctgtgctggctggtattattctgagcaacgtcattccctaccttgaaaccatttctaacctacccagcctgtggaggcaggaccaatatgactgtgctctttggatgatgacattctcatcttcaattttcctgggactggacattggactaattatctcagtagtttctgctttcttcatcaccactgttcgttcacacagagctaagattcttctcctgggtcaaatccctaacaccaacatttatagaagcatcaatgattatcgggagatcatcaccattcctggggtgaaaatcttccagtgctgcagctcaattacatttgtaaatgtttactacctaaagcataagctgttaaaagaggttgatatggtaaaggtgcctcttaaagaagaagaaattttcagcttgtttaattcaagtgacaccaatctacaaggaggaaagatttgcaggtgtttctgcaactgtgatgatctggagccgctgcccaggattctttacacagagcgatttgaaaataaactggatcccgaagcatcctccattaacctgattcactgctcacattttgagagcatgaacacaagccaaactgcatccgaagaccaagtgccatacacagtatcgtccgtgtctcagaaaaatcaagggcaacagtatgaggaggtggaggaagtttggcttcctaataactcatcaagaaacagctcaccaggactgcctgatgtggcggaaagccaggggaggagatcactcatcccttactcagatgcgtctctactgcccagtgtccacaccatcatcctggatttctccatggtacactacgtggattcacgggggttagtcgtattaagacagatatgcaatgcctttcaaaacgccaacattttgatactcattgcagggtgtcactcttccatagtcagggcatttgagaggaatgatttctttgacgctggcatcaccaagacccagctgttcctcagcgttcacgacgccgtgctgtttgccttgtcaaggaaggtcataggctcctctgagttaagcatcgatgaatccgagacagtgatacgggaaacctactcagaaacagacaagaatgacaattcaagatataaaatgagcagcagttttctaggaagccaaaaaaatgtaagtccaggcttcatcaagatccaacagcctgtagaagaggagtcggagttggatttggagctggaatcagaacaagaggctgggctgggtctggacctagacctggatcgggagctggagcctgaaatggagcccaaggctgagaccgagaccaagacccagaccgagatggagccccagcctgagactgagcctgagatggagcccaaccccaaatctaggccaagagctcacacttttcctcagcagcgttactggcctatgtatcatccgtctatggcttccacccagtctcagactcagactcggacatggtcagtggagaggagacgccatcctatggattcatactcaccagagggcaacagcaatgaagatgtctaggagatgaactagaaataaggggtcagataatgctggcaaatcctcctacccaaaaaggggtcaattgtccagagacctagactggatacgaactagcagtacttccttcctgactgtgactcctactacctgccagccttcttccttgctctgcgctgggatcatactcccaaatcacattactaaatgccaacaattatctctgaattccctatccaggctcccctcatttcaccttcagcatatattctagtcatgaatttccttcttcacacaccccacatctctgggctttgtgccagaccatctctaacttaatcctctcatccctgttcccctttctccaaagagatgaagctcaaataaaatgtataactctagtaaca

SEQ ID NO: 4481 - protein, 970 aa, Homo sapiens; identical to SEQ ID NO: 525

SEQ ID NO: 4482 - DNA, 2989 bp, Homo sapiens
atgttcaggacacgaggcctggcaccaaataggccctcgatcaagaatagcaaaacctcggagagagaaggagccttggtatacaggtttaccaaataccaaggggatcccacgactcaggtatgaggagggcgacccaggtaccactttcctggctccctagcccagctgctcatgctcctcttcctcgtcccctcccccactctcatctcctcagcccgcccggaacgcccgcgggctaggccacaacggctcgggaaccgccgccggtatccgcgtccgcagcgccgccagccaggcgagagccgtgtgggatcccagcgcccgcactcccgcccccgccaaggagccaggaatggcacaactagagaggagcgccatctctggcttcagctctaagtccaggcgaaactcattcgcatatgatgttaagcgtgaagtatacaatgaggagacctttcaacaggaacacaaaaggaaggcctcctcttctgggaacatgaacatcaacatcaccaccttcagacaccacgtccagtgccgctgctcatggcacaggttcctacgatgcgtgcttacaatctttcccttcctagaatggatgtgtatgtatcgattaaaggattggcttctgggagacttacttgctggtataagtgttggccttgtgcaagttccccaaggcctgacacttagtttgctggcaaggcaactgattcctcctctcaacatcgcttatgcagctttctgttcttcggtaatctatgtaatttttggatcgtgtcatcaaatgtccattggttccttcttcctggtgagtgctctgctgatcaacgttctgaaagtgagcccattcaacaacggtcaactggtcatgggatctttcgtcaagaatgagttttcggccccctcctaccttatgggctataataaatccttgagtgtggtggcaaccacaacttttctgactgggattattcagctaataatgggcgtattgggtttgggcttcattgccacttaccttccggagtctgcaatgagtgcttacctggctgctgtggcacttcatatcatgctgtcccagctgactttcatctttgggattatgattagtttccatgccggtcccatctccttcttctatgacataattaattactgtgtagctctcccaaaagcgaattccaccagcattctagtatttctaactgttgttgttgctctgcgaatcaacaaatgtatcagaatttctttcaatcagtatcccattgagtttcccatggaattatttctgattattggcttcactgtgattgcaaacaagataagcatggccacagaaaccagccagacgcttattgacatgattccttatagctttctgcttcctgtaacaccagatttcagccttcttcccaagataattttacaagccttctccttatctttggtgagctcctttctgctcatatttctgggcaagaagattgccagtcttcacaattacagtgtcaattccaaccaggatttaatagccatcggcctttgcaatgtcgtcagttcatttttcagatcttgtgtgtttactggtgctattgctaggactattatccaggataaatctggaggaagacaacagtttgcatctctggtaggcgcaggtgtgatgctgctcctgatggtgaagatgggacactttttctacacactgccaaatgctgtgctggctggtattattctgagcaacgtcattccctaccttgaaaccatttctaacctacccagcctgtggaggcaggaccaatatgactgtgctctttggatgatgacattctcatcttcaattttcctgggactggacattggactaattatctcagtagtttctgctttcttcatcaccactgttcgttcacacaggtactttgtctcaggtaataggaggttaacaaggcaaggtaagccaactctgacctaaaggcaagtgcatttcctttcagagctaagattcttctcctgggtcaaatccctaacaccaacatttatagaagcatcaatgattatcgggaggtaagaatccaaatgggtcccatttctctgcctaagggatagagtgggccccacctcatgcttagtttttctacaaaatcccttgccattgtttcctgcactgcagatacacatttacaaaggagggggatgtgatgtacactggtagagatgggttctttgtttttatttttttttttggagacagagtcttgctctgtcacccaagctggacagtacagtgcagtggcttgatcttggcttactgcaacctccacctgccaggttcaagcaattctcctgcctcagcctccccagtagctgggattacaggcgtgccccatcatacctggctaattttttgtattttagtaaagacagggtctcaccatgttgcccaggctggtcttggactcctgagctcagtcaatctgcttgcctcagccttctagagtgctaggattacaggcatgactcaacacacccagccaagacgggttcttaagtagctaaattcttatagtattgcagccagttaaagatcatttgtaaatgtactttaaggagagtttggccaagaaaaaggaaatgaagggagaaagaagacagcaggaaaagcagagggtgaaaatgggaggaaataattttctagttcttgtctctaataaagaagaatacaggctgggtgtgttggctcacacctgtaattccagcactttgggaggccaggcatttgagaccagcgtggccaacatggtgaaaccccgtatctactaaaaatacaaaaattagcagggcgtgatggcaggtgcctgtaatcccagctactcaagaggctgaggcaggagaattgcttgaacccgagaggcggaggttgcagtgagccaagatcgcgccattgcactccagcctgggcaacagagtgagactctgtctc

SEQ ID NO: 4483 - protein, 541 aa, Homo sapiens
MAQLERSAISGFSSKSRRNSFAYDVKREVYNEETFQQEHKRKASSSGNMNINITTFRHHVQCRCSWHRFLRCVLTIFPFLEWMCMYRLKDWLLGDLLAGISVGLVQVPQGLTLSLLARQLIPPLNIAYAAFCSSVIYVIFGSCHQMSIGSFFLVSALLINVLKVSPFNNGQLVMGSFVKNEFSAPSYLMGYNKSLSVVATTTFLTGIIQLIMGVLGLGFIATYLPESAMSAYLAAVALHIMLSQLTFIFGIMISFHAGPISFFYDIINYCVALPKANSTSILVFLTVVVALRINKCIRISFNQYPIEFPMELFLIIGFTVIANKISMATETSQTLIDMIPYSFLLPVTPDFSLLPKIILQAFSLSLVSSFLLIFLGKKIASLHNYSVNSNQDLIAIGLCNVVSSFFRSCVFTGAIARTIIQDKSGGRQQFASLVGAGVMLLLMVKMGHFFYTLPNAVLAGIILSNVIPYLETISNLPSLWRQDQYDCALWMMTFSSSIFLGLDIGLIISVVSAFFITTVRSHRYFVSGNRRLTRQGKPTLT

SEQ ID NO: 4484 - DNA, 1386 bp, Homo sapiens
aatctcggctctcggagagtcccgggagctgttctcgcgagagtactgcgggaggctcccgtttgctggctcttggaaccgcgaccactggagccttagcgggcgcagcagctggaacgggagtactgcgacgcagcccggagtcggccttgtaggggcgaaggtgcagggagatcgcggcgggcgcagtcttgagcgccggagcgcgtccctgcccttagcggggcttgccccagtcgcaggggcacatccagccgctgcggctgacagcagccgcgcgcgcgggagtctgcggggtcgcggcagccgcacctgcgcgggcgaccagcgcaaggtccccgcccggctgggcgggcagcaagggccggggagagggtgcgggtgcaggcgggggccccacagggccaccttcttgcccggcggctgccgctggaaaatgtctcaggagaggcccacgttctaccggcaggagctgaacaagacaatctgggaggtgcccgagcgttaccagaacctgtctccagtgggctctggcgcctatggctctgtgtgtgctgcttttgacacaaaaacggggttacgtgtggcagtgaagaagctctccagaccatttcagtccatcattcatgcgaaaagaacctacagagaactgcggttacttaaacatatgaaacatgaaaatgtgattggtctgttggacgtttttacacctgcaaggtctctggaggaattcaatgatgtgtatctggtgacccatctcatgggggcagatctgaacaacattgtgaaatgtcagaagcttacagatgaccatgttcagttccttatctaccaaattctccgaggtctaaagtatatacattcagctgacataattcacagggacctaaaacctagtaatctagctgtgaatgaagactgtgagctgaagattctggattttggactggctcggcacacagatgatgaaatgacaggctacgtggccactaggtggtacagggctcctgagatcatgctgaactggatgcattacaaccagacagttgatatttggtcagtgggatgcataatggccgagctgttgactggaagaacattgtttcctggtacagaccatattgatcagttgaagctcattttaagactcgttggaaccccaggggctgagcttttgaagaaaatctcctcagagtctgcaagaaactatattcagtctttgactcagatgccgaagatgaactttgcgaatgtatttattggtgccaatcccctgggtaagttgaccatatatcctcacctcatggatattgaattggttatgatataaattggggatttgaagaagagtttctccttttgaccaaataaagtaccattagttga

SEQ ID NO: 4485 - protein, 297 aa, Homo sapiens; identical to SEQ ID NO: 533

SEQ ID NO: 4486 - DNA, 1604 bp, Homo sapiens
aatctcggctctcggagagtcccgggagctgttctcgcgagagtactgcgggaggctcccgtttgctggctcttggaaccgcgaccactggagccttagcgggcgcagcagctggaacgggagtactgcgacgcagcccggagtcggccttgtaggggcgaaggtgcagggagatcgcggcgggcgcagtcttgagcgccggagcgcgtccctgcccttagcggggcttgccccagtcgcaggggcacatccagccgctgcggctgacagcagccgcgcgcgcgggagtctgcggggtcgcggcagccgcacctgcgcgggcgaccagcgcaaggtccccgcccggctgggcgggcagcaagggccggggagagggtgcgggtgcaggcgggggccccacagggccaccttcttgcccggcggctgccgctggaaaatgtctcaggagaggcccacgttctaccggcaggagctgaacaagacaatctgggaggtgcccgagcgttaccagaacctgtctccagtgggctctggcgcctatggctctgtgtgtgctgcttttgacacaaaaacggggttacgtgtggcagtgaagaagctctccagaccatttcagtccatcattcatgcgaaaagaacctacagagaactgcggttacttaaacatatgaaacatgaaaatgtgattggtctgttggacgtttttacacctgcaaggtctctggaggaattcaatgatgtgtatctggtgacccatctcatgggggcagatctgaacaacattgtgaaatgtcagaagcttacagatgaccatgttcagttccttatctaccaaattctccgaggtctaaagtatatacattcagctgacataattcacagggacctaaaacctagtaatctagctgtgaatgaagactgtgagctgaagattctggattttggactggctcggcacacagatgatgaaatgacaggctacgtggccactaggtggtacagggctcctgagatcatgctgaactggatgcattacaaccagacagttgatatttggtcagtgggatgcataatggccgagctgttgactggaagaacattgtttcctggtacagaccatattgatcagttgaagctcattttaagactcgttggaaccccaggggctgagcttttgaagaaaatctcctcagagtctgcaagaaactatattcagtctttgactcagatgccgaagatgaactttgcgaatgtatttattggtgccaatcccctggctgtcgacttgctggagaagatgcttgtattggactcagataagagaattacagcggcccaagcccttgcacatgcctactttgctcagtaccacgatcctgatgatgaaccagtggccgatccttatgatcagtcctttgaaagcagggacctccttatagatgagtggaaaagcctgacctatgatgaagtcatcagctttgtgccaccaccccttgaccaagaagagatggagtcctgagcacctggtttctgttctgttgatcccacttcactgtgaggggaaggccttttcacgggaactctccaaatattattcaagtgcc

SEQ ID NO: 4487 - protein, 360 aa, Homo sapiens; identical to SEQ ID NO: 531

SEQ ID NO: 4488 - DNA, 3830 bp, Homo sapiens
aatctcggctctcggagagtcccgggagctgttctcgcgagagtactgcgggaggctcccgtttgctggctcttggaaccgcgaccactggagccttagcgggcgcagcagctggaacgggagtactgcgacgcagcccggagtcggccttgtaggggcgaaggtgcagggagatcgcggcgggcgcagtcttgagcgccggagcgcgtccctgcccttagcggggcttgccccagtcgcaggggcacatccagccgctgcggctgacagcagccgcgcgcgcgggagtctgcggggtcgcggcagccgcacctgcgcgggcgaccagcgcaaggtccccgcccggctgggcgggcagcaagggccggggagagggtgcgggtgcaggcgggggccccacagggccaccttcttgcccggcggctgccgctggaaaatgtctcaggagaggcccacgttctaccggcaggagctgaacaagacaatctgggaggtgcccgagcgttaccagaacctgtctccagtgggctctggcgcctatggctctgtgtgtgctgcttttgacacaaaaacggggttacgtgtggcagtgaagaagctctccagaccatttcagtccatcattcatgcgaaaagaacctacagagaactgcggttacttaaacatatgaaacatgaaaatgtgattggtctgttggacgtttttacacctgcaaggtctctggaggaattcaatgatgtgtatctggtgacccatctcatgggggcagatctgaacaacattgtgaaatgtcagaagcttacagatgaccatgttcagttccttatctaccaaattctccgaggtctaaagtatatacattcagctgacataattcacagggacctaaaacctagtaatctagctgtgaatgaagactgtgagctgaagattctggattttggactggctcggcacacagatgatgaaatgacaggctacgtggccactaggtggtacagggctcctgagatcatgctgaactggatgcattacaaccagacagttgatatttggtcagtgggatgcataatggccgagctgttgactggaagaacattgtttcctggtacagaccatattaaccagcttcagcagattatgcgtctgacaggaacaccccccgcttatctcattaacaggatgccaagccatgaggcaagaaactatattcagtctttgactcagatgccgaagatgaactttgcgaatgtatttattggtgccaatcccctggctgtcgacttgctggagaagatgcttgtattggactcagataagagaattacagcggcccaagcccttgcacatgcctactttgctcagtaccacgatcctgatgatgaaccagtggccgatccttatgatcagtcctttgaaagcagggacctccttatagatgagtggaaaagcctgacctatgatgaagtcatcagctttgtgccaccaccccttgaccaagaagagatggagtcctgagcacctggtttctgttctgttgatcccacttcactgtgaggggaaggccttttcacgggaactctccaaatattattcaagtgcctcttgttgcagagatttcctccatggtggaagggggtgtgcgtgcgtgtgcgtgcgtgttagtgtgtgtgcatgtgtgtgtctgtctttgtgggagggtaagacaatatgaacaaactatgatcacagtgactttacaggaggttgtggatgctccagggcagcctccaccttgctcttctttctgagagttggctcaggcagacaagagctgctgtccttttaggaatatgttcaatgcaaagtaaaaaaatatgaattgtccccaatcccggtcatgcttttgccactttggcttctcctgtgaccccaccttgacggtggggcgtagacttgacaacatcccacagtggcacggagagaaggcccataccttctggttgcttcagacctgacaccgtccctcagtgatacgtacagccaaaaaggaccaactggcttctgtgcactagcctgtgattaacttgcttagtatggttctcagatcttgacagtatatttgaaactgtaaatatgtttgtgccttaaaaggagagaagaaagtgtagatagttaaaagactgcagctgctgaagttctgagccgggcaagtcgagagggctgttggacagctgcttgtgggcccggagtaatcaggcagccttcataggcggtcatgtgtgcatgtgagcacatgcgtatatgtgcgtctctctttctccctcacccccaggtgttgccatttctctgcttacccttcacctttggtgcagaggtttcttgaatatctgccccagtagtcagaagcaggttcttgatgtcatgtacttcctgtgtactctttatttctagcagagtgaggatgtgttttgcacgtcttgctatttgagcatgcacagctgcttgtcctgctctcttcaggaggccctggtgtcaggcaggtttgccagtgaagacttcttgggtagtttagatcccatgtcacctcagctgatattatggcaagtgatatcacctctcttcagcccctagtgctattctgtgttgaacacaattgatacttcaggtgcttttgatgtgaaaatcatgaaaagaggaacaggtggatgtatagcatttttattcatgccatctgttttcaaccaactatttttgaggaattatcatgggaaaagaccagggcttttcccaggaatatcccaaacttcggaaacaagttattctcttcactcccaataactaatgctaagaaatgctgaaaatcaaagtaaaaaattaaagcccataaggccagaaactccttttgctgtctttctctaaatatgattactttaaaataaaaaagtaacaaggtgtcttttccactcctatggaaaagggtcttcttggcagcttaacattgacttcttggtttggggagaaataaattttgtttcagaattttgtatattgtaggaatcctttgagaatgtgattccttttgatggggagaaagggcaaattattttaatattttgtattttcaactttataaagataaaatatcctcaggggtggagaagtgtcgttttcataacttgctgaatttcaggcattttgttctacatgaggactcatatatttaagccttttgtgtaataagaaagtataaagtcacttccagtgttggctgtgtgacagaatcttgtatttgggccaaggtgtttccatttctcaatcagtgcagtgatacatgtactccagagggacagggtggaccccctgagtcaactggagcaagaaggaaggaggcagactgatggcgattccctctcacccgggactctccccctttcaaggaaagtgaacctttaaagtaaaggcctcatctcctttattgcagttcaaatcctcaccatccacagcaagatgaattttatcagccatgtttggttgtaaatgctcgtgtgatttcctacagaaatactgctctgaatattttgtaataaaggtctttgcacatgtgaccacatacgtgttaggaggctgcatgctctggaagcctggactctaagctggagctcttggaagagctcttcggtttctgagcataatgctcccatctcctgatttctctgaacagaaaacaaaagagagaatgagggaaattgctattttatttgtattcatgaacttggctgtaatcagttatgccgtataggatgtcagacaataccactggttaaaataaagcctatttttcaaattt

SEQ ID NO: 4489 - protein, 360 aa, Homo sapiens; identical to SEQ ID NO: 529

SEQ ID NO: 4490 - DNA, 3751 bp, Homo sapiens
aatctcggctctcggagagtcccgggagctgttctcgcgagagtactgcgggaggctcccgtttgctggctcttggaaccgcgaccactggagccttagcgggcgcagcagctggaacgggagtactgcgacgcagcccggagtcggccttgtaggggcgaaggtgcagggagatcgcggcgggcgcagtcttgagcgccggagcgcgtccctgcccttagcggggcttgccccagtcgcaggggcacatccagccgctgcggctgacagcagccgcgcgcgcgggagtctgcggggtcgcggcagccgcacctgcgcgggcgaccagcgcaaggtccccgcccggctgggcgggcagcaagggccggggagagggtgcgggtgcaggcgggggccccacagggccaccttcttgcccggcggctgccgctggaaaatgtctcaggagaggcccacgttctaccggcaggagctgaacaagacaatctgggaggtgcccgagcgttaccagaacctgtctccagtgggctctggcgcctatggctctgtgtgtgctgcttttgacacaaaaacggggttacgtgtggcagtgaagaagctctccagaccatttcagtccatcattcatgcgaaaagaacctacagagaactgcggttacttaaacatatgaaacatgaaaatgtgattggtctgttggacgtttttacacctgcaaggtctctggaggaattcaatgatgtgtatctggtgacccatctcatgggggcagatctgaacaacattgtgaaatgtcagaagcttacagatgaccatgttcagttccttatctaccaaattctccgaggtctaaagtatatacattcagctgacataattcacagggacctaaaacctagtaatctagctgtgaatgaagactgtgagctgaagattctggattttggactggctcggcacacagatgatgaaatgacaggctacgtggccactaggtggtacagggctcctgagatcatgctgaactggatgcattacaaccagacagttgatatttggtcagtgggatgcataatggccgagctgttgactggaagaacattgtttcctggtacagaccatattgatcagttgaagctcattttaagactcgttggaaccccaggggctgagcttttgaagaaaatctcctcagagtctctgtcgacttgctggagaagatgcttgtattggactcagataagagaattacagcggcccaagcccttgcacatgcctactttgctcagtaccacgatcctgatgatgaaccagtggccgatccttatgatcagtcctttgaaagcagggacctccttatagatgagtggaaaagcctgacctatgatgaagtcatcagctttgtgccaccaccccttgaccaagaagagatggagtcctgagcacctggtttctgttctgttgatcccacttcactgtgaggggaaggccttttcacgggaactctccaaatattattcaagtgcctcttgttgcagagatttcctccatggtggaagggggtgtgcgtgcgtgtgcgtgcgtgttagtgtgtgtgcatgtgtgtgtctgtctttgtgggagggtaagacaatatgaacaaactatgatcacagtgactttacaggaggttgtggatgctccagggcagcctccaccttgctcttctttctgagagttggctcaggcagacaagagctgctgtccttttaggaatatgttcaatgcaaagtaaaaaaatatgaattgtccccaatcccggtcatgcttttgccactttggcttctcctgtgaccccaccttgacggtggggcgtagacttgacaacatcccacagtggcacggagagaaggcccataccttctggttgcttcagacctgacaccgtccctcagtgatacgtacagccaaaaaggaccaactggcttctgtgcactagcctgtgattaacttgcttagtatggttctcagatcttgacagtatatttgaaactgtaaatatgtttgtgccttaaaaggagagaagaaagtgtagatagttaaaagactgcagctgctgaagttctgagccgggcaagtcgagagggctgttggacagctgcttgtgggcccggagtaatcaggcagccttcataggcggtcatgtgtgcatgtgagcacatgcgtatatgtgcgtctctctttctccctcacccccaggtgttgccatttctctgcttacccttcacctttggtgcagaggtttcttgaatatctgccccagtagtcagaagcaggttcttgatgtcatgtacttcctgtgtactctttatttctagcagagtgaggatgtgttttgcacgtcttgctatttgagcatgcacagctgcttgtcctgctctcttcaggaggccctggtgtcaggcaggtttgccagtgaagacttcttgggtagtttagatcccatgtcacctcagctgatattatggcaagtgatatcacctctcttcagcccctagtgctattctgtgttgaacacaattgatacttcaggtgcttttgatgtgaaaatcatgaaaagaggaacaggtggatgtatagcatttttattcatgccatctgttttcaaccaactatttttgaggaattatcatgggaaaagaccagggcttttcccaggaatatcccaaacttcggaaacaagttattctcttcactcccaataactaatgctaagaaatgctgaaaatcaaagtaaaaaattaaagcccataaggccagaaactccttttgctgtctttctctaaatatgattactttaaaataaaaaagtaacaaggtgtcttttccactcctatggaaaagggtcttcttggcagcttaacattgacttcttggtttggggagaaataaattttgtttcagaattttgtatattgtaggaatcctttgagaatgtgattccttttgatggggagaaagggcaaattattttaatattttgtattttcaactttataaagataaaatatcctcaggggtggagaagtgtcgttttcataacttgctgaatttcaggcattttgttctacatgaggactcatatatttaagccttttgtgtaataagaaagtataaagtcacttccagtgttggctgtgtgacagaatcttgtatttgggccaaggtgtttccatttctcaatcagtgcagtgatacatgtactccagagggacagggtggaccccctgagtcaactggagcaagaaggaaggaggcagactgatggcgattccctctcacccgggactctccccctttcaaggaaagtgaacctttaaagtaaaggcctcatctcctttattgcagttcaaatcctcaccatccacagcaagatgaattttatcagccatgtttggttgtaaatgctcgtgtgatttcctacagaaatactgctctgaatattttgtaataaaggtctttgcacatgtgaccacatacgtgttaggaggctgcatgctctggaagcctggactctaagctggagctcttggaagagctcttcggtttctgagcataatgctcccatctcctgatttctctgaacagaaaacaaaagagagaatgagggaaattgctattttatttgtattcatgaacttggctgtaatcagttatgccgtataggatgtcagacaataccactggttaaaataaagcctatttttcaaattt

SEQ ID NO: 4491 - protein, 307 aa, Homo sapiens; identical to SEQ ID NO: 535

SEQ ID NO: 4492 - DNA, 3830 bp, Homo sapiens
aatctcggctctcggagagtcccgggagctgttctcgcgagagtactgcgggaggctcccgtttgctggctcttggaaccgcgaccactggagccttagcgggcgcagcagctggaacgggagtactgcgacgcagcccggagtcggccttgtaggggcgaaggtgcagggagatcgcggcgggcgcagtcttgagcgccggagcgcgtccctgcccttagcggggcttgccccagtcgcaggggcacatccagccgctgcggctgacagcagccgcgcgcgcgggagtctgcggggtcgcggcagccgcacctgcgcgggcgaccagcgcaaggtccccgcccggctgggcgggcagcaagggccggggagagggtgcgggtgcaggcgggggccccacagggccaccttcttgcccggcggctgccgctggaaaatgtctcaggagaggcccacgttctaccggcaggagctgaacaagacaatctgggaggtgcccgagcgttaccagaacctgtctccagtgggctctggcgcctatggctctgtgtgtgctgcttttgacacaaaaacggggttacgtgtggcagtgaagaagctctccagaccatttcagtccatcattcatgcgaaaagaacctacagagaactgcggttacttaaacatatgaaacatgaaaatgtgattggtctgttggacgtttttacacctgcaaggtctctggaggaattcaatgatgtgtatctggtgacccatctcatgggggcagatctgaacaacattgtgaaatgtcagaagcttacagatgaccatgttcagttccttatctaccaaattctccgaggtctaaagtatatacattcagctgacataattcacagggacctaaaacctagtaatctagctgtgaatgaagactgtgagctgaagattctggattttggactggctcggcacacagatgatgaaatgacaggctacgtggccactaggtggtacagggctcctgagatcatgctgaactggatgcattacaaccagacagttgatatttggtcagtgggatgcataatggccgagctgttgactggaagaacattgtttcctggtacagaccatattgatcagttgaagctcattttaagactcgttggaaccccaggggctgagcttttgaagaaaatctcctcagagtctgcaagaaactatattcagtctttgactcagatgccgaagatgaactttgcgaatgtatttattggtgccaatcccctggctgtcgacttgctggagaagatgcttgtattggactcagataagagaattacagcggcccaagcccttgcacatgcctactttgctcagtaccacgatcctgatgatgaaccagtggccgatccttatgatcagtcctttgaaagcagggacctccttatagatgagtggaaaagcctgacctatgatgaagtcatcagctttgtgccaccaccccttgaccaagaagagatggagtcctgagcacctggtttctgttctgttgatcccacttcactgtgaggggaaggccttttcacgggaactctccaaatattattcaagtgcctcttgttgcagagatttcctccatggtggaagggggtgtgcgtgcgtgtgcgtgcgtgttagtgtgtgtgcatgtgtgtgtctgtctttgtgggagggtaagacaatatgaacaaactatgatcacagtgactttacaggaggttgtggatgctccagggcagcctccaccttgctcttctttctgagagttggctcaggcagacaagagctgctgtccttttaggaatatgttcaatgcaaagtaaaaaaatatgaattgtccccaatcccggtcatgcttttgccactttggcttctcctgtgaccccaccttgacggtggggcgtagacttgacaacatcccacagtggcacggagagaaggcccataccttctggttgcttcagacctgacaccgtccctcagtgatacgtacagccaaaaaggaccaactggcttctgtgcactagcctgtgattaacttgcttagtatggttctcagatcttgacagtatatttgaaactgtaaatatgtttgtgccttaaaaggagagaagaaagtgtagatagttaaaagactgcagctgctgaagttctgagccgggcaagtcgagagggctgttggacagctgcttgtgggcccggagtaatcaggcagccttcataggcggtcatgtgtgcatgtgagcacatgcgtatatgtgcgtctctctttctccctcacccccaggtgttgccatttctctgcttacccttcacctttggtgcagaggtttcttgaatatctgccccagtagtcagaagcaggttcttgatgtcatgtacttcctgtgtactctttatttctagcagagtgaggatgtgttttgcacgtcttgctatttgagcatgcacagctgcttgtcctgctctcttcaggaggccctggtgtcaggcaggtttgccagtgaagacttcttgggtagtttagatcccatgtcacctcagctgatattatggcaagtgatatcacctctcttcagcccctagtgctattctgtgttgaacacaattgatacttcaggtgcttttgatgtgaaaatcatgaaaagaggaacaggtggatgtatagcatttttattcatgccatctgttttcaaccaactatttttgaggaattatcatgggaaaagaccagggcttttcccaggaatatcccaaacttcggaaacaagttattctcttcactcccaataactaatgctaagaaatgctgaaaatcaaagtaaaaaattaaagcccataaggccagaaactccttttgctgtctttctctaaatatgattactttaaaataaaaaagtaacaaggtgtcttttccactcctatggaaaagggtcttcttggcagcttaacattgacttcttggtttggggagaaataaattttgtttcagaattttgtatattgtaggaatcctttgagaatgtgattccttttgatggggagaaagggcaaattattttaatattttgtattttcaactttataaagataaaatatcctcaggggtggagaagtgtcgttttcataacttgctgaatttcaggcattttgttctacatgaggactcatatatttaagccttttgtgtaataagaaagtataaagtcacttccagtgttggctgtgtgacagaatcttgtatttgggccaaggtgtttccatttctcaatcagtgcagtgatacatgtactccagagggacagggtggaccccctgagtcaactggagcaagaaggaaggaggcagactgatggcgattccctctcacccgggactctccccctttcaaggaaagtgaacctttaaagtaaaggcctcatctcctttattgcagttcaaatcctcaccatccacagcaagatgaattttatcagccatgtttggttgtaaatgctcgtgtgatttcctacagaaatactgctctgaatattttgtaataaaggtctttgcacatgtgaccacatacgtgttaggaggctgcatgctctggaagcctggactctaagctggagctcttggaagagctcttcggtttctgagcataatgctcccatctcctgatttctctgaacagaaaacaaaagagagaatgagggaaattgctattttatttgtattcatgaacttggctgtaatcagttatgccgtataggatgtcagacaataccactggttaaaataaagcctatttttcaaattt

SEQ ID NO: 4493 - protein, 360 aa, Homo sapiens; identical to SEQ ID NO: 531

SEQ ID NO: 4494 - DNA, 4308 bp, Homo sapiens
aatctcggctctcggagagtcccgggagctgttctcgcgagagtactgcgggaggctcccgtttgctggctcttggaaccgcgaccactggagccttagcgggcgcagcagctggaacgggagtactgcgacgcagcccggagtcggccttgtaggggcgaaggtgcagggagatcgcggcgggcgcagtcttgagcgccggagcgcgtccctgcccttagcggggcttgccccagtcgcaggggcacatccagccgctgcggctgacagcagccgcgcgcgcgggagtctgcggggtcgcggcagccgcacctgcgcgggcgaccagcgcaaggtccccgcccggctgggcgggcagcaagggccggggagagggtgcgggtgcaggcgggggccccacagggccaccttcttgcccggcggctgccgctggaaaatgtctcaggagaggcccacgttctaccggcaggagctgaacaagacaatctgggaggtgcccgagcgttaccagaacctgtctccagtgggctctggcgcctatggctctgtgtgtgctgcttttgacacaaaaacggggttacgtgtggcagtgaagaagctctccagaccatttcagtccatcattcatgcgaaaagaacctacagagaactgcggttacttaaacatatgaaacatgaaaatgtgattggtctgttggacgtttttacacctgcaaggtctctggaggaattcaatgatgtgtatctggtgacccatctcatgggggcagatctgaacaacattgtgaaatgtcagaagcttacagatgaccatgttcagttccttatctaccaaattctccgaggtctaaagtatatacattcagctgacataattcacagggacctaaaacctagtaatctagctgtgaatgaagactgtgagctgaagattctggattttggactggctcggcacacagatgatgaaatgacaggctacgtggccactaggtggtacagggctcctgagatcatgctgaactggatgcattacaaccagacagttgatatttggtcagtgggatgcataatggccgagctgttgactggaagaacattgtttcctggtacagaccatattaaccagcttcagcagattatgcgtctgacaggaacaccccccgcttatctcattaacaggatgccaagccatgaggcaagaaactatattcagtctttgactcagatgccgaagatgaactttgcgaatgtatttattggtgccaatcccctggctgtcgacttgctggagaagatgcttgtattggactcagataagagaattacagcggcccaagcccttgcacatgcctactttgctcagtaccacgatcctgatgatgaaccagtggccgatccttatgatcagtcctttgaaagcagggacctccttatagatgagtggaaaagcctgacctatgatgaagtcatcagctttgtgccaccaccccttgaccaagaagagatggagtcctgagcacctggtttctgttctgttgatcccacttcactgtgaggggaaggccttttcacgggaactctccaaatattattcaagtgcctcttgttgcagagatttcctccatggtggaagggggtgtgcgtgcgtgtgcgtgcgtgttagtgtgtgtgcatgtgtgtgtctgtctttgtgggagggtaagacaatatgaacaaactatgatcacagtgactttacaggaggttgtggatgctccagggcagcctccaccttgctcttctttctgagagttggctcaggcagacaagagctgctgtccttttaggaatatgttcaatgcaaagtaaaaaaatatgaattgtccccaatcccggtcatgcttttgccactttggcttctcctgtgaccccaccttgacggtggggcgtagacttgacaacatcccacagtggcacggagagaaggcccataccttctggttgcttcagacctgacaccgtccctcagtgatacgtacagccaaaaaggaccaactggcttctgtgcactagcctgtgattaacttgcttagtatggttctcagatcttgacagtatatttgaaactgtaaatatgtttgtgccttaaaaggagagaagaaagtgtagatagttaaaagactgcagctgctgaagttctgagccgggcaagtcgagagggctgttggacagctgcttgtgggcccggagtaatcaggcagccttcataggcggtcatgtgtgcatgtgagcacatgcgtatatgtgcgtctctctttctccctcacccccaggtgttgccatttctctgcttacccttcacctttggtgcagaggtttcttgaatatctgccccagtagtcagaagcaggttcttgatgtcatgtacttcctgtgtactctttatttctagcagagtgaggatgtgttttgcacgtcttgctatttgagcatgcacagctgcttgtcctgctctcttcaggaggccctggtgtcaggcaggtttgccagtgaagacttcttgggtagtttagatcccatgtcacctcagctgatattatggcaagtgatatcacctctcttcagcccctagtgctattctgtgttgaacacaattgatacttcaggtgcttttgatgtgaaaatcatgaaaagaggaacaggtggatgtatagcatttttattcatgccatctgttttcaaccaactatttttgaggaattatcatgggaaaagaccagggcttttcccaggaatatcccaaacttcggaaacaagttattctcttcactcccaataactaatgctaagaaatgctgaaaatcaaagtaaaaaattaaagcccataaggccagaaactccttttgctgtctttctctaaatatgattactttaaaataaaaaagtaacaaggtgtcttttccactcctatggaaaagggtcttcttggcagcttaacattgacttcttggtttggggagaaataaattttgtttcagaattttgtatattgtaggaatcctttgagaatgtgattccttttgatggggagaaagggcaaattattttaatattttgtattttcaactttataaagataaaatatcctcaggggtggagaagtgtcgttttcataacttgctgaatttcaggcattttgttctacatgaggactcatatatttaagccttttgtgtaataagaaagtataaagtcacttccagtgttggctgtgtgacagaatcttgtatttgggccaaggtgtttccatttctcaatcagtgcagtgatacatgtactccagagggacagggtggaccccctgagtcaactggagcaagaaggaaggaggcagactgatggcgattccctctcacccgggactctccccctttcaaggaaagtgaacctttaaagtaaaggcctcatctcctttattgcagttcaaatcctcaccatccacagcaagatgaattttatcagccatgtttggttgtaaatgctcgtgtgatttcctacagaaatactgctctgaatattttgtaataaaggtctttgcacatgtgaccacatacgtgttaggaggctgcatgctctggaagcctggactctaagctggagctcttggaagagctcttcggtttctgagcataatgctcccatctcctgatttctctgaacagaaaacaaaagagagaatgagggaaattgctattttatttgtattcatgaacttggctgtaatcagttatgccgtataggatgtcagacaataccactggttaaaataaagcctatttttcaaatttagtgagtttctcaagtttattatatttttctcttgtttttatttaatgcacaatatggcattatatcaatatcctttaaactgtgacctggcatacttgtctgacagatcttaatactactcctaacatttagaaaatgttgataaagcttcttagttgtacattttttggtgaagagtatccaggtctttgctgtggatgggtaaagcaaagagcaaatgaacgaagtattaagcattggggcctgtcttatctacactcgagtgtaagagtggccgaaatgacagggctcagcagactgtggcctgagggccaaatctggcccaccacctgtttggtgtagcctgctaagaatggcttttacatttttaaatggttgggaaagaaaaaaaaagaagtagtagattttgtagcatgtgatgtaagtaatgtaaaacttaaattccagtatccataaataaagttttatgagaacaga

SEQ ID NO: 4495 - protein, 360 aa, Homo sapiens; identical to SEQ ID NO: 529

SEQ ID NO: 4496 - DNA, 4229 bp, Homo sapiens
aatctcggctctcggagagtcccgggagctgttctcgcgagagtactgcgggaggctcccgtttgctggctcttggaaccgcgaccactggagccttagcgggcgcagcagctggaacgggagtactgcgacgcagcccggagtcggccttgtaggggcgaaggtgcagggagatcgcggcgggcgcagtcttgagcgccggagcgcgtccctgcccttagcggggcttgccccagtcgcaggggcacatccagccgctgcggctgacagcagccgcgcgcgcgggagtctgcggggtcgcggcagccgcacctgcgcgggcgaccagcgcaaggtccccgcccggctgggcgggcagcaagggccggggagagggtgcgggtgcaggcgggggccccacagggccaccttcttgcccggcggctgccgctggaaaatgtctcaggagaggcccacgttctaccggcaggagctgaacaagacaatctgggaggtgcccgagcgttaccagaacctgtctccagtgggctctggcgcctatggctctgtgtgtgctgcttttgacacaaaaacggggttacgtgtggcagtgaagaagctctccagaccatttcagtccatcattcatgcgaaaagaacctacagagaactgcggttacttaaacatatgaaacatgaaaatgtgattggtctgttggacgtttttacacctgcaaggtctctggaggaattcaatgatgtgtatctggtgacccatctcatgggggcagatctgaacaacattgtgaaatgtcagaagcttacagatgaccatgttcagttccttatctaccaaattctccgaggtctaaagtatatacattcagctgacataattcacagggacctaaaacctagtaatctagctgtgaatgaagactgtgagctgaagattctggattttggactggctcggcacacagatgatgaaatgacaggctacgtggccactaggtggtacagggctcctgagatcatgctgaactggatgcattacaaccagacagttgatatttggtcagtgggatgcataatggccgagctgttgactggaagaacattgtttcctggtacagaccatattgatcagttgaagctcattttaagactcgttggaaccccaggggctgagcttttgaagaaaatctcctcagagtctctgtcgacttgctggagaagatgcttgtattggactcagataagagaattacagcggcccaagcccttgcacatgcctactttgctcagtaccacgatcctgatgatgaaccagtggccgatccttatgatcagtcctttgaaagcagggacctccttatagatgagtggaaaagcctgacctatgatgaagtcatcagctttgtgccaccaccccttgaccaagaagagatggagtcctgagcacctggtttctgttctgttgatcccacttcactgtgaggggaaggccttttcacgggaactctccaaatattattcaagtgcctcttgttgcagagatttcctccatggtggaagggggtgtgcgtgcgtgtgcgtgcgtgttagtgtgtgtgcatgtgtgtgtctgtctttgtgggagggtaagacaatatgaacaaactatgatcacagtgactttacaggaggttgtggatgctccagggcagcctccaccttgctcttctttctgagagttggctcaggcagacaagagctgctgtccttttaggaatatgttcaatgcaaagtaaaaaaatatgaattgtccccaatcccggtcatgcttttgccactttggcttctcctgtgaccccaccttgacggtggggcgtagacttgacaacatcccacagtggcacggagagaaggcccataccttctggttgcttcagacctgacaccgtccctcagtgatacgtacagccaaaaaggaccaactggcttctgtgcactagcctgtgattaacttgcttagtatggttctcagatcttgacagtatatttgaaactgtaaatatgtttgtgccttaaaaggagagaagaaagtgtagatagttaaaagactgcagctgctgaagttctgagccgggcaagtcgagagggctgttggacagctgcttgtgggcccggagtaatcaggcagccttcataggcggtcatgtgtgcatgtgagcacatgcgtatatgtgcgtctctctttctccctcacccccaggtgttgccatttctctgcttacccttcacctttggtgcagaggtttcttgaatatctgccccagtagtcagaagcaggttcttgatgtcatgtacttcctgtgtactctttatttctagcagagtgaggatgtgttttgcacgtcttgctatttgagcatgcacagctgcttgtcctgctctcttcaggaggccctggtgtcaggcaggtttgccagtgaagacttcttgggtagtttagatcccatgtcacctcagctgatattatggcaagtgatatcacctctcttcagcccctagtgctattctgtgttgaacacaattgatacttcaggtgcttttgatgtgaaaatcatgaaaagaggaacaggtggatgtatagcatttttattcatgccatctgttttcaaccaactatttttgaggaattatcatgggaaaagaccagggcttttcccaggaatatcccaaacttcggaaacaagttattctcttcactcccaataactaatgctaagaaatgctgaaaatcaaagtaaaaaattaaagcccataaggccagaaactccttttgctgtctttctctaaatatgattactttaaaataaaaaagtaacaaggtgtcttttccactcctatggaaaagggtcttcttggcagcttaacattgacttcttggtttggggagaaataaattttgtttcagaattttgtatattgtaggaatcctttgagaatgtgattccttttgatggggagaaagggcaaattattttaatattttgtattttcaactttataaagataaaatatcctcaggggtggagaagtgtcgttttcataacttgctgaatttcaggcattttgttctacatgaggactcatatatttaagccttttgtgtaataagaaagtataaagtcacttccagtgttggctgtgtgacagaatcttgtatttgggccaaggtgtttccatttctcaatcagtgcagtgatacatgtactccagagggacagggtggaccccctgagtcaactggagcaagaaggaaggaggcagactgatggcgattccctctcacccgggactctccccctttcaaggaaagtgaacctttaaagtaaaggcctcatctcctttattgcagttcaaatcctcaccatccacagcaagatgaattttatcagccatgtttggttgtaaatgctcgtgtgatttcctacagaaatactgctctgaatattttgtaataaaggtctttgcacatgtgaccacatacgtgttaggaggctgcatgctctggaagcctggactctaagctggagctcttggaagagctcttcggtttctgagcataatgctcccatctcctgatttctctgaacagaaaacaaaagagagaatgagggaaattgctattttatttgtattcatgaacttggctgtaatcagttatgccgtataggatgtcagacaataccactggttaaaataaagcctatttttcaaatttagtgagtttctcaagtttattatatttttctcttgtttttatttaatgcacaatatggcattatatcaatatcctttaaactgtgacctggcatacttgtctgacagatcttaatactactcctaacatttagaaaatgttgataaagcttcttagttgtacattttttggtgaagagtatccaggtctttgctgtggatgggtaaagcaaagagcaaatgaacgaagtattaagcattggggcctgtcttatctacactcgagtgtaagagtggccgaaatgacagggctcagcagactgtggcctgagggccaaatctggcccaccacctgtttggtgtagcctgctaagaatggcttttacatttttaaatggttgggaaagaaaaaaaaagaagtagtagattttgtagcatgtgatgtaagtaatgtaaaacttaaattccagtatccataaataaagttttatgagaacaga

SEQ ID NO: 4497 - protein, 307 aa, Homo sapiens; identical to SEQ ID NO: 535

SEQ ID NO: 4498 - DNA, 4308 bp, Homo sapiens
aatctcggctctcggagagtcccgggagctgttctcgcgagagtactgcgggaggctcccgtttgctggctcttggaaccgcgaccactggagccttagcgggcgcagcagctggaacgggagtactgcgacgcagcccggagtcggccttgtaggggcgaaggtgcagggagatcgcggcgggcgcagtcttgagcgccggagcgcgtccctgcccttagcggggcttgccccagtcgcaggggcacatccagccgctgcggctgacagcagccgcgcgcgcgggagtctgcggggtcgcggcagccgcacctgcgcgggcgaccagcgcaaggtccccgcccggctgggcgggcagcaagggccggggagagggtgcgggtgcaggcgggggccccacagggccaccttcttgcccggcggctgccgctggaaaatgtctcaggagaggcccacgttctaccggcaggagctgaacaagacaatctgggaggtgcccgagcgttaccagaacctgtctccagtgggctctggcgcctatggctctgtgtgtgctgcttttgacacaaaaacggggttacgtgtggcagtgaagaagctctccagaccatttcagtccatcattcatgcgaaaagaacctacagagaactgcggttacttaaacatatgaaacatgaaaatgtgattggtctgttggacgtttttacacctgcaaggtctctggaggaattcaatgatgtgtatctggtgacccatctcatgggggcagatctgaacaacattgtgaaatgtcagaagcttacagatgaccatgttcagttccttatctaccaaattctccgaggtctaaagtatatacattcagctgacataattcacagggacctaaaacctagtaatctagctgtgaatgaagactgtgagctgaagattctggattttggactggctcggcacacagatgatgaaatgacaggctacgtggccactaggtggtacagggctcctgagatcatgctgaactggatgcattacaaccagacagttgatatttggtcagtgggatgcataatggccgagctgttgactggaagaacattgtttcctggtacagaccatattgatcagttgaagctcattttaagactcgttggaaccccaggggctgagcttttgaagaaaatctcctcagagtctgcaagaaactatattcagtctttgactcagatgccgaagatgaactttgcgaatgtatttattggtgccaatcccctggctgtcgacttgctggagaagatgcttgtattggactcagataagagaattacagcggcccaagcccttgcacatgcctactttgctcagtaccacgatcctgatgatgaaccagtggccgatccttatgatcagtcctttgaaagcagggacctccttatagatgagtggaaaagcctgacctatgatgaagtcatcagctttgtgccaccaccccttgaccaagaagagatggagtcctgagcacctggtttctgttctgttgatcccacttcactgtgaggggaaggccttttcacgggaactctccaaatattattcaagtgcctcttgttgcagagatttcctccatggtggaagggggtgtgcgtgcgtgtgcgtgcgtgttagtgtgtgtgcatgtgtgtgtctgtctttgtgggagggtaagacaatatgaacaaactatgatcacagtgactttacaggaggttgtggatgctccagggcagcctccaccttgctcttctttctgagagttggctcaggcagacaagagctgctgtccttttaggaatatgttcaatgcaaagtaaaaaaatatgaattgtccccaatcccggtcatgcttttgccactttggcttctcctgtgaccccaccttgacggtggggcgtagacttgacaacatcccacagtggcacggagagaaggcccataccttctggttgcttcagacctgacaccgtccctcagtgatacgtacagccaaaaaggaccaactggcttctgtgcactagcctgtgattaacttgcttagtatggttctcagatcttgacagtatatttgaaactgtaaatatgtttgtgccttaaaaggagagaagaaagtgtagatagttaaaagactgcagctgctgaagttctgagccgggcaagtcgagagggctgttggacagctgcttgtgggcccggagtaatcaggcagccttcataggcggtcatgtgtgcatgtgagcacatgcgtatatgtgcgtctctctttctccctcacccccaggtgttgccatttctctgcttacccttcacctttggtgcagaggtttcttgaatatctgccccagtagtcagaagcaggttcttgatgtcatgtacttcctgtgtactctttatttctagcagagtgaggatgtgttttgcacgtcttgctatttgagcatgcacagctgcttgtcctgctctcttcaggaggccctggtgtcaggcaggtttgccagtgaagacttcttgggtagtttagatcccatgtcacctcagctgatattatggcaagtgatatcacctctcttcagcccctagtgctattctgtgttgaacacaattgatacttcaggtgcttttgatgtgaaaatcatgaaaagaggaacaggtggatgtatagcatttttattcatgccatctgttttcaaccaactatttttgaggaattatcatgggaaaagaccagggcttttcccaggaatatcccaaacttcggaaacaagttattctcttcactcccaataactaatgctaagaaatgctgaaaatcaaagtaaaaaattaaagcccataaggccagaaactccttttgctgtctttctctaaatatgattactttaaaataaaaaagtaacaaggtgtcttttccactcctatggaaaagggtcttcttggcagcttaacattgacttcttggtttggggagaaataaattttgtttcagaattttgtatattgtaggaatcctttgagaatgtgattccttttgatggggagaaagggcaaattattttaatattttgtattttcaactttataaagataaaatatcctcaggggtggagaagtgtcgttttcataacttgctgaatttcaggcattttgttctacatgaggactcatatatttaagccttttgtgtaataagaaagtataaagtcacttccagtgttggctgtgtgacagaatcttgtatttgggccaaggtgtttccatttctcaatcagtgcagtgatacatgtactccagagggacagggtggaccccctgagtcaactggagcaagaaggaaggaggcagactgatggcgattccctctcacccgggactctccccctttcaaggaaagtgaacctttaaagtaaaggcctcatctcctttattgcagttcaaatcctcaccatccacagcaagatgaattttatcagccatgtttggttgtaaatgctcgtgtgatttcctacagaaatactgctctgaatattttgtaataaaggtctttgcacatgtgaccacatacgtgttaggaggctgcatgctctggaagcctggactctaagctggagctcttggaagagctcttcggtttctgagcataatgctcccatctcctgatttctctgaacagaaaacaaaagagagaatgagggaaattgctattttatttgtattcatgaacttggctgtaatcagttatgccgtataggatgtcagacaataccactggttaaaataaagcctatttttcaaatttagtgagtttctcaagtttattatatttttctcttgtttttatttaatgcacaatatggcattatatcaatatcctttaaactgtgacctggcatacttgtctgacagatcttaatactactcctaacatttagaaaatgttgataaagcttcttagttgtacattttttggtgaagagtatccaggtctttgctgtggatgggtaaagcaaagagcaaatgaacgaagtattaagcattggggcctgtcttatctacactcgagtgtaagagtggccgaaatgacagggctcagcagactgtggcctgagggccaaatctggcccaccacctgtttggtgtagcctgctaagaatggcttttacatttttaaatggttgggaaagaaaaaaaaagaagtagtagattttgtagcatgtgatgtaagtaatgtaaaacttaaattccagtatccataaataaagttttatgagaacaga

SEQ ID NO: 4499 - protein, 360 aa, Homo sapiens; identical to SEQ ID NO: 531

SEQ ID NO: 4500 - DNA, 559 bp, Homo sapiens
aggtcgtcttttgatttatctttattaaagggatgactgttctctgaatgagatagttctctcttacctgttttcccttcctctttttatttacatgttcaagtagaaagggattacagccatttatgtattcaattcctgggctcaagcgatctgcccaccttggcctcccaaagtgctgggattacaggcgtgagtcaccgtgcctgggcaaccagaactttttataaacttgtgtgtgtatgtgtaaacataaatatacatacatacttttactgttggactgtattaaaacaggagttttaaagaggtggttaagatagacagcagactttgcttctgaaggtgatagtgggatagcagataatgtttcttgaactgtcacttggaaccaagtactgtgttaagaaagtactaggtttgttatctctaatcttcactccaaccctgtgaggtaggactgttatattaagtttatattaacttttttgttaccaccgttactttgttagcaaggtttaatattgatatcctttgatgtactaagagcacctactga

SEQ ID NO: 4501 - protein, 34 aa, Homo sapiens
MYSIPGLKRSAHLGLPKCWDYRRESPCLGNQNFL

SEQ ID NO: 4502 - DNA, 3355 bp, Homo sapiens
gattgatgagcattctcgttcacttgaaatgcaactgtgagagatagcaggaataaagaaggtgatgatcataactagggaagttaggatggcagtaagggagaagttctatcaaagacagttagaaacactgaagttagtggactttgtcagttaacactcgttccttagcaggaccaagattctttctttgagagcagtaacattattgaacaaagtcattctgaaaacccttgttttttcaggcaagaaactatattcagtctttgactcagatgccgaagatgaactttgcgaatgtatttattggtgccaatcccctggctgtcgacttgctggagaagatgcttgtattggactcagataagagaattacagcggcccaagcccttgcacatgcctactttgctcagtaccacgatcctgatgatgaaccagtggccgatccttatgatcagtcctttgaaagcagggacctccttatagatgagtggaaaagcctgacctatgatgaagtcatcagctttgtgccaccaccccttgaccaagaagagatggagtcctgagcacctggtttctgttctgttgatcccacttcactgtgaggggaaggccttttcacgggaactctccaaatattattcaagtgcctcttgttgcagagatttcctccatggtggaagggggtgtgcgtgcgtgtgcgtgcgtgttagtgtgtgtgcatgtgtgtgtctgtctttgtgggagggtaagacaatatgaacaaactatgatcacagtgactttacaggaggttgtggatgctccagggcagcctccaccttgctcttctttctgagagttggctcaggcagacaagagctgctgtccttttaggaatatgttcaatgcaaagtaaaaaaatatgaattgtccccaatcccggtcatgcttttgccactttggcttctcctgtgaccccaccttgacggtggggcgtagacttgacaacatcccacagtggcacggagagaaggcccataccttctggttgcttcagacctgacaccgtccctcagtgatacgtacagccaaaaaggaccaactggcttctgtgcactagcctgtgattaacttgcttagtatggttctcagatcttgacagtatatttgaaactgtaaatatgtttgtgccttaaaaggagagaagaaagtgtagatagttaaaagactgcagctgctgaagttctgagccgggcaagtcgagagggctgttggacagctgcttgtgggcccggagtaatcaggcagccttcataggcggtcatgtgtgcatgtgagcacatgcgtatatgtgcgtctctctttctccctcacccccaggtgttgccatttctctgcttacccttcacctttggtgcagaggtttcttgaatatctgccccagtagtcagaagcaggttcttgatgtcatgtacttcctgtgtactctttatttctagcagagtgaggatgtgttttgcacgtcttgctatttgagcatgcacagctgcttgtcctgctctcttcaggaggccctggtgtcaggcaggtttgccagtgaagacttcttgggtagtttagatcccatgtcacctcagctgatattatggcaagtgatatcacctctcttcagcccctagtgctattctgtgttgaacacaattgatacttcaggtgcttttgatgtgaaaatcatgaaaagaggaacaggtggatgtatagcatttttattcatgccatctgttttcaaccaactatttttgaggaattatcatgggaaaagaccagggcttttcccaggaatatcccaaacttcggaaacaagttattctcttcactcccaataactaatgctaagaaatgctgaaaatcaaagtaaaaaattaaagcccataaggccagaaactccttttgctgtctttctctaaatatgattactttaaaataaaaaagtaacaaggtgtcttttccactcctatggaaaagggtcttcttggcagcttaacattgacttcttggtttggggagaaataaattttgtttcagaattttgtatattgtaggaatcctttgagaatgtgattccttttgatggggagaaagggcaaattattttaatattttgtattttcaactttataaagataaaatatcctcaggggtggagaagtgtcgttttcataacttgctgaatttcaggcattttgttctacatgaggactcatatatttaagccttttgtgtaataagaaagtataaagtcacttccagtgttggctgtgtgacagaatcttgtatttgggccaaggtgtttccatttctcaatcagtgcagtgatacatgtactccagagggacagggtggaccccctgagtcaactggagcaagaaggaaggaggcagactgatggcgattccctctcacccgggactctccccctttcaaggaaagtgaacctttaaagtaaaggcctcatctcctttattgcagttcaaatcctcaccatccacagcaagatgaattttatcagccatgtttggttgtaaatgctcgtgtgatttcctacagaaatactgctctgaatattttgtaataaaggtctttgcacatgtgaccacatacgtgttaggaggctgcatgctctggaagcctggactctaagctggagctcttggaagagctcttcggtttctgagcataatgctcccatctcctgatttctctgaacagaaaacaaaagagagaatgagggaaattgctattttatttgtattcatgaacttggctgtaatcagttatgccgtataggatgtcagacaataccactggttaaaataaagcctatttttcaaatttagtgagtttctcaagtttattatatttttctcttgtttttatttaatgcacaatatggcattatatcaatatcctttaaactgtgacctggcatacttgtctgacagatcttaatactactcctaacatttagaaaatgttgataaagcttcttagttgtacattttttggtgaagagtatccaggtctttgctgtggatgggtaaagcaaagagcaaatgaacgaagtattaagcattggggcctgtcttatctacactcgagtgtaagagtggccgaaatgacagggctcagcagactgtggcctgagggccaaatctggcccaccacctgtttggtgtagcctgctaagaatggcttttacatttttaaatggttgggaaagaaaaaaaaagaagtagtagattttgtagcatgtgatgtaagtaatgtaaaacttaaattccagtatccataaataaagttttatgagaacaga

SEQ ID NO: 4503 - protein, 96 aa, Homo sapiens [sequence omitted]

SEQ ID NO: 4504 - DNA, 2877 bp, Homo sapiens
gattgatgagcattctcgttcacttgaaatgcaactgtgagagatagcaggaataaagaaggtgatgatcataactagggaagttaggatggcagtaagggagaagttctatcaaagacagttagaaacactgaagttagtggactttgtcagttaacactcgttccttagcaggaccaagattctttctttgagagcagtaacattattgaacaaagtcattctgaaaacccttgttttttcaggcaagaaactatattcagtctttgactcagatgccgaagatgaactttgcgaatgtatttattggtgccaatcccctggctgtcgacttgctggagaagatgcttgtattggactcagataagagaattacagcggcccaagcccttgcacatgcctactttgctcagtaccacgatcctgatgatgaaccagtggccgatccttatgatcagtcctttgaaagcagggacctccttatagatgagtggaaaagcctgacctatgatgaagtcatcagctttgtgccaccaccccttgaccaagaagagatggagtcctgagcacctggtttctgttctgttgatcccacttcactgtgaggggaaggccttttcacgggaactctccaaatattattcaagtgcctcttgttgcagagatttcctccatggtggaagggggtgtgcgtgcgtgtgcgtgcgtgttagtgtgtgtgcatgtgtgtgtctgtctttgtgggagggtaagacaatatgaacaaactatgatcacagtgactttacaggaggttgtggatgctccagggcagcctccaccttgctcttctttctgagagttggctcaggcagacaagagctgctgtccttttaggaatatgttcaatgcaaagtaaaaaaatatgaattgtccccaatcccggtcatgcttttgccactttggcttctcctgtgaccccaccttgacggtggggcgtagacttgacaacatcccacagtggcacggagagaaggcccataccttctggttgcttcagacctgacaccgtccctcagtgatacgtacagccaaaaaggaccaactggcttctgtgcactagcctgtgattaacttgcttagtatggttctcagatcttgacagtatatttgaaactgtaaatatgtttgtgccttaaaaggagagaagaaagtgtagatagttaaaagactgcagctgctgaagttctgagccgggcaagtcgagagggctgttggacagctgcttgtgggcccggagtaatcaggcagccttcataggcggtcatgtgtgcatgtgagcacatgcgtatatgtgcgtctctctttctccctcacccccaggtgttgccatttctctgcttacccttcacctttggtgcagaggtttcttgaatatctgccccagtagtcagaagcaggttcttgatgtcatgtacttcctgtgtactctttatttctagcagagtgaggatgtgttttgcacgtcttgctatttgagcatgcacagctgcttgtcctgctctcttcaggaggccctggtgtcaggcaggtttgccagtgaagacttcttgggtagtttagatcccatgtcacctcagctgatattatggcaagtgatatcacctctcttcagcccctagtgctattctgtgttgaacacaattgatacttcaggtgcttttgatgtgaaaatcatgaaaagaggaacaggtggatgtatagcatttttattcatgccatctgttttcaaccaactatttttgaggaattatcatgggaaaagaccagggcttttcccaggaatatcccaaacttcggaaacaagttattctcttcactcccaataactaatgctaagaaatgctgaaaatcaaagtaaaaaattaaagcccataaggccagaaactccttttgctgtctttctctaaatatgattactttaaaataaaaaagtaacaaggtgtcttttccactcctatggaaaagggtcttcttggcagcttaacattgacttcttggtttggggagaaataaattttgtttcagaattttgtatattgtaggaatcctttgagaatgtgattccttttgatggggagaaagggcaaattattttaatattttgtattttcaactttataaagataaaatatcctcaggggtggagaagtgtcgttttcataacttgctgaatttcaggcattttgttctacatgaggactcatatatttaagccttttgtgtaataagaaagtataaagtcacttccagtgttggctgtgtgacagaatcttgtatttgggccaaggtgtttccatttctcaatcagtgcagtgatacatgtactccagagggacagggtggaccccctgagtcaactggagcaagaaggaaggaggcagactgatggcgattccctctcacccgggactctccccctttcaaggaaagtgaacctttaaagtaaaggcctcatctcctttattgcagttcaaatcctcaccatccacagcaagatgaattttatcagccatgtttggttgtaaatgctcgtgtgatttcctacagaaatactgctctgaatattttgtaataaaggtctttgcacatgtgaccacatacgtgttaggaggctgcatgctctggaagcctggactctaagctggagctcttggaagagctcttcggtttctgagcataatgctcccatctcctgatttctctgaacagaaaacaaaagagagaatgagggaaattgctattttatttgtattcatgaacttggctgtaatcagttatgccgtataggatgtcagacaataccactggttaaaataaagcctatttttcaaattt

SEQ ID NO: 4505 - protein, 96 aa, Homo sapiens [sequence omitted]

SEQ ID NO: 4506 - DNA, 1579 bp, Homo sapiens
cggggctggagggaactgggaagcactgcctccccgctcctgcttggacccaccagccccgccgctggcccgcgctcggctgggaggcaccggggtcccgctgggcagccccgaccccgtgcctgggccgcacctgccgcagtggctccgtcgggccgggcggaagcgcgggagcgcagggctggacaggcccgggcgtggcggccccggcgcacctgggcgagccggcaggtgggagcgtagcagcccggggcccccgccctcgcgcgggggaggagcgggcggcgcggggcgggcgcagcgggggtcggggcgctgggagcccgttgggccgcgaacgcagccgccacgctggggccgccgagatcgggtgcccgggatgagcctcatccggaaaaagggcttctacaagcaggacgtcaacaagacagcctgggagctgcccaagacctacgtgtccccgacgcacgtcggcagcggggcctatggctccgtgtgctcggccatcgacaagcggtcaggggagaaggtggccatcaagaagctgagccgaccctttcagtccgagatcttcgccaagcgcgcctaccgggagctgctgctgctgaagcacatgcagcatgagaacgtcattgggctcctggatgtcttcaccccagcctcctccctgcgcaacttctatgacttctacctggtgatgcccttcatgcagacggatctgcagaagatcatggggatggagttcagtgaggagaagatccagtacctggtgtatcagatgctcaaaggccttaagtacatccactctgctggggtcgtgcacagggacctgaagccaggcaacctggctgtgaatgaggactgtgaactgaagattctggattttgggctggcgcgacatgcagacgccgagatgactggctacgtggtgacccgctggtaccgagcccccgaggtgatcctcagctggatgcactacaaccagacagtggacatctggtctgtgggctgtatcatggcagagatgctgacagggaaaactctgttcaaggggaaagattacctggaccagctgacccagatcctgaaagtgaccggggtgcctggcacggagtttgtgcagaagctgaacgacaaagcggccaaatcctacatccagtccctgccacagacccccaggaaggatttcactcagctgttcccacgggccagcccccaggctgcggacctgctggagaagatgctggagctagacgtggacaagcgcctgacggccgcgcaggccctcacccatcccttctttgaacccttccgggaccctgaggaagagacggaggcccagcagccgtttgatgattccttagaacacgagaaactcacagtggatgaatggaagcagcacatctacaaggagattgtgaacttcagccccattgcccggaaggactcacggcgccggagtggcatgaagctgtagggactcatcttgcatggcaccgccggccagacactgcccaaggaccagtatttgtcactaccaaactcagcccttcttggaatacagcctttcaagcagagg

SEQ ID NO: 4507 - protein, 365 aa, Homo sapiens; identical to SEQ ID NO: 537

SEQ ID NO: 4508 - DNA, 2163 bp, Homo sapiens
cggggctggagggaactgggaagcactgcctccccgctcctgcttggacccaccagccccgccgctggcccgcgctcggctgggaggcaccggggtcccgctgggcagccccgaccccgtgcctgggccgcacctgccgcagtggctccgtcgggccgggcggaagcgcgggagcgcagggctggacaggcccgggcgtggcggccccggcgcacctgggcgagccggcaggtgggagcgtagcagcccggggcccccgccctcgcgcgggggaggagcgggcggcgcggggcgggcgcagcgggggtcggggcgctgggagcccgttgggccgcgaacgcagccgccacgctggggccgccgagatcgggtgcccgggatgagcctcatccggaaaaagggcttctacaagcaggacgtcaacaagacagcctgggagctgcccaagacctacgtgtccccgacgcacgtcggcagcggggcctatggctccgtgtgctcggccatcgacaagcggtcaggggagaaggtggccatcaagaagctgagccgaccctttcagtccgagatcttcgccaagcgcgcctaccgggagctgctgctgctgaagcacatgcagcatgagaacgtcattgggctcctggatgtcttcaccccagcctcctccctgcgcaacttctatgacttctacctggtgatgcccttcatgcagacggatctgcagaagatcatggggatggagttcagtgaggagaagatccagtacctggtgtatcagatgctcaaaggccttaagtacatccactctgctggggtcgtgcacagggacctgaagccaggcaacctggctgtgaatgaggactgtgaactgaagattctggattttgggctggcgcgacatgcagacgccgagatgactggctacgtggtgacccgctggtaccgagcccccgaggtgatcctcagctggatgcactacaaccagacagtggacatctggtctgtgggctgtatcatggcagagatgctgacagggaaaactctgttcaaggggaaagattacctggaccagctgacccagatcctgaaagtgaccggggtgcctggcacggagtttgtgcagaagctgaacgacaaagcggccaaatcctacatccagtccctgccacagacccccaggaaggatttcactcagctgttcccacgggccagcccccaggctgcggacctgctggagaagatgctggagctagacgtggacaagcgcctgacggccgcgcaggccctcacccatcccttctttgaacccttccgggaccctgaggaagagacggaggcccagcagccgtttgatgattccttagaacacgagaaactcacagtggatgaatggaagcagcacatctacaaggagattgtgaacttcagccccattgcccggaaggactcacggcgccggagtggcatgaagctgtagggactcatcttgcatggcaccgccggccagacactgcccaaggaccagtatttgtcactaccaaactcagcccttcttggaatacagcctttcaagcagaggacagaagggtccttctccttatgtgggaaatgggcctagtagatgcagaattcaaagatgtcggttgggagaaactagctctgatcctaacaggccacgttaaactgcccatctggagaatcgcctgcaggtggggccctttccttcccgccagagtggggctgagtgggcgctgagccaggccgggggcctatggcagtgatgctgtgttggtttcctagggatgctctaacgaattaccacaaacctggtggattgaaacagcagaacttgattcccttacagttctggaggctggaaatctgggatggaggtgttggcagggctgtggtccctttgaaggctctggggaagaatccttccttggctctttttagcttgtggcggcagtgggcagtccgtggcattccccagcttattgctgcatcactccagtctctgtctcttctgttctctcctcttttaacaacagtcattggatttagggcccaccctaatcctgtgtgatcttatcttgatccttattaattaaacctgcaaatactctagttccaaataaagtcacattctcaggttccaggtgg

SEQ ID NO: 4509 - protein, 365 aa, Homo sapiens; identical to SEQ ID NO: 537

SEQ ID NO: 4510 - DNA, 2904 bp, Homo sapiens
cggggctggagggaactgggaagcactgcctccccgctcctgcttggacccaccagccccgccgctggcccgcgctcggctgggaggcaccggggtcccgctgggcagccccgaccccgtgcctgggccgcacctgccgcagtggctccgtcgggccgggcggaagcgcgggagcgcagggctggacaggcccgggcgtggcggccccggcgcacctgggcgagccggcaggtgggagcgtagcagcccggggcccccgccctcgcgcgggggaggagcgggcggcgcggggcgggcgcagcgggggtcggggcgctgggagcccgttgggccgcgaacgcagccgccacgctggggccgccgagatcgggtgcccgggatgagcctcatccggaaaaagggcttctacaagcaggacgtcaacaagacagcctgggagctgcccaagacctacgtgtccccgacgcacgtcggcagcggggcctatggctccgtgtgctcggccatcgacaagcggtcaggggagaaggtggccatcaagaagctgagccgaccctttcagtccgagatcttcgccaagcgcgcctaccgggagctgctgctgctgaagcacatgcagcatgagaacgtcattgggctcctggatgtcttcaccccagcctcctccctgcgcaacttctatgacttctacctggtgatgcccttcatgcagacggatctgcagaagatcatggggatggagttcagtgaggagaagatccagtacctggtgtatcagatgctcaaaggccttaagtacatccactctgctggggtcgtgcacagggacctgaagccaggcaacctggctgtgaatgaggactgtgaactgaagattctggattttgggctggcgcgacatgcagacgccgagatgactggctacgtggtgacccgctggtaccgagcccccgaggtgatcctcagctggatgcactacaaccagacagtggacatctggtctgtgggctgtatcatggcagagatgctgacagggaaaactctgttcaaggggaaagattacctggaccagctgacccagatcctgaaagtgaccggggtgcctggcacggagtttgtgcagaagctgaacgacaaagcggccaaatcctacatccagtccctgccacagacccccaggaaggatttcactcagctgttcccacgggccagcccccaggctgcggacctgctggagaagatgctggagctagacgtggacaagcgcctgacggccgcgcaggccctcacccatcccttctttgaacccttccgggaccctgaggaagagacggaggcccagcagccgtttgatgattccttagaacacgagaaactcacagtggatgaatggaagcagcacatctacaaggagattgtgaacttcagccccattgcccggaaggactcacggcgccggagtggcatgaagctgtagggactcatcttgcatggcaccgccggccagacactgcccaaggaccagtatttgtcactaccaaactcagcccttcttggaatacagcctttcaagcagaggacagaagggtccttctccttatgtgggaaatgggcctagtagatgcagaattcaaagatgtcggttgggagaaactagctctgatcctaacaggccacgttaaactgcccatctggagaatcgcctgcaggtggggccctttccttcccgccagagtggggctgagtgggcgctgagccaggccgggggcctatggcagtgatgctgtgttggtttcctagggatgctctaacgaattaccacaaacctggtggattgaaacagcagaacttgattcccttacagttctggaggctggaaatctgggatggaggtgttggcagggctgtggtccctttgaaggctctggggaagaatccttccttggctctttttagcttgtggcggcagtgggcagtccgtggcattccccagcttattgctgcatcactccagtctctgtctcttctgttctctcctcttttaacaacagtcattggatttagggcccaccctaatcctgtgtgatcttatcttgatccttattaattaaacctgcaaatactctagttccaaataaagtcacattctcaggttccaggtggacatgaattccagggggaaatgattcaactcactacagacagctgggagggaggggccccttcctgggccccgtgctgaggccttgtgctctgtgaaggaacccaatgtgtttggctgctaaattaagggagttgcagagagagctgcagctggtgcgattgcattcaggttattttgggtgagtgataagcaatcaagatatgaaacaacagcaggctcggagactgcgagctgcacaggcagaaatgggctcttgcctggcttgatggcaaaccgttctgctccctttgggagatggcacagctctccagagctttgacctgacagtggctagaacctctctgtttttatctgagaaactttggcagaacaaatttccatgtgcacaagctgtcgggcacagtgggtctcaaatttccttgtgcaccaggggacttgttaaaatgcagattcctgggccccaccccagggcttgtgactcagcaggtctgcagttgagaccttagaatgtgcatttgaatgaggacctctcgccctgacccaagcctagtgattctgatggatatcagaccatagttcgagacatttagtggatttcagtcatacttgatttgttgggaggcctaaatcaaaaacctataggaggagactggggggcttcagatggagtttcacactcatcttacaggtgttaaaactgaggctcagaaagcttttttttgtttgtttgtttgagacag

SEQ ID NO: 4511 - protein, 365 aa, Homo sapiens; identical to SEQ ID NO: 537

SEQ ID NO: 4512 - DNA, 824 bp, Homo sapiens
gagcatccctaggaaaccaacacagcatcactgccataggcccccggcctggctcagcgcccactcagccccactctggcgggaaggaaagggccccacctgcaggcgattctccagatgggcagtttaacgtggcctgttaggatcagagctagtttctcccaaccgacatctttgaattctgcatctactaggcccatttcccacataaggagaaggacccttctgtcctctgcttgaaaggctgtattccaagaagggctgagtttggtagtgacaaatactggtccttgggcagtgtctggccggcggtgccatgcaagatgagtccctacagcttcatgccactccggcgccgtgagtccttccgggcaatggggctgaagttcacaatctccttgtagatgtgctctgagaaaggcagcatggtttaaggtgcgtaaagaggtgctgtggcgagaaagtccaccccccttcagagacagcatggagagcgaagtcagctcaaggagaaagaagcacccaggagacaatgcccaccaagaaggaggtggcaggtagggctggcagaggccaggcacaaagatggaggaagcaaggaagagaggctgcaggcggaggcgaggaagcccgaggccccagctcttacgcttccattcatccactgtgagtttctcgtgttctaaggaatcatcaaacggctgctgggcctccgtctcttcctcagggtcccggaagggttcaaagaagggatgggcccgtgggaacagctgagtgaaatccttcctgggggtctgtggcagggactggatgtaggatttggc

SEQ ID NO: 4513 - protein, 62 aa, Homo sapiens [sequence omitted]

SEQ ID NO: 4514 - DNA, 460 bp, Homo sapiens
cacatctacaaggagattgtgaacttcagccccattgcccggaaggactcacggcgccggagtggcatgaagctgtagggactcatcttgcatggcaccgccggccagacactgcccaaggaccagtatttgtcactaccaaactcagcccttcttggaatacagcctttcaagcagaggacagaagggtccttctccttatgtgggaaatgggcctagtagatgcagaattcaaagatgtcggttgggagaaactagctctgatcctaacagtccgtggcattccccagcttattgctgcatcactccagtctctgtctcttctgttctctcctcttttaacaacagtcattggatttagggcccaccctaatcctgtgtgatcttatcttgatccttattaattaaacctgcaaatactctagttccaaataaagtcacattctcaggttccaggtgg

SEQ ID NO: 4515 - protein, 89 aa, Homo sapiens
MAPPARHCPRTSICHYQTQPFLEYSLSSRGQKGPSPYVGNGPSRCRIQRCRLGETSSDPNSPWHSPAYCCITPVSVSSVLSSFNNSHWI

SEQ ID NO: 4516 - DNA, 455 bp, Homo sapiens
cctgcacgactcccagaaagtcgcgtctcccctaacccccatgcccaggacctgaggacaaaggtctagcgattgtccatcccctcccccagtgaggacagccgggaaagacctgcctttgttgtgtacaggtggtatctcactgtgttatccagactggactcaaatttctgggctccaatggtcctctcacctcagcctcccaagtagtcaggactacagtgttgctgtcctcattttacagatgaagaaactgaggccccagatcacagggctggtgagaagaacgtgatatctccagagctaacacttaactactatagtgtaccacacaaggagagagcagcattagagaggggtgccacttcctctgatggaagataaaaaagaaagattgccagcctgggcaacatagtgagaccctgtctctacaaaaaataaaaataaaaaaatta

SEQ ID NO: 4517 - protein, 57 aa, Homo sapiens
SGLQCCCPHFTDEETEAPDHRAGEKNVISPELTLNYYSVPHKERAALERGATSSDGR

SEQ ID NO: 4518 - DNA, 1142 bp, Homo sapiens
ggggggagacaagatggcggctgcgggagggggtcctcgcttctcagctcccccgctcacccgccttctccttccctgccgccgccctcgctccaggagagagctttcgcaccgcccccgccctgtgcaggtgcctgcacgactcccagaaagtcgcgtctcccctaacccccatgcccaggacctgaggacaaaggtctagcgattgtccatcccctcccccagtgaggacagccgggaaagacctgcctttgttgtgtacaggtgagaactccatggcaatgttttgaggattaaagaggagagtgatgactatccaaacgtcagagaacgcaactatgagactagagacactggaaaactaaaaaagtaacgggcctttgctgactcagggagatgatttcccaagagggaagaaaactggaacctgagaaataagtgatttagtaatgtggctgctaaaatacggaaaaactagaatgaatggcttacacatttttgaaatgaagttagaagagggttatactgtgaagaagaatgaaaaagccaaacatttcattcaggtaagcatatcacataggagaaactctaggtgactttggtttggcagtgagtttttagatacaacaccaaagcacaatccataaaagaaaagaaagatagataagttggacttcattaaaatgaaaaacttctgctctgcaaagacactgttaagagaatgaaaacacatgccacagactatgagaaaatatgtgcaaaacacctatctgataaaggaagtatgtctgaaatacaaagaactcttaaaactcagcaataagaaaatgaacaacctgattaaaatatgggcaaaagagctgaatggaaacctccccaaagaatatatgtagatggcaaatgaacatatgaaaagattctcaacacaatatgtcactagaaaattgcaaattaaaacaagataccagtatacacttattagatgagctaaaatccaaaatactaagaacagcaaatgctgatgaggttgtggagcaacaggagctctcattcattgctggtgggaatgcaaaatgatgcagccacttggaagacagtctggcagtttcttaaagattaaacaaaggcttaccagacactcc

SEQ ID NO: 4519 - protein, 62 aa, Homo sapiens
MAAAGGGPRFSAPPLTRLLLPCRRPRSRRELSHRPRPVQVPARLPESRVSPNPHAQDLRTKV

SEQ ID NO: 4520 - DNA, 6023 bp, Homo sapiens
attccccctcctcccccgggagcggcggcggcggccgggccggggccccagcgcgggccgggagggggcacggcggaggccacggaggcaggcgcgggagaagaccgcgctccgcttcccgggccgcgccgacctgctcggcggcctgcccgcccgcgcccaggggccccgaacggtggggccgggcaggcggctgaggcctgtcccctcagttcccaggtgccatgaggaagcctcgtcggaagtcccggcagaatgccgagggccggcgttccccgtccccctacagtctcaagtgctcacccacccgggagaccctgacatatgcccaggcccagcggattgtcgaggtagacattgatggacgcctgcatcgtatcagcatctatgacccactcaaaatcattactgaagatgagctaactgcccaggatatcaccgaatgcaatagtaacaaggaaaacagtgaacagcctcagttccctggcaagtccaagaaaccctcatccaagggcaaaaagaaggaatcctgctccaagcatgcatctggtacttccttccacctcccacagcccagcttccgtatggtggactcaggcatccagccagaagcacccccgctgcctgctgcctactaccgctacattgagaagccacctgaagacctggatgcagaggtagagtatgacatggatgaggaggaccttgcctggctggacatggtgaatgaaaaacggcgagtagatgggcacagtttggtgtctgcagatacctttgagctgctggtagaccggcttgagaaagagtcatacttggagagtcgcagcagtggggcccaacagtcactcatcgatgaagacgctttctgctgtgtgtgcctggatgatgaatgtcacaatagcaatgttattctcttctgtgacatctgcaacctggctgtacaccaggagtgctatggcgtcccatacatccctgagggccagtggctatgccgctgctgcctgcagtctccctcccggcctgtggattgcatcctttgccccaataagggtggcgccttcaaacagaccagtgatgggcactgggcccatgtggtgtgtgccatctggatccctgaagtctgctttgctaacaccgtgttcttggaacctattgagggcattgacaatatcccgcctgcccgctggaaactaacctgctatatctgcaagcagaaagggctaggtgcagccatccagtgccataaggtgaactgctacacagcattccatgtgacatgtgcacagcgggctgggctcttcatgaagattgagcccatgcgcgaaaccagcctcaatggcaccatctttacagtgcgcaagactgcctactgtgaggcccactcgccaccaggtgcggccactgctaggaggaagggcgactcccctagaagcatcagtgagactggcgatgaggaagggctgaaggagggtgatggagaggaggaagaagaggaagaggtggaggaagaagagcaggaagctcaaggcggggtgagtggctccctcaagggagtgcccaagaaaagcaagatgagtttgaagcagaagatcaagaaggagccagaggaagcaggccaagacacaccctccactctccccatgcttgctgtcccacagataccctcttacaggttgaacaagatctgtagtggtctctcctttcagaggaaaaaccagtttatgcagcggcttcacaattattggctgttgaagcggcaggcacggaatggtgtccctcttatccggcgcttgcactcccatctgcagtcccaaagaaacgctgagcagcgagagcaggatgagaagacaagtgcagtgaaggaggagctgaagtattggcagaagctccggcatgacttggagcgggcgcggctgctgattgagctgattcggaagagagagaagctcaaacgagagcaggtcaaagtccagcaggctgccatggagctggagctgatgccattcaatgttctgttgaggacaacactggacctgctgcaggagaaggatcctgcacacatcttcgcagaaccagtcaacttgagtgaggttccagattacctggaattcatatccaagccaatggatttttctactatgaggcggaagctggagtcccacctgtaccgcaccttggaggagtttgaggaggactttaaccttatagttaccaactgcatgaagtataatgctaaagacacaattttccaccgagcagctgtccgcctgcgggacctgggaggggccatcctacggcacgcccggcggcaggcagagaacatcggctatgaccccgagaggggcactcacctgcccgagtcacccaaattggaagacttttaccgcttctcctgggaagacgtggacaacatcctcatcccagagaaccgggcccatttgtccccagaggtgcagctgaaggagctgctggagaaactggacctggtgagcgccatgcggtccagtggggcccgcacccgtcgtgtccgcctgctacgccgggagatcaatgcccttcggcagaagctggcacagccaccaccaccacagccaccatcactcaacaagacagtatccaatggggagctgccagcagggccccagggggatgcagctgtgctggagcaggccttgcaggaggagccagaagacgatggggacagagatgactccaaactgcctcctccgccaaccctggagcccactgggcctgcaccttccttgtctgagcaagaatcccccccggagccccctactctgaaacccattaatgatagcaaacctccaagcaggttcctaaagcccagaaaggtggaagaagatgagctcttggaaaaatcaccactgcagctagggaatgagcctttgcaacgcttgctcagtgacaatggcatcaacagactatccctcatggcccctgacaccccggccggtaccccacttagtggtgtgggtcgccgcacatcagtcctcttcaagaaggccaagaatggggttaagctacagagaagcccagacagggtcctggagaatggcgaggaccatggtgtggcaggctctcctgcctctccagccagcatcgaggaagagcgccactcccggaagcggccaaggagcaggagctgtagtgagagcgaaggggagaggtccccccagcaggaggaagagacaggcatgaccaacggctttggaaaacacaccgaaagcgggtctgactctgaatgtagtttgggtctcagtggtggactggcatttgaagcttgcagtggtctgacgccccccaaacgcagccgtgggaagccagccctgtctcgagtgcccttcctggaaggtgtgaacggagactctgactacaatggctcaggcagaagcctcctgctgccctttgaagaccgcggagacctggagcccttggagctggtgtgggccaagtgccgaggctacccctcctaccctgccttgatcatcgatcccaagatgccccgggagggcctcctgcacaatggcgttcccatccctgtccccccgctggacgtgctgaagctgggagagcagaaacaggcagaggctggagagaagctcttccttgtcctcttctttgacaacaagcgcacctggcagtggcttccaagggacaaagtcctgcccttgggtgtggaagacaccgtggacaagctcaagatgctggaaggccgcaagaccagcatccgcaagtcagtgcaggtggcctatgaccgtgcgatgatccacctgagcagagtccgggggccccactccttcgtcacttccagctacctgtaagggcagggctgggcctgcatccgcttgccctgcctccatcccgcagggcacagagaagcctcttctgcccctgccagatgtatggccggcagcttccccctctcatggtaggccagggactgggctttctccccactaagggcaaggccccagttttgaccaatcgcatggttctcctggcaggcctgctgtgtgccaaaaactcccacccaaggtccctcaggggatatttcactgaagaaccagttagaagtagaaacagctgtggggcttgggcccagcttaggagattgcccagatggcaagaggtcctgggctccttcttgaggggctgcctggcccgctccatcctactcccactaactacacctcagggcgggtgaggttccgacactgatcccagagatgccgtggatacgccagggtcccagggggaatctccccaagctcacactctctcccgcttatcgcctattctcacacctcttctcggtcccatcttctgcacccattgcccagtcttgctttctctttcccatattccttttctttttctcttgtgccaaactgacagaaaccgtcaccacactggtctttttctttaatgtctcattccccttgaggccagctgctatgccaggtggtgtctctgccaggctcctcaggcccagacagaggccagcccacaacctatgaccccctcccccaggacaccacctcccacccacagaccttccctttagctgttgacacaacttcccagctctgcaagtgtgccccctggatcaaggcgggtcccctcttgtttttttctttgctgccacgaggtggtccaagccttcagggtgggctcctatcaggctgggtgtgcgagtgtccatctgtccacatggatgtcgagggtggtttgtgtggagctgtgctcgtcagctgggtctgccctcttcccccttttctccttcttctctcctcatggactttttctgcaattgcagtcttaagcttcactctccaccacctggatggcatggcgcctgccaccaaacatcttcctggcctgcgctctgccctgccctgcctagcctctgctactcccacttcccaactccagggaatgcattacttttatttcaaaccctctgcctccttccttctttctcttcaaccccctccccaccttcaccttctcaaaaatggaaggaaaaaaaaactgtgaatggggaatgctgactgacaaaccaacacaactttcagaggcttcagtgtctgttctctggacatttcttttcacctcctgagcaccaaagtcgcagggccagttgcaggccgctgattgccatgttgatttttaacctgatattctttttaattgttttaaatttttcataggggagttttggacaaaacagtcactggggagatcactgccatttttacacacttgactttttaaaaatacaaccaaccaaccaccacaacttcttatacatttgggacatgagccagagtttaaaagggaaccaacaaaacactataacttaaaaggatggggttttggattttgtataataataaaaacaatacagcatatggctagggaaggacatggtgtatataattgtaaaatactgttctaaattattcaggcctatagtttccattactggagtcctccattgtgtggccacacagtgtcgttgatttaaaggagccagtgcttcccctctccccaggtagttggtcagctgtggactctgtgacctttgtctaaacctgtgttgtaagatcttgggacttcctctctttctatgtctatctcttccccccaacactttctcttcttagtctctctctttatttttcaatctctgaatattttagtctctctctgagtctcattttttaaaatgctcttttagaacgggaaacggctcagatcctgctgtggcacggggcctatgtgtctctgtcgcgtctgctgtgaagcacatgatgctctatttattgtagagagtgactttatttgctttctagaattgtttataacagatggtataagagaggtaataaacagagaaaaatctatgcttgtaaagaatacaaaagttaattttacctactataatatgactgtctgaaacttattttctctctgagaaataaatgttctaatgggcagta

SEQ ID NO: 4521 - protein, 1205 aa, Homo sapiens
MRKPRRKSRQNAEGRRSPSPYSLKCSPTRETLTYAQAQRIVEVDIDGRLHRISIYDPLKIITEDELTAQDITECNSNKENSEQPQFPGKSKKPSSKGKKKESCSKHASGTSFHLPQPSFRMVDSGIQPEAPPLPAAYYRYIEKPPEDLDAEVEYDMDEEDLAWLDMVNEKRRVDGHSLVSADTFELLVDRLEKESYLESRSSGAQQSLIDEDAFCCVCLDDECHNSNVILFCDICNLAVHQECYGVPYIPEGQWLCRCCLQSPSRPVDCILCPNKGGAFKQTSDGHWAHVVCAIWIPEVCFANTVFLEPIEGIDNIPPARWKLTCYICKQKGLGAAIQCHKVNCYTAFHVTCAQRAGLFMKIEPMRETSLNGTIFTVRKTAYCEAHSPPGAATARRKGDSPRSISETGDEEGLKEGDGEEEEEEEVEEEEQEAQGGVSGSLKGVPKKSKMSLKQKIKKEPEEAGQDTPSTLPMLAVPQIPSYRLNKICSGLSFQRKNQFMQRLHNYWLLKRQARNGVPLIRRLHSHLQSQRNAEQREQDEKTSAVKEELKYWQKLRHDLERARLLIELIRKREKLKREQVKVQQAAMELELMPFNVLLRTTLDLLQEKDPAHIFAEPVNLSEVPDYLEFISKPMDFSTMRRKLESHLYRTLEEFEEDFNLIVTNCMKYNAKDTIFHRAAVRLRDLGGAILRHARRQAENIGYDPERGTHLPESPKLEDFYRFSWEDVDNILIPENRAHLSPEVQLKELLEKLDLVSAMRSSGARTRRVRLLRREINALRQKLAQPPPPQPPSLNKTVSNGELPAGPQGDAAVLEQALQEEPEDDGDRDDSKLPPPPTLEPTGPAPSLSEQESPPEPPTLKPINDSKPPSRFLKPRKVEEDELLEKSPLQLGNEPLQRLLSDNGINRLSLMAPDTPAGTPLSGVGRRTSVLFKKAKNGVKLQRSPDRVLENGEDHGVAGSPASPASIEEERHSRKRPRSRSCSESEGERSPQQEEETGMTNGFGKHTESGSDSECSLGLSGGLAFEACSGLTPPKRSRGKPALSRVPFLEGVNGDSDYNGSGRSLLLPFEDRGDLEPLELVWAKCRGYPSYPALIIDPKMPREGLLHNGVPIPVPPLDVLKLGEQKQAEAGEKLFLVLFFDNKRTWQWLPRDKVLPLGVEDTVDKLKMLEGRKTSIRKSVQVAYDRAMIHLSRVRGPHSFVTSSYL

SEQ ID NO: 4522 - DNA, 536 bp, Homo sapiens
aagcaaaggtaaataatgagagcagtttattgtaagaaggggcccactgggacagcgtataggaagtaagattgctctgtctctggagaaggctgcttcctcagtaagttcctagtctttgctcccagagctattagctgtctgctctggaagcaggggctgtgtaggaggcagtgggctgtggaggcccaagccttgtttggttttagtaccaatgtggttttagccagctacattctgcttctgtgcttggtgttttcctcttgtcagctaacacctgttagcagacttctcagcatcagcaagagattgaaatgagatgatgtgtgaataattaggagctttggaaactttgaaagtgctccctagacctggattttgattgttgtgttgatgctgccaggcattttgctgagcacctgccgtctctgagccaggcaaggtggggctggatgccagaagcaaacaggtgggcctttcttagcctatggacccttacaactctccaaacagagtaagggcccagagaaggacct

SEQ ID NO: 4523 - protein, 33 aa, Homo sapiens
ARQGGAGCQKQTGGPFLAYGPLQLSKQSKGPEK

SEQ ID NO: 4524 - DNA, 1611 bp, Homo sapiens
atggtaggccagggactgggctttctccccactaagggcaaggccccagttttgaccaatcgcatggttctcctggcaggcctgctgtgtgccaaaaactcccacccaaggtccctcaggggatatttcactgaagaaccagttagaagtagaaacagctgtggggcttgggcccagcttaggagattgcccagatggcaagaggtcctgggctccttcttgaggggctgcctggcccgctccatcctactcccactaactacacctcagggcgggtgaggttccgacactgatcccagagatgccgtggatacgccagggtcccagggggaatctccccaagctcacactctctcccgcttatcgcctattctcacacctcttctcggtcccatcttctgcacccattgcccagtcttgctttctctttcccatattccttttctttttctcttgtgccaaactgacagaaaccgtcaccacactggtctttttctttaatgtctcattccccttgaggccagctgctatgccaggtggtgtctctgccaggctcctcaggcccagacagaggccagcccacaacctatgacccccccctccccaccttcaccttctcaaaaatggaaggaaaaaaaaactgtgaatggggaatgctgactgacaaaccaacacaactttcagaggcttcagtgtctgttctctggacatttcttttcacctcctgagcaccaaagtcgcagggccagttgcaggccgctgattgccatgttgatttttaacctgatattctttttaattgttttaaatttttcataggggagttttggacaaaacagtcactggggagatcactgccatttttacacacttgactttttaaaaatacaaccaaccaaccaccacaacttcttatacatttgggacatgagccagagtttaaaagggaaccaacaaaacactataacttaaaaggatggggttttggattttgtataataataaaaacaatacagcatatggctagggaaggacatggtgtatataattgtaaaatactgttctaaattattcaggcctatagtttccattactggagtcctccattgtgtggccacacagtgtcgttgatttaaaggagccagtgcttcccctctccccaggtagttggtcagctgtggactctgtgacctttgtctaaacctgtgttgtaagatcttgggacttcctctctttctatgtctatctcttccccccaacactttctcttcttagtctctctctttatttttcaatctctgaatattttagtctctctctgagtctcattttttaaaatgctcttttagaacgggaaacggctcagatcctgctgtggcacggggcctatgtgtctctgtcgcgtctgctgtgaagcacatgatgctctatttattgtagagagtgactttatttgctttctagaattgtttataacagatggtataagagaggtaataaacagagaaaaatctatgcttgtaaagaatacaaaagttaattttacctactataatatgactgtctgaaacttattttctctctgagaaataaatgttctaatgggcagta

SEQ ID NO: 4525 - protein, 96 aa, Homo sapiens
MPWIRQGPRGNLPKLTLSPAYRLFSHLFSVPSSAPIAQSCFLFPIFLFFFSCAKLTETVTTLVFFFNVSFPLRPAAMPGGVSARLLRPRQRPAHNL

SEQ ID NO: 4526 - DNA, 1816 bp, Homo sapiens
aagaggtcctgggctccttcttgaggggctgcctggcccgctccatcctactcccactaactacacctcagggcgggtgaggttccgacactgatcccagagatgccgtggatacgccagggtcccagggggaatctccccaagctcacactctctcccgcttatcgcctattctcacacctcttctcggtcccatcttctgcacccattgcccagtcttgctttctctttcccatattccttttctttttctcttgtgccaaactgacagaaaccgtcaccacactggtctttttctttaatgtctcattccccttgaggccagctgctatgccaggtggtgtctctgccaggctcctcaggcccagacagaggccagcccacaacctatgaccccctcccccaggacaccacctcccacccacagaccttccctttagctgttgacacaacttcccagctctgcaagtgtgccccctggatcaaggcgggtcccctcttgtttttttctttgctgccacgaggtggtccaagccttcagggtgggctcctatcaggctgggtgtgcgagtgtccatctgtccacatggatgtcgagggtggtttgtgtggagctgtgctcgtcagctgggtctgccctcttcccccttttctccttcttctctcctcatggactttttctgcaattgcagtcttaagcttcactctccaccacctggatggcatggcgcctgccaccaaacatcttcctggcctgcgctctgccctgccctgcctagcctctgctactcccacttcccaactccagggaatgcattacttttatttcaaaccctctgcctccttccttctttctcttcaaccccctccccaccttcaccttctcaaaaatggaaggaaaaaaaaactgtgaatggggaatgctgactgacaaaccaacacaactttcagaggcttcagtgtctgttctctggacatttcttttcacctcctgagcaccaaagtcgcagggccagttgcaggccgctgattgccatgttgatttttaacctgatattctttttaattgttttaaatttttcataggggagttttggacaaaacagtcactggggagatcactgccatttttacacacttgactttttaaaaatacaaccaaccaaccaccacaacttcttatacatttgggacatgagccagagtttaaaagggaaccaacaaaacactataacttaaaaggatggggttttggattttgtataataataaaaacaatacagcatatggctagggaaggacatggtgtatataattgtaaaatactgttctaaattattcaggcctatatgcttcccctctccccaggtagttggtcagctgtggactctgtgacctttgtctaaacctgtgttgtaagatcttgggacttcctctctttctatgtctatctcttccccccaacactttctcttcttagtctctctctttatttttcaatctctgaatattttagtctctctctgagtctcattttttaaaatgctcttttagaacgggaaacggctcagatcctgctgtggcacggggcctatgtgtctctgtcgcgtctgctgtgaagcacatgatgctctatttattgtagagagtgactttatttgctttctagaattgtttataacagatggtataagagaggtaataaacagagaaaaatctatgcttgtaaagaatacaaaagttaattttacctactataatatgactgtctgaaacttattttctctctgagaaataaatgttctaatgggcagta

SEQ ID NO: 4527 - protein, 30 aa, Homo sapiens
MVYIIVKYCSKLFRPICFPSPQVVGQLWTL

SEQ ID NO: 4528 - DNA, 1084 bp, Homo sapiens
ggatgtcgagggtggtttgtgtggagctgtgctcgtcagctgggtctgccctcttcccccttttctccttcttctctcctcatggactttttctgcaattgcagtcttaagcttcactctccaccacctggatggcatggcgcctgccaccaaacatcttcctggcctgcgctctgccctgccctgcctagcctctgctactcccacttcccaactccagggaatgcattacttttatttcaaaccctctgcctccttccttctttctcttcaaccccctccccaccttcaccttctcaaaaatggaaggaaaaaaaaactgtgaatggggaatgctgactgacaaaccaacacaactttcagaggcttcagtgtctgttctctggacatttcttttcacctcctgagcaccaaagtcgcagggccagttgcaggccgctgattgccatgttgatttttaacctgatattctttttaattgttttaaatttttcataggggagttttggacaaaacagtcactggggagatcactgccatttttacacacttgactttttaaaaatacaaccaaccaaccaccacaacttcttatacatttgggacatgagccagagtttaaaagggaaccaacaaaacactataacttaaaaggatggggttttggattttgtataataataaaaacaatacagcatatggctagggaaggacatggtgtatataattgtaaaatactgttctaaattattcaggcctatagtttccattactggagtcctccattgtgtggccacacagtgtcgttgatttaaaggagccagtgcttcccctctccccaggtagttggtcagctgtggactctgtgacctttgtctaaacctgtgaagcacatgatgctctatttattgtagagagtgactttatttgctttctagaattgtttataacagatggtataagagaggtaataaacagagaaaaatctatgcttgtaaagaatacaaaagttaattttacctactataatatgactgtctgaaacttattttctctctgagaaataaatgttctaatgggcagt

SEQ ID NO: 4529 - protein, 85 aa, Homo sapiens
MDFFCNCSLKLHSPPPGWHGACHQTSSWPALCPALPSLCYSHFPTPGNALLLFQTLCLLPSFSSTPSPPSPSQKWKEKKTVNGEC

SEQ ID NO: 4530 - DNA, 2304 bp, Homo sapiens
gaacaacatgataagcaagaaggaaataatagcttttcaaaaaaaatagccaaggaagttagagtcacaaaatacttggttccctattgaaacttaagataacatcttaatatatgttcctgagttgtttttcagaaacccaggcccccagcaaatggaaaatgccatccactggcacagagacttcagttgggagccgaggactgaactcagaccaccattctttgttcaacatttcttcctgaggggcctggaggaagtcacacccacaggccagagctcaacattcctttctgctgaccccaggtttttagacaaagctttgcctccttaaccaatcacaaatcagaggatctttgaatccacctatgacctgcgggccccgcttcgagatgtcccacccttttaggtcaaaccaatgcacagtttccatgtattgatttatgactttgcctgtaacctctgcctccctgcctttaaaaacccttacctgtgagccaccctggagttcggggcttaagcatgagctgcccgattctccttgcttggcaccctgcagtaaatgcctcactttctcttgctgcaaatcccaatgtcagtgcttggctttgctgcacctggtgggcagacccaagtttggcaacagagtctgtgggagaaagtgctgtcagaggaacatgctggagcagccagattatagaagaaagaagtatcgttatggttaagtctgtgagcagatttgaggagaagctaacgaatggcaccaagtgtgttcagcatctccccttctagggtgtcatctgacagatgtgttatctgacagatgtgctgctcatgccttctgcacctgaggtcagggatgctcacacagaatgggttgtaactgcataaggtcgggagccccctctacatccaccaaatagaggatgagttgagtatgcagataataaagcagaataaggaaaggctttttatgaactgacagggaaagactatcaagaaatactaagttaaaaaaaaaaacaaaaccctcagtgccaaacagtacatataggatgccaccattttttttgtctaaaaaatggggaagaatatctatggaatatactcatttatatatgaattgaatattctaaagctagttgcaagaaactagtacccttacttttctctaggaaggaaaactgggaaatagtaggaagaggattatcactgtatatccttttgtaccctttgattttgagaccatgtaaatgcaattatctaagagagagagagaggaaggaggaggaggagaaaaaggaggtggaagaggaagggagagaaagaaacgctgtgcatgggctctagaatcagacggacttgtgaattccagctccactgcttcccagctgtgtgaccttgcccaagctactcaacctctctggggctcaatctgtgcaggaaaggggcatgacaattacataatgcctccaacccacctggactgttgggagattgagactaatgagtttaaagctcttagctagaaatggttgctgtagatgtttagccagccctggcttcacactctccagaccagcttccaaacttcctggagggcacatgcaattcatcttttcctttcccatgcaattccccaggcaccagtccatggcactccctatgcctgcaggataccacatcaaagcagagttgggggaggtgagtgtcttgagtcaaatgcgataccagcccccatgcttcctcccagagcaaagccccctgcagactaactgctgggctctctggtagtagggtcctgctctactgaaccccacatccctttatcccaggctgcacctccttcctcagatgaaaatagcaattctcaaacacaagtgcgcatctgaatttctggtgcagggccaattcctgggcccaccccaggactttgttttgcccactgagttgtcaaagatggagctcttgccacctctcaggcagtaggtccctcaccctttacaatccacatctctccccagttacacactggttcccaaacatgtccaaatctttcctccctcactctccatgcttctgattttgtagatctctccttcaagaatcttcgcaccactgccctccagcctgggtgacagagcaagaaccctgatcaaaaaaaaaaaaaaaaaaggaaagaaagaaagaaggaaagaaaaggaagggaggaagggagggggagagagagagagaaacagaaagaaagggaaggaaggaagggaaggaaatgaaggaaggaaggaaaggaaggaaggaagaaag

SEQ ID NO: 4531 - protein, 95 aa, Homo sapiens
MSLKLLARNGCCRCLASPGFTLSRPASKLPGGHMQFIFSFPMQFPRHQSMALPMPAGYHIKAELGEVSVLSQMRYQPPCFLPEQSPLQTNCWALW

SEQ ID NO: 4532 - DNA, 2367 bp, Homo sapiens
agacacaaaatcagccagggggagcccacattggagggcagtccacaatggaaggcttcttggaggaggagatgattgagctgcttctactaagatgagtatctcagagtcctcaacgtgggtgtggccgaggtgaagaaatccttcctggggcccttgtccccgtcctgtaagatggtgcagatgatgaggcagtttctgtaccgggtcctgcccgaggactcctacaaggtcaccacggggaagctccatgtgagcctcacccgcttaacggacggggagaatgtggtggtttcagagttcacgtccaaggaggagctcattgaggccctatactgcagctgcttcgtcccggtgtactgtggcctcatccccccgacttaccgcggtgtgaggtacatcgatgggggcttcacgggcatgcagccctgtgccttctggaccgacgccatcaccatctccaccttcagtgggcagcaggacatctgtccccgggactgcccggccatcttccacgacttccgcatgttcaactgctccttccagttctccctggagaacatcgccaggatgacccacgcattgttccccccggacctggtgatcctgcacgattactactaccgagggtacgaggatgcagttttgtacttgaggcggctgaatgctgtttatcttaattcttcctccaagagagtgattttcccccgggtggaagtgtactgccagatagaactcgcccttggcaatgagtgccctgaacgcagtcaaccaagccttcgagcacggcaggccagtctggaaggagccacacaacctcacaaggagtgggttcccaaaggggatggaaggggcagccatggtccgcctgtgtcccaacctgtgcagacacttgaattcacatgcgagtcacctgtttcagcaccagtctctccacttgagcagccacctgcacagccactggcctcttcaactccactttctctaagtggcatgccacctgtatcattcccagctgtgcacaagccacccagctccacacctggttcatcactgcccaccccaccacctggactgtcacctctgtcacctcagcagcaggtacaaccgtctggatcaccagccagatccctacactctcaggcacccacttcacccaggccatccctggggccttcaactgtgggggcacctcaaacactgccccgaagttctctttcagccttccctgctcagccacctgtggaggaactaggccaagaacagccccaagctgtagctcttcttgtctcttcaaaaccaaaaagcgccgtgcctctggttcatgtgaaggaaaccgtcagcaagccttatgtaacggagagccctgctgaagactcaaactgggtgaataaggtcttcaagaagaacaagcaaaagacaagtggcaccagaaaaggcttcccaagacattcgggatccaaaaaaccaagcagcaaagtgcagtgagcatgtctaatgttccttaaatcccacggagaggagcagctttgggaactgtgttcagagagattccgaggaatagaggagagtgtaagggagtagggggtgcagtgggagattgggctttggaacagacacatccgacataaaattcctgctctgccacagctccactcagggatcatggttgggacacttgctctccctgagcctccatttcctgtaaaatggggatgataccacttcataaagttgtgagagttaaatgtgatcgatgatgtaaattgcttcatagaatgcagaatgtgtaatagctcacaataagtaggtattatgtttacatattatgtttgtatttatgctacttaaatacaaaactggacaggccaggcatggtggctcatgcctgtaatcccagcactttgggaggctgaggtaggtggaaaacctgaggtcaggagttcaagaacagcctgaccaacatggtgaaactccatctctactaaaaatacaaaaattaaccaggcttgatggtgtgcacctgtaatctcagctactcgggaggctgaggcaagagaatcgcttgaacccaggaggcagaggttgcagtgcaccaagactgcgccattgcactccagcccgggcaacaagagcgaaaccccatctcgaaaaaaaacaaaacaaaactagacaagtgagtgcctacgtgacactcaaatgttgccagcatacagttaagggccctagtcaatgtaggcctgcttcttatagctttttgactatattatgctgtctttgacttagtcagtcaacacttattgagcacctactaagtgccaaacactctcctggactctggcaaaataaaaaatgaattaaaactct

SEQ ID NO: 4533 - protein, 437 aa, Homo sapiens
MVQMMRQFLYRVLPEDSYKVTTGKLHVSLTRLTDGENVVVSEFTSKEELIEALYCSCFVPVYCGLIPPTYRGVRYIDGGFTGMQPCAFWTDAITISTFSGQQDICPRDCPAIFHDFRMFNCSFQFSLENIARMTHALFPPDLVILHDYYYRGYEDAVLYLRRLNAVYLNSSSKRVIFPRVEVYCQIELALGNECPERSQPSLRARQASLEGATQPHKEWVPKGDGRGSHGPPVSQPVQTLEFTCESPVSAPVSPLEQPPAQPLASSTPLSLSGMPPVSFPAVHKPPSSTPGSSLPTPPPGLSPLSPQQQVQPSGSPARSLHSQAPTSPRPSLGPSTVGAPQTLPRSSLSAFPAQPPVEELGQEQPQAVALLVSSKPKSAVPLVHVKETVSKPYVTESPAEDSNWVNKVFKKNKQKTSGTRKGFPRHSGSKKPSSKVQ

SEQ ID NO: 4534 - DNA, 3739 bp, Homo sapiens
actcagaaaattgccagcaccaaagtagtggcatcttctccctgggagagctgggtctgacttctcactggacacaacttccagctgacagggagcagagcctaacacagagacctcttgtctgaagatcccagcccagggtgttcaggacagaagcgatttctgtggtccaagcccgatggagaatccaaggtgcccaaggaggcccctggcggagaagaaagccaggtctctggacaggccgcaggcccccgggaaaggctcggagtcgtgggactgccattggctctccctgcccactgccccctccaggaaggcgcttcactggacgaccagtgattgggccagacattcagacagcccagctccatctgcagaggctcactgcaccaccgctgcagcccccactcccgaggagaccggagattttctccccagcgagcagaggccttcgcaagacaccaagaaggggtggctgaagaccatgctgaacttcttcgtgaggacgggccctgaggagcccagagaaaaggccagcaggaggccaagggggaaggagggtatctcccagcatccggagcccctggaagcagcaggggagccagccctcaggaagaaagcccaccacgacaagaagcccagccgcaagaagcaaggtcacaagaaacacgcggccgaggtgactaaggcagctcaagaccaggaggccagaggccgagaggaagggttgtccaaggcagctgctgccttgcgctccggggaggctgacctgggcccagctcgcaggggtggggaagattctgatcaccagtccttcctcatcaaagtggatggtactggagctttggatgtttctccccatgccacaggtcatcagcaagaagaggagctcaaaaagcctgaccaggatgctatcattcagatgatagtggaattgctcaaaagagtgggagaccagtgggaagaagagcaatctctggcctcacagctgggggtggccctgccaaacccagcaccagctgttaggaagaaatcccaagagaaaaagacaagcctcaagagaacctcaaagacaaaccccaagaaacacggctccgaggaggccaagaggggggctgcagatgtttccagtccagaggcctggccacccaagaagtccagctttctgcccctgtgtgtcagcggccatcggccttccatctccagcagctatggcttggaagaacctaaagtccaggaggccccatctacagaggctggggctccaggtccctccgtgcttcccaccccatcagagagccaggaacctggagaggagcttccgctggacagagcctcggaatacaaagaattcattcagaagatcatttccatgctccaagatgcagaagaacagcaaggagaggagcaacctcaagtccagcaggaagaggtgggtgtagaaaacccggccccacactgcagaaggaaatctcaagaaaaaaggtcgagcttcaggagagcgttttaccataagaaacacacctccaaggaacccagaagagcgggggcagcaggggctgccagcccagaggcccgacgacccaagaggcccagctttctgcccctgtgtgttggtggccatcggccctccacctccagcagccttgatccagaagatctcgagtgccgggagcccctgcccgcagaaggggagccagttgtgatctcagaagcaccctcccaggctagaggccacacgccagaaggggcacctcagctgagtggagcatgtgaatctaaggagatcatcatccagaagcttgtggcacttctccaagaagtggatggccaactggggcagcagatcaggcgccaccccagctttaagaggtttttttacgagttctcggactcctccctcagcaagctggtagccaccctgcgcagccaggtggctcactcctctaagctggacaggaaccgcgccaggagactctaccagtttgacgttagcttagctaacaaatttgctggcagcaacagccatgccatgtgcatcctcatgggcctaagagaccactacaattgcacccagttcccatacagggaggaccagccgaacatcacaagtcctaaggttgaaagtccagattgaaagctgtgtcttgcactcaaattcccttgaactagccaaatggttcgcagctttagccaggagaccctgaagatgctctgtgatgtcccaatccctgcttcacaaacgtgatggaagacaagagcagacaatcattctgtgtccataccctagtatctgagaagcacagagcattcttccacaaggcaagacacagaggccatgtctggggaaatcagcactggactgggaatgaggaagactggggctctacctgctgaacctaccccagacttgctgcatgaccctctacacattccccctcctctccagactttggagtctaggatcccacccagaaggcctactgatattttctcagatgttcatgttaactgagtctagtttttaaactaaatttttatttaatctctaaacagaacatccacatgcatccaaacagatatgcatcgaagtgtatcccatcatttcttcagttgaccagtagttcttcatgctcatatggatttgtagatgcctcccaggaactctgcaggcccaagatggaaaaacctagagactggggacacttggtctctcagaatccttctaaccctgtgtcctgtcattctatgactagagaaatggagctgataccttgcacctctcccatctcatgggattggctaggagtcagtgagaaaatggatgtgaagagttctgaaaattacctagtgccatgtccatgtaggcactatagcttcttttgggtagttttcaggaagtggaggagggcttcaatgggctggactgccatggattgttgcacaggggtgcactgctcaagagcaccatactccaggaggtactattcatgtcctagacattgtggatttgtagatttatcatgacagttttgcagctggtagcagtaacatgtcttgagaaaagggctattttttgtatttgcacaaaggtgaagtgtgggggtgccagaggctctgccttctgtatagctcaacagtttcaatagcttgactcaggtgtgaaatttgccacatgttcatatctatgtgcaggaaggacaagactgtagacagacagtcggctcccttggacactgcccagaacatgtggtcatgggggaaagggtgttaaacctggatggcaagtgagatcttgtgacccttggggacatggtattgccgtgttgaacctgctgtcgcaccatggggtaggactggggaggaggagcagtctagagcggagaggccctgggtgcttatatgggactggcctccaacctgaggcactggcttcataagctcaactcagcctatccggaaagccatttagtttttattgctgcttctgagaagtgggggagaggtgagctatttgtggatttgttttaggcagtgttcacaatcatagcacctaaatatgaaggatcagaataagttatgaaatgaaggtcaggaaccttttgtacatagtttcttatttggaatgatgttctttaagccctatgagtatttggtatgtgctcctgatgctggcatctgagtctcatttttgtaccgtgttatttgagcaaataaatacattaacttgcacaaacct

SEQ ID NO: 4535 - protein, 652 aa, Homo sapiens
MENPRCPRRPLAEKKARSLDRPQAPGKGSESWDCHWLSLPTAPSRKALHWTTSDWARHSDSPAPSAEAHCTTAAAPTPEETGDFLPSEQRPSQDTKKGWLKTMLNFFVRTGPEEPREKASRRPRGKEGISQHPEPLEAAGEPALRKKAHHDKKPSRKKQGHKKHAAEVTKAAQDQEARGREEGLSKAAAALRSGEADLGPARRGGEDSDHQSFLIKVDGTGALDVSPHATGHQQEEELKKPDQDAIIQMIVELLKRVGDQWEEEQSLASQLGVALPNPAPAVRKKSQEKKTSLKRTSKTNPKKHGSEEAKRGAADVSSPEAWPPKKSSFLPLCVSGHRPSISSSYGLEEPKVQEAPSTEAGAPGPSVLPTPSESQEPGEELPLDRASEYKEFIQKIISMLQDAEEQQGEEQPQVQQEEVGVENPAPHCRRKSQEKRSSFRRAFYHKKHTSKEPRRAGAAGAASPEARRPKRPSFLPLCVGGHRPSTSSSLDPEDLECREPLPAEGEPVVISEAPSQARGHTPEGAPQLSGACESKEIIIQKLVALLQEVDGQLGQQIRRHPSFKRFFYEFSDSSLSKLVATLRSQVAHSSKLDRNRARRLYQFDVSLANKFAGSNSHAMCILMGLRDHYNCTQFPYREDQPNITSPKVESPD

SEQ ID NO: 4536 - DNA, 1452 bp, Homo sapiens
gtttcccggaaggatagcgattaccggagcgcctcgcgcgcctgcccgcctgcggaggacccgggcgcacacgccttggcgcttctcgaaagagatttcctcccacgcgaccttccagttctcggagccaggttaggggtttggcggaggaggactgcggggcgcgggcctagggccccagcagccacagccaggggagcgctcaagacagaaagccggtggcttcctcacctccacctgtaatgcaggagggagaattggctatttctcctataagccctgtggcagccatgcctcccctaggcacccacgtgcaagccagatgtgaagctcaaattaacctgctgggtgaaggggggatctgcaagctgccaggaagactccgtgacgtcctgtatgagctgctccagtacatcaagacccagcggcgagccctggtgtgtgggcccttttttggagggatcttcaggctgaagacgcccacccagcactctccagtccccccggaagaggtgactggcccctctcagatggacacccgaaggggccacctgctgcagccaccagacccagggcttaccagcaacttcggccacctggatgaccctggcctggcaaggtggacccctggcaaggaggagtccctcaacttatgtcactgtgcagagctcggctgcaggacccagggggtctgttccttccccgcgatgccgcaggcccccattgacggcaggatcgctgactgccgcctgctgtgggattacgtgtatcagctgctccttgatacccgatatgagccctacatcaagtgggaagacaaggacgccaagatcttccgagttgtggatccaaatgggctcgccagactctggggaaatcacaagaaccgggtgaacatgacctacgagaagatgtctcgtgccctgcgccactattataagcttaatatcattaagaaggaaccggggcagaaactcctgttcagaaatggacttcagctgatcttcatattcatatggagtttccagtgaccccaaatagccaaaacagtcttggaaagaaaaacaaagttggaggacccacacttcctgattttgaaacttgctacaaagctatagtactcaacaaagattggtaatggcataaggatatagattaagaacagttttttcaacaaatagtgttgggacaatgggtgtccacatgcaaaagaataaagttgtccccttaccttacaccatctccaaaaattaactcaaaatatgtcaaagacataaacgtaagagctaaaactgtaaaactcctagaataaaacataggagtaaatcttcatgaccttggattaggccattgtgtcttaaatataacaccaaaagaataagtaataaaaaaatagataaattgaactccatcaaaattaaaagcctttgtgcttcataggacaccatcaag

SEQ ID NO: 4537 - protein, 262 aa, Homo sapiens
MQEGELAISPISPVAAMPPLGTHVQARCEAQINLLGEGGICKLPGRLRDVLYELLQYIKTQRRALVCGPFFGGIFRLKTPTQHSPVPPEEVTGPSQMDTRRGHLLQPPDPGLTSNFGHLDDPGLARWTPGKEESLNLCHCAELGCRTQGVCSFPAMPQAPIDGRIADCRLLWDYVYQLLLDTRYEPYIKWEDKDAKIFRVVDPNGLARLWGNHKNRVNMTYEKMSRALRHYYKLNIIKKEPGQKLLFRNGLQLIFIFIWSFQ

SEQ ID NO: 4538 - DNA, 1416 bp, Homo sapiens
gcctagggccccagcagccacagccaggggagcgctcaagacagaaagccggtggcttcctcacctccacctgtaatgcaggcatccagcccgcactgtggagcagggaggacgtgctgcactggctgcgctgggcagagcaggagtactctctgccatgcaccgcggagcacgggttcgagatgaacggacgcgccctctgcatcctcaccaaggacgacttccggcaccgtgcgcccagctcaggtgacgtcctgtatgagctgctccagtacatcaagacccagcggcgagccctggtgtgtgggcccttttttggagggatcttcaggctgaagacgcccacccagcactctccagtccccccggaagaggtgactggcccctctcagatggacacccgaaggggccacctgctgcagccaccagacccagggcttaccagcaacttcggccacctggatgaccctggcctggcaaggtggacccctggcaaggaggagtccctcaacttatgtcactgtgcagagctcggctgcaggacccagggggtctgttccttccccgcgatgccgcaggcccccattgacggcaggatcgctgactgccgcctgctgtgggattacgtgtatcagctgctccttgatacccgatatgagccctacatcaagtgggaagacaaggacgccaagatcttccgagttgtggatccaaatgggctcgccagactctggggaaatcacaagaaccgggtgaacatgacctacgagaagatgtctcgtgccctgcgccactattataagcttaatatcattaagaaggaaccggggcagaaactcctgttcagatttctaaagactccgggaaagatggtccaggacaagcacagccacctggagccgctggagagccaggagcaggacagaatagagttcaaggacaagaggccagaaatctctccgtgaggggcaggtggactccaggcacccggtaccgatggggcagggaccgagtctcccatgaaggcagactcctcctcccagcagagcagcaggatccccagccagactctgtacccacaggattacagccattgcttgggaaggctgggaggcctcccatccaggacactgggggcaggagtgtcatcttttgggcagggcaatcctggggctaaatgaggtacaggggaatggactctcccctactgcacccctgggagaggaagccaggcaccgatagagcacccagccccacccctgtaaatggaatttaccagatgaagggaatgaagtccctcactgagcctcagatttcctcacctgtgaaatgggctgaggcaggaaatgggaaaaagtgttagtgcttccaggcggcactgacagcctcagtaacaataaaaacaatggtagctga

SEQ ID NO: 4539 - protein, 260 aa, Homo sapiens
MNGRALCILTKDDFRHRAPSSGDVLYELLQYIKTQRRALVCGPFFGGIFRLKTPTQHSPVPPEEVTGPSQMDTRRGHLLQPPDPGLTSNFGHLDDPGLARWTPGKEESLNLCHCAELGCRTQGVCSFPAMPQAPIDGRIADCRLLWDYVYQLLLDTRYEPYIKWEDKDAKIFRVVDPNGLARLWGNHKNRVNMTYEKMSRALRHYYKLNIIKKEPGQKLLFRFLKTPGKMVQDKHSHLEPLESQEQDRIEFKDKRPEISP

SEQ ID NO: 4540 - DNA, 1554 bp, Homo sapiens
gtttcccggaaggatagcgattaccggagcgcctcgcgcgcctgcccgcctgcggaggacccgggcgcacacgccttggcgcttctcgaaagagatttcctcccacgcgaccttccagttctcggagccaggttaggggtttggcggaggaggactgcggggcgcgggcctagggccccagcagccacagccaggggagcgctcaagacagaaagccggtggcttcctcacctccacctgtaatgcaggagggagaattggctatttctcctataagccctgtggcagccatgcctcccctaggcacccacgtgcaagccagatgtgaagctcaaattaacctgctgggtgaaggggggatctgcaagctgccaggaagactccgtgacgtcctgtatgagctgctccagtacatcaagacccagcggcgagccctggtgtgtgggcccttttttggagggatcttcaggctgaagacgcccacccagcactctccagtccccccggaagaggtgactggcccctctcagatggacacccgaaggggccacctgctgcagccaccagacccagggcttaccagcaacttcggccacctggatgaccctggcctggcaaggtggacccctggcaaggaggagtccctcaacttatgtcactgtgcagagctcggctgcaggacccagggggtctgttccttccccgcgatgccgcaggcccccattgacggcaggatcgctgactgccgcctgctgtgggattacgtgtatcagctgctccttgatacccgatatgagccctacatcaagtgggaagacaaggacgccaagatcttccgagttgtggatccaaatgggctcgccagactctggggaaatcacaagaaccgggtgaacatgacctacgagaagatgtctcgtgccctgcgccactattataagcttaatatcattaagaaggaaccggggcagaaactcctgttcagatttctaaagactccgggaaagatggtccaggacaagcacagccacctggagccgctggagagccaggagcaggacagaatagagttcaaggacaagaggccagaaatctctccgtgaggggcaggtggactccaggcacccggtaccgatggggcagggaccgagtctcccatgaaggcagactcctcctcccagcagagcagcaggatccccagccagactctgtacccacaggattacagccattgcttgggaaggctgggaggcctcccatccaggacactgggggcaggagtgtcatcttttgggcagggcaatcctggggctaaatgaggtacaggggaatggactctcccctactgcacccctgggagaggaagccaggcaccgatagagcacccagccccacccctgtaaatggaatttaccagatgaagggaatgaagtccctcactgagcctcagatttcctcacctgtgaaatgggctgaggcaggaaatgggaaaaagtgttagtgcttccaggcggcactgacagcctcagtaacaataaaaacaatggtagctga

SEQ ID NO: 4541 - protein, 286 aa, Homo sapiens
MQEGELAISPISPVAAMPPLGTHVQARCEAQINLLGEGGICKLPGRLRDVLYELLQYIKTQRRALVCGPFFGGIFRLKTPTQHSPVPPEEVTGPSQMDTRRGHLLQPPDPGLTSNFGHLDDPGLARWTPGKEESLNLCHCAELGCRTQGVCSFPAMPQAPIDGRIADCRLLWDYVYQLLLDTRYEPYIKWEDKDAKIFRVVDPNGLARLWGNHKNRVNMTYEKMSRALRHYYKLNIIKKEPGQKLLFRFLKTPGKMVQDKHSHLEPLESQEQDRIEFKDKRPEISP

SEQ ID NO: 4542 - DNA, 1488 bp, Homo sapiens
gtttcccggaaggatagcgattaccggagcgcctcgcgcgcctgcccgcctgcggaggacccgggcgcacacgccttggcgcttctcgaaagagatttcctcccacgcgaccttccagttctcggagccaggttaggggtttggcggaggaggactgcggggcgcgggcctagggccccagcagccacagccaggggagcgctcaagacagaaagccggtggcttcctcacctccacctgtaatgcaggagggagaattggctatttctcctataagccctgtggcagccatgcctcccctaggcacccacgtgcaagccagatgtgaagctcaaattaacctgctgggtgaaggggggatctgcaagctgccaggaagactccgcatccagcccgcactgtggagcagggaggacgtgctgcactggctgcgctgggcagagcaggagtactctctgccatgcaccgcggagcacgggttcgagatgaacggacgcgccctctgcatcctcaccaaggacgacttccggcaccgtgcgcccagctcaggtgacgtcctgtatgagctgctccagtacatcaagacccagcggcgagccctggtgtgtgggcccttttttggagggatcttcaggctgaagacgcccacccagcactctccagtccccccggaagactgccgcctgctgtgggattacgtgtatcagctgctccttgatacccgatatgagccctacatcaagtgggaagacaaggacgccaagatcttccgagttgtggatccaaatgggctcgccagactctggggaaatcacaagaaccgggtgaacatgacctacgagaagatgtctcgtgccctgcgccactattataagcttaatatcattaagaaggaaccggggcagaaactcctgttcagatttctaaagactccgggaaagatggtccaggacaagcacagccacctggagccgctggagagccaggagcaggacagaatagagttcaaggacaagaggccagaaatctctccgtgaggggcaggtggactccaggcacccggtaccgatggggcagggaccgagtctcccatgaaggcagactcctcctcccagcagagcagcaggatccccagccagactctgtacccacaggattacagccattgcttgggaaggctgggaggcctcccatccaggacactgggggcaggagtgtcatcttttgggcagggcaatcctggggctaaatgaggtacaggggaatggactctcccctactgcacccctgggagaggaagccaggcaccgatagagcacccagccccacccctgtaaatggaatttaccagatgaagggaatgaagtccctcactgagcctcagatttcctcacctgtgaaatgggctgaggcaggaaatgggaaaaagtgttagtgcttccaggcggcactgacagcctcagtaacaataaaaacaatggtagctga

SEQ ID NO: 4543 - protein, 264 aa, Homo sapiens
MQEGELAISPISPVAAMPPLGTHVQARCEAQINLLGEGGICKLPGRLRIQPALWSREDVLHWLRWAEQEYSLPCTAEHGFEMNGRALCILTKDDFRHRAPSSGDVLYELLQYIKTQRRALVCGPFFGGIFRLKTPTQHSPVPPEDCRLLWDYVYQLLLDTRYEPYIKWEDKDAKIFRVVDPNGLARLWGNHKNRVNMTYEKMSRALRHYYKLNIIKKEPGQKLLFRFLKTPGKMVQDKHSHLEPLESQEQDRIEFKDKRPEISP

SEQ ID NO: 4544 - DNA, 1760 bp, Homo sapiens
gtttcccggaaggatagcgattaccggagcgcctcgcgcgcctgcccgcctgcggaggacccgggcgcacacgccttggcgcttctcgaaagagatttcctcccacgcgaccttccagttctcggagccaggttaggggtttggcggaggaggactgcggggcgcgggcctagggccccagcagccacagccaggggagcgctcaagacagaaagccggtggcttcctcacctccacctgtaatgcaggagggagaattggctatttctcctataagccctgtggcagccatgcctcccctaggcacccacgtgcaagccagatgtgaagctcaaattaacctgctgggtgaaggggggatctgcaagctgccaggaagactccgcatccagcccgcactgtggagcagggaggacgtgctgcactggctgcgctgggcagagcaggagtactctctgccatgcaccgcggagcacgggttcgagatgaacggacgcgccctctgcatcctcaccaaggacgacttccggcaccgtgcgcccagctcaggtcagggaaacgcacaggctttcctctaagcgggaaccctggtgacgtcctgtatgagctgctccagtacatcaagacccagcggcgagccctggtgtgtgggcccttttttggagggatcttcaggctgaagacgcccacccagcactctccagtccccccggaagaggtgactggcccctctcagatggacacccgaaggggccacctgctgcagccaccagacccagggcttaccagcaacttcggccacctggatgaccctggcctggcaaggtggacccctggcaaggaggagtccctcaacttatgtcactgtgcagagctcggctgcaggacccagggggtctgttccttccccgcgatgccgcaggcccccattgacggcaggatcgctgactgccgcctgctgtgggattacgtgtatcagctgctccttgatacccgatatgagccctacatcaagtgggaagacaaggacgccaagatcttccgagttgtggatccaaatgggctcgccagactctggggaaatcacaagaaccgggtgaacatgacctacgagaagatgtctcgtgccctgcgccactattataagcttaatatcattaagaaggaaccggggcagaaactcctgttcagatttctaaagactccgggaaagatggtccaggacaagcacagccacctggagccgctggagagccaggagcaggacagaatagagttcaaggacaagaggccagaaatctctccgtgaggggcaggtggactccaggcacccggtaccgatggggcagggaccgagtctcccatgaaggcagactcctcctcccagcagagcagcaggatccccagccagactctgtacccacaggattacagccattgcttgggaaggctgggaggcctcccatccaggacactgggggcaggagtgtcatcttttgggcagggcaatcctggggctaaatgaggtacaggggaatggactctcccctactgcacccctgggagaggaagccaggcaccgatagagcacccagccccacccctgtaaatggaatttaccagatgaagggaatgaagtccctcactgagcctcagatttcctcacctgtgaaatgggctgaggcaggaaatgggaaaaagtgttagtgcttccaggcggcactgacagcctcagtaacaataaaaacaatggtagctga

SEQ ID NO: 4545 - protein, 282 aa, Homo sapiens
MHRGARVRDERTRPLHPHQGRLPAPCAQLRSGKRTGFPLSGNPGDVLYELLQYIKTQRRALVCGPFFGGIFRLKTPTQHSPVPPEEVTGPSQMDTRRGHLLQPPDPGLTSNFGHLDDPGLARWTPGKEESLNLCHCAELGCRTQGVCSFPAMPQAPIDGRIADCRLLWDYVYQLLLDTRYEPYIKWEDKDAKIFRVVDPNGLARLWGNHKNRVNMTYEKMSRALRHYYKLNIIKKEPGQKLLFRFLKTPGKMVQDKHSHLEPLESQEQDRIEFKDKRPEISP

SEQ ID NO: 4546 - DNA, 2325 bp, Homo sapiens
atgcgcacaacctctcttgagacagggggagctgagacagatggaaagggtgatgggtgggcaggcaccaaccccggagcacccagaggcccaggaaaaggtgtcagtcgggatctccgagtagtctggccctgctcaggagagcacagccgctctgatggtggtgcgacggttccggacctgtggggcctcagcggggccaaacggcaggccgagacagtatcggggccgggaaggtcactcacccctaaagggagaggcaccatgcgaggccccttcctatcctatgtgcggagactcacagggtccttcctggtcctgggctcgggaccgtgagagacgcagttggttccgagttcaggactaggggtccccttagatcctcagatcctgcagaatcccggctctgccccagtgggagccaaggccaggtcgccagagggactgtccgccggctggaggctgtgtgcaggacccacgcctcccaggctagcgagcgggcagcgccccggtgctgcgctcccacggggccggcccctgccctgccctgccctgctcctagcccgcagcggcgcaagtggaaccgcatcccgctctttcgttttcgtttcccggaaggatagcgattaccggagcgcctcgcgcgcctgcccgcctgcggaggacccgggcgcacacgccttggcgcttctcgaaagagatttcctcccacgcgaccttccagttctcggagccaggttaggggtttggcggaggaggactgcggggcgcgggcctagggccccagcagccacagccaggggagcgctcaagacagaaagccggtggcttcctcacctccacctgtaatgcaggagggagaattggctatttctcctataagccctgtggcagccatgcctcccctaggcacccacgtgcaagccagatgtgaagctcaaattaacctgctgggtgaaggggggatctgcaagctgccaggaagactccgcatccagcccgcactgtggagcagggaggacgtgctgcactggctgcgctgggcagagcaggagtactctctgccatgcaccgcggagcacgggttcgagatgaacggacgcgccctctgcatcctcaccaaggacgacttccggcaccgtgcgcccagctcaggtgacgtcctgtatgagctgctccagtacatcaagacccagcggcgagccctggtgtgtgggcccttttttggagggatcttcaggctgaagacgcccacccagcactctccagtccccccggaagaggtgactggcccctctcagatggacacccgaaggggccacctgctgcagccaccagacccagggcttaccagcaacttcggccacctggatgaccctggcctggcaaggtggacccctggcaaggaggagtccctcaacttatgtcactgtgcagagctcggctgcaggacccagggggtctgttccttccccgcgatgccgcaggcccccattgacggcaggatcgctgactgccgcctgctgtgggattacgtgtatcagctgctccttgatacccgatatgagccctacatcaagtgggaagacaaggacgccaagatcttccgagttgtggatccaaatgggctcgccagactctggggaaatcacaagaaccgggtgaacatgacctacgagaagatgtctcgtgccctgcgccactattataagcttaatatcattaagaaggaaccggggcagaaactcctgttcagatttctaaagactccgggaaagatggtccaggacaagcacagccacctggagccgctggagagccaggagcaggacagaatagagttcaaggacaagaggccagaaatctctccgtgaggggcaggtggactccaggcacccggtaccgatggggcagggaccgagtctcccatgaaggcagactcctcctcccagcagagcagcaggatccccagccagactctgtacccacaggattacagccattgcttgggaaggctgggaggcctcccatccaggacactgggggcaggagtgtcatcttttgggcagggcaatcctggggctaaatgaggtacaggggaatggactctcccctactgcacccctgggagaggaagccaggcaccgatagagcacccagccccacccctgtaaatggaatttaccagatgaagggaatgaagtccctcactgagcctcagatttcctcacctgtgaaatgggctgaggcaggaaatgggaaaaagtgttagtgcttccaggcggcactgacagcctcagtaacaataaaaacaatggtagctga

SEQ ID NO: 4547 - protein, 341 aa, Homo sapiens; identical to SEQ ID NO: 545

SEQ ID NO: 4548 - DNA, 484 bp, Homo sapiens
agatttctaaagactccgggaaagatggtccaggacaagcacagccacctggagccgctggagagccaggagcaggacagaatagagttcaaggcagactcctcctcccagcagagcagcaggatccccagccagactctgtacccacaggattacagccattgcttgggaaggctgggaggcctcccatccaggacactgggggcaggagtgtcatcttttgggcagggcaatcctggggctaaatgaggtacaggggaatggactctcccctactgcacccctgggagaggaagccaggcaccgatagagcacccagccccacccctgtaaatggaatttaccagatgaagggaatgaagtccctcactgagcctcagatttcctcacctgtgaaatgggctgaggcaggaaatgggaaaaagtgttagtgcttccaggcggcactgacagcctcagtaacaataaaaacaatggtagctga

SEQ ID NO: 4549 - protein, 74 aa, Homo sapiens
MVQDKHSHLEPLESQEQDRIEFKADSSSQQSSRIPSQTLYPQDYSHCLGRLGGLPSRTLGAGVSSFGQGNPGAK

SEQ ID NO: 4550 - DNA, 320 bp, Homo sapiens
cttgccttgctggagaaggggctcaaggcacaggacttgcctcggacttgccaaggaggcttgcaggaggctctttgtctactcctctgtcctcatccaacaaatggttgttccagaaaaaatgcagcaacacctgaactcttctaaagaaaaagaagacaaaatgatctagtgcatctctgccatcctgttgaagatcctatttgaaaaaagggagacacagagaaaggtttttttttttttttaaaagtgatagaataatccaaagttaaaaattcaacacaatggaaaatattaattcaatccatgctgcaaacaag

SEQ ID NO: 4551 - protein, 48 aa, Homo sapiens
LALLEKGLKAQDLPRTCQGGLQEALCLLLCPHPTNGCSRKNAATPELF

SEQ ID NO: 4552 - DNA, 2311 bp, Homo sapiens
tgtcccgctcggggctggaatccgcccgggaggcgcgcgcaggccgcgcagccagaagccgcagccgggaccggctgtgccgcagcggcgcgcgccccccgccccggaccgcgcggccacgcggctgagtcacccagcgcttcacgttaagagtcccctccgcgcgtggcacgccgggaaggccgtgtctggggaccccgtccggggccgcaccgtaaatgggtgtcgcctttcctccagtccactctgcacccaacctcagcgggcgcacttttctgagttgcgcataccctctcaattattaaaggttgcagacggaaaagttagtagttttcggaattgtagaatacgctcgtgcagcgccaggacggctaatgcttacccgaaaatgtggaaccctgatctccccatgcgtggagcgaggttggaggtagcgtagtaagaatactggagttgcttaaacgcatttgctcgaaagtcactaccctggatatacattctggccaaaagaaagggggaaaaactccacatttttctcaaatactgagtttcatgaagagaacctccaacaaatggtatataaaggaaaacaaagcaaacaaaagagggaaactttgcaatttattaactcaagcatgaaaatacagaaaataaagagggctcaacatacttggaaaaggaaaaaacatgaagaaaaaacatgatggcattgtttatgaaactaaagaagttctcaatccatctcccaaagtaacacattgttgcaaatcactgtggttaaaatacagttttcagaaggcatacatgacccaacttgtcagctcccagccagttccagccatgtcaaggaacccagatcataatctactttctcagcccaaggagcatagcattgttcagaagcatcaccaggaggaaataattcacaagttggccatgcagctgagacacattggggacaacattgatcataggatggttcgagaggatcttcaacaggatggcagagatgcactagatcattttgtcttctttttctttagaagagttcaggtgttgctgcattttttctggaacaaccatttgctgtaaaaggaaagtaaaggtcaagtggtcaagttctgttttctttttaccctctgagaaacatgaatcccactgggacagatgggaagaacacccttctccgtctccctctttttgtacccatcactgttggtctacacccagtttgttgaagaactgcgggttcacgagccatttgtctcttcggaggagctagctatgagatgtctgcgatcacatcacggtaaagcccaaggagtaattaggaccccaggaagccttgctgcccagaaaacaccagcgctgtggatggtcccagggctccttgtgaggaaaccttgaacatttccttccaggaatgaaagagaacctcgtcctcaaactaaaggccacagaaatgggcactacctcctggcccactccctgggcaccatgccctctggtgacctgttggctccactcttgtcactcatgtccagatctgcagtgccagcttctccttctcggtgacatgtcacctccctgccccaatcctggctccaaccctctctggaaaatcgaagtgaaacatttgtctctaatactcaaattcaacatatggctcatctcatctaccttcccatttccatgcctagaggccccactactaccactagcaccgttgggtgtttccttctcaggctctgattctacaacatttacgttcttttctcacctttgatcccctcactcctctgtgacccccttcaagtcttccttcaccactccagtgttttcccataccactcgaccctgctcgaaggtatctttccctgctctgtcatcctcttttaggcatgcctgcttaaaatcgggagtgcttagtccttggccaacagtcctgccttctagaagaatgtaagacctgaaagagttatgaatctatcactaggcaaaaacttctcttttcctattgctggatggttttgctattattggttggtgggccctttgcctgtggaatgtatttcactcattctctcctgcacgctgttaggcagttctttcacctgcatgcttcttcttttacctttttgtctacctcatagtccctctctcccctcctttaaaagaattataaatattaggaaagcttgttgttataaattaaaagtttacatatgtatcttgagttcttcataggggaagtgttattttaaaaaattctaaaaatgaaataaatattgttattttattgagcatgaaa

SEQ ID NO: 4553 - protein, 134 aa, Homo sapiens
MKKKHDGIVYETKEVLNPSPKVTHCCKSLWLKYSFQKAYMTQLVSSQPVPAMSRNPDHNLLSQPKEHSIVQKHHQEEIIHKLAMQLRHIGDNIDHRMVREDLQQDGRDALDHFVFFFFRRVQVLLHFFWNNHLL

SEQ ID NO: 4554 - DNA, 5620 bp, Homo sapiens
taacttttccgtctgcaacctttaataattgagagggtatgcgcaactcagaaaagtgcgcccgctgaggttgggtgcagagtggactggaggaaaggcgacacccatttacggtgcggccccggacggggtccccagacacggccttcccggcgtgccacgcgcggaggggactcttaacgtgaagcgctgggtgactcagccgcgtggccgcgcggtccggggcggggggcgcgcgccgctgcggcacagccggtcccggctgcggcttctggctgcgcggcctgcgcgcgcctcccgggcggattccagccccgagcgggacagcgcggcggggagcgacgagatttctctctgatcaaacggacagttcaggactcagaatctaaggatgaatgttcaccgtggcagtgacagtgacaggttattgcggcaggaggccagctgcttagtggatgatactttagctgtagcccaagaaaaagaagcaaacagcctggcttcatctggtcctcataatcttacttatcctctaggtcccaggaatgaagacctctcacttgactatgcctctcagccagcaaatcttcagttccctcacataatgccccttgctgaagacatcaaaggttcttgcttccaaagtgggaataaacggaaccatgaaccttttattgctccagaaagatttggaaacagtagtgtgggctttggcagtaattcccattcccaagcaccagagaaagtgacgcttcttgtagatggcacacgttttgttgtgaatccacagattttcactgctcatccggataccatgctgggaaggatgtttggaccaggaagagagtacaacttcactcggcccaatgagaagggagagtatgagattgctgaaggcatcagtgcaactgtatttcgcacagtgctggattattacaaaaccggtatcatcaattgtcctgatggcatctctatcccagatcttagagatacttgtgattatctctgcattaattttgacttcaacactatccgatgtcaagatctgagtgctttactccatgaactgtctaatgacggtgctcataagcagtttgatcactacctcgaagagctcatcttgcccatcatggtgggctgtgccaagaaaggagaacgagagtgccacattgttgtgctgacggatgaggattctgtggactgggatgaagaccaccctccaccaatgggggaggaatattcccaaattctttatagctccaagctctacagattcttcaaatatattgagaatagggatgttgcaaaaacagtgttaaaggaacggggcctaaaaaacattcgcattggaattgaaggttaccctacctgtaaagaaaaaattaagagaaggcctggcggccggtctgaagtcatctataattatgtacaacgccccttcatccagatgtcatgggaaaaggaagaagggaagagtcgccatgtggatttccagtgtgttcgaagcaaatccctcacgaatctggtagctgctggagatgatgtcttggaggaccaggagatattaatgcatcacccaccccaagtggatgaacttgaccggctaaatgccccactttctcagatggcttctaacgactttcaggattagggccagctgtgggtctactccttgttggagcccatctcacctgggatgcctgcagccagccctccctcgtgatttgtctcaccttgagtaggagacatgcttctcccctaaccttttcctttctgccataattaacatatgtccttttcagtaagtccatgcctctggcaggggatgaagaagtactcactggtaattagctaccatctttgcagcagccctggtaacttgaaaaatttgggtctggtgctgttcattgagtctttgtgtaactgcaaaagcaggaaaggaagtcaagactcctgttgcctcgtgcttagcaaagcagtccttatcctttatactctgttcttgggttttgtttttgtcttgttttataccaggcaaattgcttagtagcaaagggaccaaactgaaaaggtgacaatctctaacttctaaaagcagacaccaatcggatgctcattagaggttaatgaagatgccattcttggtggcctctgcacccaaattgcatctggaaagaactagggtctcattcagaatgtccaaaaggaaattcttaagagcttaaattcagatttgtgtctcattaatgcagtgaacaattcaaaaccacacagattccttggcaggaaggataatggaataacagtgttgatgagacctttttagcttcaaggtttcggagtctaaacaaatggatgattcatttggaatgaaactcacaatgcaagtagaaggacctctccaaatcaggccagttgggttatcctggcttggaatctggtgtgaaaccataggtcttaacactctggagcagcacattgctgtggatatgtccaggagaccttagatatggcttaaaggctttcaagatgaggacagaaattgcttacaattgctcagtttctcaacagaaagactcataagagtgccagcatggggtacatggagtgaagctgggtgggaagcatcatctgcacagtccctgtcctagtgcaggacttttctctgtatgttttcataccatgggatttttggatatcagtgtattttggttcttgaaatagcctaatagctgctcacacattgggtaggaatattataccaatgtcatccccaaaggaagggtgagctgaatggaaattaagcccagtcattttatttgatctattagctctgttatcagtgcatgatcacccagatcaccctcctcagcccacacagtgctgaaccatcttccctcctgttctccatggctattaatagtatagctaaatttagagtgcagagccagatataagtattttggaattatctcccagtttgtggtagaagctgactggaatacaggttgagtatctcttatccaaaatgctagggaccagaaaggtttcagattttttcagattttggaatacttaacagttgagcaccccaaatctgaaaggcttctgaacgtcatgtcagcactcaaaaaagtggattttggagcacttcaaatttcggatttttggatttgggatgctcatcctgtgtaggagaggctactcgattccatttaatgactgtcctagtcataatcatccaaagataaaagccaggtagatgttgaaagctctttccagggctgaaaaagtgttcttacgttctctgcatgtgactagcatcactgtggaaattaatgctctgttcttcactagaatgtagtaagtggttaaactgagctatcccccacctgatgactattggcatccatttgcaaggccaatggcctggattaagggttaggattatttgtagctagaaggtaattttatttctgtgaaactaattggctcatatttgaggttaggtgtggccttgaccttaccagtacatttatacccactaccagttgactagcccagataattgttaaatggtgcttcttttctgcttctcagtagacttccatgccattacaaaggaaatttgaattacctagtgtttgtatattccatgataactatgtataacttctgttacacagcttatgtattgttaacatttaagtgtaaaccatgccacagctaacacttaaaaatgaaaactaattagttcttgcttagggaaaatgccaggtatgaagtatggcatatacttgacactgtcctgtgtaaccctttactttgctcaggctttcaagattgagtcttttttcccccaaattaggttaacatgcatttgaccccaacctgtggggtttgagtaagctggaaatctgtgacggtaggctttctagtgtcacgaggtggtggtgactgaaggaaaagctgggatcacaggttccttctgatggagaggaaggtttatttctatgcccctcccaccaccctccacctagagctcacccaagcctgctccagtcccaggggcaggccattctgcaaaagcaggacctcacagaaacaagggctgggttgaggtcacccccttcagagttggttcctggccagatgggtaagaggcatttgtaattttaaaaatgtgaaacttgggtttggtgttttcttctaagtgcctaaataagcaagccaggctgttgatattttagccagagaaatcggcaagccaagattaacccgaatctgaagtttagaatcttgagtttgcatctgcatcatatcatgctgttttgatgaggaaacatttgccactgaggagttggagggagggcaagacgacagtgttaagtcagatcatttaatggtttcccctaagccctggaaaaatatttgaaagaatggcagcaaaaaggttaagaaagcaagccagatttactgcacaatatgcagtacccagtactactttaaatcccaagagaacagtgtgatgtctaatatatacaggtctatgaaaatactgtggaataagcccaggaaggttagatgtgtttgcaaataagttgcccaaagggtccccctctaagtaaaacaaatattcagaccacaggctttaatgtaaactgtcaaaaagtgggatgtggaggatttttgttaagtgtcaatcgaagttaaaaagcaagggtttttggccaggcgtggtggctcacgcctgtaatcccagcactttgggaggccgaggccggcaaatcacctaaggtcaggagttcgagaccagcctggccaacatggtgaaaccccgtctctactaaaaatacaaaaaaattagcccggtgtggtggcaagtgcctgtagtcccagctacttgggaggctgaggcaggagaactgcttgaacccgggaggtagaggttgcagtgagccacgatcatgccactgcactccagcctgggcaacagagcaagactccatctcaaaaaagaaaaaaaaaaattaaaggttttggctgggtgcagtggctcatgccggtaatcccagcactttgggaggccaaggtgggaggatcacttgaggtcaggagtttcagactggcctgggcaacgtaaaaaattaaaaaaatagccaggcatggacatggtagtgcatacctgtggtcccagccactcaagaggctgagacaggatgattgcttgagcccaggaggatgaggctgcagtgagccatgatgacgctactgcactccagcctggatgacagggcaagaccctgtctcaatattttaagtcaagggtttgtagtaatgtattcagtgccacttcttgccatcactttgcaattattgaaatgggaatactgagctcagaaagcaaatatgatgctttcatgggagatggagccacatttgtgttctgggtgggatcactagtgcaggagaacattacattttcttctgaaggcaaaatgcttgtaggttttgcctctactttgtatttacttttaaaattgcacttgttcacctaccagtgtttacgaaatcctgtatttgggatgctttttctataataaaatattataatttgtgt

SEQ ID NO: 4555 - protein, 419 aa, Homo sapiens; identical to SEQ ID NO: 549

SEQ ID NO: 4556 - DNA, 402 bp, Homo sapiens
ggcacagccggtcccggctgcggcttctggctgcgcggcctgcgcgcgcctcccgggcggattccagccccgagcgggacagcgcggcggggagcgacgagcctcgggtggttcatcccgccggagaggaatggcgagaacctggagtgttgactggcaaaacatttgcagacgcggtttttctggcaattaattggctccattaaaaattaggtagttggtggggacttcctcctgaactctggagccgagcgcattttgctcggtcttttcagccctgtttccgcgtcttccttccctgccacccgcaaattgccagctttcatccgtggctctgagtgcaaaagagctggggaaagccttaaccagcaattttcttttaaataaaactttgctttttat

SEQ ID NO: 4557 - protein, 67 aa, Homo sapiens
HSRSRLRLLAARPARASRADSSPERDSAAGSDEPRVVHPAGEEWREPGVLTGKTFADAVFLAINWLH

SEQ ID NO: 4558 - DNA, 4861 bp, Homo sapiens
gctgcggcttctggctgcgcggcctgcgcgcgcctcccgggcggattccagccccgagcgggacagcgcggcggggagcgacgagatttctctctgatcaaacggacagttcaggactcagaatctaaggatgaatgttcaccgtggcagtgacagtgacaggttattgcggcaggaggccagctgcttagtggatgatactttagctgtagcccaagaaaaagaagcaaacagcctggcttcatctggtcctcataatcttacttatcctctaggtcccaggaatgaaggtgctttactccatgaactgtctaatgacggtgctcataagcagtttgatcactacctcgaagagctcatcttgcccatcatggtgggctgtgccaagaaaggagaacgagagtgccacattgttgtgctgacggatgaggattctgtggactgggatgaagaccaccctccaccaatgggggaggaatattcccaaattctttatagctccaagctctacagattcttcaaatatattgagaatagggatgttgcaaaaacagtgttaaaggaacggggcctaaaaaacattcgcattggaattgaaggttaccctacctgtaaagaaaaaattaagagaaggcctggcggccggtctgaagtcatctataattatgtacaacgccccttcatccagatgtcatgggaaaaggaagaagggaagagtcgccatgtggatttccagtgtgttcgaagcaaatccctcacgaatctggtagctgctggagatgatgtcttggaggaccaggagatattaatgcatcacccaccccaagtggatgaacttgaccggctaaatgccccactttctcagatggcttctaacgactttcaggattagggccagctgtgggtctactccttgttggagcccatctcacctgggatgcctgcagccagccctccctcgtgatttgtctcaccttgagtaggagacatgcttctcccctaaccttttcctttctgccataattaacatatgtccttttcagtaagtccatgcctctggcaggggatgaagaagtactcactggtaattagctaccatctttgcagcagccctggtaacttgaaaaatttgggtctggtgctgttcattgagtctttgtgtaactgcaaaagcaggaaaggaagtcaagactcctgttgcctcgtgcttagcaaagcagtccttatcctttatactctgttcttgggttttgtttttgtcttgttttataccaggcaaattgcttagtagcaaagggaccaaactgaaaaggtgacaatctctaacttctaaaagcagacaccaatcggatgctcattagaggttaatgaagatgccattcttggtggcctctgcacccaaattgcatctggaaagaactagggtctcattcagaatgtccaaaaggaaattcttaagagcttaaattcagatttgtgtctcattaatgcagtgaacaattcaaaaccacacagattccttggcaggaaggataatggaataacagtgttgatgagacctttttagcttcaaggtttcggagtctaaacaaatggatgattcatttggaatgaaactcacaatgcaagtagaaggacctctccaaatcaggccagttgggttatcctggcttggaatctggtgtgaaaccataggtcttaacactctggagcagcacattgctgtggatatgtccaggagaccttagatatggcttaaaggctttcaagatgaggacagaaattgcttacaattgctcagtttctcaacagaaagactcataagagtgccagcatggggtacatggagtgaagctgggtgggaagcatcatctgcacagtccctgtcctagtgcaggacttttctctgtatgttttcataccatgggatttttggatatcagtgtattttggttcttgaaatagcctaatagctgctcacacattgggtaggaatattataccaatgtcatccccaaaggaagggtgagctgaatggaaattaagcccagtcattttatttgatctattagctctgttatcagtgcatgatcacccagatcaccctcctcagcccacacagtgctgaaccatcttccctcctgttctccatggctattaatagtatagctaaatttagagtgcagagccagatataagtattttggaattatctcccagtttgtggtagaagctgactggaatacaggttgagtatctcttatccaaaatgctagggaccagaaaggtttcagattttttcagattttggaatacttaacagttgagcaccccaaatctgaaaggcttctgaacgtcatgtcagcactcaaaaaagtggattttggagcacttcaaatttcggatttttggatttgggatgctcatcctgtgtaggagaggctactcgattccatttaatgactgtcctagtcataatcatccaaagataaaagccaggtagatgttgaaagctctttccagggctgaaaaagtgttcttacgttctctgcatgtgactagcatcactgtggaaattaatgctctgttcttcactagaatgtagtaagtggttaaactgagctatcccccacctgatgactattggcatccatttgcaaggccaatggcctggattaagggttaggattatttgtagctagaaggtaattttatttctgtgaaactaattggctcatatttgaggttaggtgtggccttgaccttaccagtacatttatacccactaccagttgactagcccagataattgttaaatggtgcttcttttctgcttctcagtagacttccatgccattacaaaggaaatttgaattacctagtgtttgtatattccatgataactatgtataacttctgttacacagcttatgtattgttaacatttaagtgtaaaccatgccacagctaacacttaaaaatgaaaactaattagttcttgcttagggaaaatgccaggtatgaagtatggcatatacttgacactgtcctgtgtaaccctttactttgctcaggctttcaagattgagtcttttttcccccaaattaggttaacatgcatttgaccccaacctgtggggtttgagtaagctggaaatctgtgacggtaggctttctagtgtcacgaggtggtggtgactgaaggaaaagctgggatcacaggttccttctgatggagaggaaggtttatttctatgcccctcccaccaccctccacctagagctcacccaagcctgctccagtcccaggggcaggccattctgcaaaagcaggacctcacagaaacaagggctgggttgaggtcacccccttcagagttggttcctggccagatgggtaagaggcatttgtaattttaaaaatgtgaaacttgggtttggtgttttcttctaagtgcctaaataagcaagccaggctgttgatattttagccagagaaatcggcaagccaagattaacccgaatctgaagtttagaatcttgagtttgcatctgcatcatatcatgctgttttgatgaggaaacatttgccactgaggagttggagggagggcaagacgacagtgttaagtcagatcatttaatggtttcccctaagccctggaaaaatatttgaaagaatggcagcaaaaaggttaagaaagcaagccagatttactgcacaatatgcagtacccagtactactttaaatcccaagagaacagtgtgatgtctaatatatacaggtctatgaaaatactgtggaataagcccaggaaggttagatgtgtttgcaaataagttgcccaaagggtccccctctaagtaaaacaaatattcagaccacaggctttaatgtaaactgtcaaaaagtgggatgtggaggatttttgttaagtgtcaatcgaagttaaaaagcaagggtttttggccaggcgtggtggctcacgcctgtaatcccagcactttgggaggccgaggccggcaaatcacctaaggtcaggagttcgagaccagcctggccaacatggtgaaaccccgtctctactaaaaatacaaaaaaattagcccggtgtggtggcaagtgcctgtagtcccagctacttgggaggctgaggcaggagaactgcttgaacccgggaggtagaggttgcagtgagccacgatcatgccactgcactccagcctgggcaacagagcaagactccatctcaaaaaagaaaaaaaaaaattaaaggttttggctgggtgcagtggctcatgccggtaatcccagcactttgggaggccaaggtgggaggatcacttgaggtcaggagtttcagactggcctgggcaacgtaaaaaattaaaaaaatagccaggcatggacatggtagtgcatacctgtggtcccagccactcaagaggctgagacaggatgattgcttgagcccaggaggatgaggctgcagtgagccatgatgacgctactgcactccagcctggatgacagggcaagaccctgtctcaatattttaagtcaagggtttgtagtaatgtattcagtgccacttcttgccatcactttgcaattattgaaatgggaatactgagctcagaaagcaaatatgatgctttcatgggagatggagccacatttgtgttctgggtgggatcactagtgcaggagaacattacattttcttctgaaggcaaaatgcttgtaggttttgcctctactttgtatttacttttaaaattgcacttgttcacctaccagtgtttacgaaatcctgtatttgggatgctttttctataataaaatattataatttgtgt

SEQ ID NO: 4559 - protein, 253 aa, Homo sapiens
MNVHRGSDSDRLLRQEASCLVDDTLAVAQEKEANSLASSGPHNLTYPLGPRNEGALLHELSNDGAHKQFDHYLEELILPIMVGCAKKGERECHIVVLTDEDSVDWDEDHPPPMGEEYSQILYSSKLYRFFKYIENRDVAKTVLKERGLKNIRIGIEGYPTCKEKIKRRPGGRSEVIYNYVQRPFIQMSWEKEEGKSRHVDFQCVRSKSLTNLVAAGDDVLEDQEILMHHPPQVDELDRLNAPLSQMASNDFQD

SEQ ID NO: 4560 - DNA, 3542 bp, Homo sapiens
aaagccgggctgtcccaggctgaggcggttgctcccctgccgggtgtgttagaagcaagttagaggaagaaggtcttggggactacgggcgccaccgagaacccatacgaggcagccgccgacggcgggtcgccggggcggggccagaacggcgccaaggccaaccagaacggcggcaagaactagggggacgcggggcaggtgctgtgggagttggctggacctgtgggatcgacgtctgcgccgtccaggagccgcccaggggagagagcggagactcgggaggaggatgtgcgctccgacccgggcaaggcttcccatccctcccttcctcttctctccttccctccacctgggctcggagtcaggatctgaccgcgggctctgcccaggaagaccgagttccttgagagcgacacctaagcgccggggaagacagggatagaagagacgacagccctttgataagagggtttttagactaacttccacctgtgacgagtgcatggggcctgcgccctgagaggttgcctttccttttcctctcccaccctgggggtttgtggtgatgttaagttctgttaggaccaaggtggatctcagtaaggaggtagagtagatttgtgaacagctgtcggaggtagaatctttgcagacccagagtgggtgggtgtagacactttgccatgggtggtagctttatttgtaatcctcccagtgaaagctttgggaaatccagccctcccaaactcttgcctttcttgtaagactttctaagcgcatggctttgtcgtaagacttctcgtggccatgtgtctcaccctaccgttcgtctcaccaatgaaccagagctgggataccagcaaaaaggacccaaaagactgtttcaccacaattgaagaggtcgtggaccatcccccaaaatgaatcccaacactggaagaccaagagggttgacgtttgctatcttgaaagctgcagcccccgtagagaagatcctagagcagaaggagcacaggctgggctgccatagcatggacccccaaaaagccactgtcatgaagaaatatcctgtgaagaaaatctttgcagggcacctgaactcccaaagccactgaggagaaggtaagggagtactttggtgagtttggggaggtgaatttctccccaggatatggtttatgctccccaccagccaccagtggatgcttttttctgttttccttggctggtggagttgtcagtggagctgctctcacctcctttcttgcctttggagggccgccttttctgagttccctttagggcctgagccaggggaaggcattggccctgagctttgcctgtgtttccagatggaggccattgaactttcagtggatccaaagtctaacaaaagacaatgtcttgttttcgtcaccccccaaagaagaggaacctgtgagaaatattctggagaaatttaacaccatcagtggaagcaaggtgaggagtctctacctccatgtgcctcccctcctgcctctggagaggtagccctttggttaatggcaacccaatagggtaaccaaccatcccattttagcattgagagcattgtgtcctgggagacccttccctggaatgtaaataatcctggttttagcaacaaagtgtggaaggttggaggaaatgcacaaaacccgtaagttttagagggtctgaaagcaacattgtctatcaaatggatacggcacagattattcatctttacttgttgtcacccatttgaccactgatactggcaaccataatttgtagttcagaatggtcatccatccatcgttgcatcattcaaagtgatgtggcttaagtgtatataatgattattaatagttcatcttcgactttgcctgtggattaattggtgtgctttgtaacaagatagtgctagtttaattttttaacattgtgaatattgtgaccatgttttctaagaggtcagataatgagaatggttataataccaatgcaaccatgaccccatcactgaagaagaaggctaaacgactatgtaattttgatgatggatggaaggacacatactactgaactaggaaggtaaataaccaaaacagagcatactacataatatacagaaaaaaatttgagattggacatggtggagaaggggatgtgcaagcacatatggagggcaaatctcacaagtaagatgggacaggtgaatgcttctaaaccaatcaaaaatacctttgtttccccaaaagacaccaatgctcagtcaaaaatagcagctgctgaattagcatgggcataccaggcaaataagcctgcattgtcatagcgttcccttgattgctctatgaaactgagtaaagtttcatttcctgattcaagaattgcagctaaaatatcctctggacaaagaagaagggaaattttttgataacagatgtgttggctccttacagtataaagccaatttctgtcatatctcaccaacaatcctggtttctacagtacatcaattttaagtaatatgccaaatcatggcagcaaaaatatgttccctctagctgttaggtactttgacttgaaaacaggagtttcaaatcatcttcttcatttctgtgaggattttaatgaaactgctgaaatcataaaatattgttgatattttgtctaaatacaaactagacttagctcatctatctgtgtattcgtcagacagtatagatgtaaaattttggcaaattgcattcagtctacaaacttcttaccaaagaaaatgaaaagatcttatccattcaatgccttgtacatcttatatacaacactgctaaaaagggatgtgagttgcttaaatgtgacattgtttgaaatctgaaaggagaaaaaaatcaagaatctgaagtgggccttaaaaaaatcagtaagtcccttgtgactctgatttttatgaatctgtctctcaaaagccagggtgcccccagaagaactgagacaaactgagtttctgaacatttgaaaatgaggagcaggctcaggatccacagggtgtaaccatcccgtgaggccctgcctgagcagccagccagtcagtgaggctcttcaccttacttccatttctctgattccatctatgtacaacttacgaaaacttgcattattatagactgggagttcttaaattggaatctgtgaatctaaaggggccagaggatagaaatcaggaaatctgaaaacttcgatggaaaaaagtttttatttatttccatcaggaaaataggcaacaaaccacagcagtattagtacctgtgtctctgtcatcactaggaatcacagatatccacgttacagatatcttaaaatatttatgtacagcaccactctgaaattatggtaataattagatccaccccctaggtcttgtaatctttaatatgttaataaagaagcacatctattatgtgacagatttaaatgtttaagaatttgatttcaatgaaattgcatttcaataaaattggcttcctttgcaa

SEQ ID NO: 4561 - protein, 64 aa, Homo sapiens [sequence omitted]

SEQ ID NO: 4562 - DNA, 3526 bp, Homo sapiens
gggctgtcccaggctgaggcggttgctcccctgccgggtgtgttagaagcaagttagaggaagaaggtcttggggactacgggcgccaccgagaacccatacgaggcagccgccgacggcgggtcgccggggcggggccagaacggcgccaaggccaaccagaacggcggcaagaactagggggacgcggggcaggtgctgtgggagttggctggacctgtgggatcgacgtctgcgccgtccaggagccgcccaggggagagagcggagactcgggaggaggatgtgcgctccgacccgggcaaggcttcccatccctcccttcctcttctctccttccctccacctgggctcggagtcaggatctgaccgcgggctctgcccaggaagaccgagttccttgagagcgacacctaagcgccggggaagacagggatagaagagacgacagccctttgataagagggtttttagactaacttccacctgtgacgagtgcatggggcctgcgccctgagaggttgcctttccttttcctctcccaccctgggggtttgtggtgatgttaagttctgttaggaccaaggtggatctcagtaaggaggtagagtagatttgtgaacagctgtcggaggtagaatctttgcagacccagagtgggtgggtgtagacactttgccatgggtggtagctttatttgtaatcctcccagtgaaagctttgggaaatccagccctcccaaactcttgcctttcttgtaagactttctaagcgcatggctttgtcgtaagacttctcgtggccatgtgtctcaccctaccgttcgtctcaccaatgaaccagagctgggataccagcaaaaaggacccaaaagactgtttcaccacaattgaagaggtcgtggaccatcccccaaaatgaatcccaacactggaagaccaagagggttgacgtttgctatcttgaaagctgcagcccccgtagagaagatcctagagcagaaggagcacaggctgggctgccatagcatggacccccaaaaagccactgtcatgaagaaatatcctgtgaagaaaatctttgcagggcacctgaactcccaaagccactgaggagaagatggaggccattgaactttcagtggatccaaagtctaacaaaagacaatgtcttgttttcgtcaccccccaaagaagaggaacctgtgagaaatattctggagaaatttaacaccatcagtggaagcaaggtgaggagtctctacctccatgtgcctcccctcctgcctctggagaggtagccctttggttaatggcaacccaatagggtaaccaaccatcccattttagcattgagagcattgtgtcctgggagacccttccctggaatgtaaataatcctggttttagcaacaaagtgtggaaggttggaggaaatgcacaaaacccgtaagttttagagggtctgaaagcaacattgtctatcaaatggatacggcacagattattcatctttacttgttgtcacccatttgaccactgatactggcaaccataatttgtagttcagaatggtcatccatccatcgttgcatcattcaaagtgatgtggcttaagtgtatataatgattattaatagttcatcttcgactttgcctgtggattaattggtgtgctttgtaacaagatagtgctagtttaattttttaacattgtgaatattgtgaccatgttttctaagaggtcagataatgagaatggttataataccaatgcaaccatgaccccatcactgaagaagaaggctaaacgactatgtaattttgatgatggatggaaggacacatactactgaactaggaaggtaaataaccaaaacagagcatactacataatatacagaaaaaaatttgagattggacatggtggagaaggggatgtgcaagcacatatggagggcaaatctcacaagtaagatgggacaggtgaatgcttctaaaccaatcaaaaatacctttgtttccccaaaagacaccaatgctcagtcaaaaatagcagctgctgaattagcatgggcataccaggcaaataagcctgcattgtcatagcgttcccttgattgctctatgaaactgagtaaagtttcatttcctgattcaagaattgcagctaaaatatcctctggacaaagaagaagggaaattttttgataacagatgtgttggctccttacagtataaagccaatttctgtcatatctcaccaacaatcctggtttctacagtacatcaattttaagtaatatgccaaatcatggcagcaaaaatatgttccctctagctgttaggtactttgacttgaaaacaggagtttcaaatcatcttcttcatttctgtgaggattttaatgaaactgctgaaatcataaaatattgttgatattttgtctaaatacaaactagacttagctcatctatctgtgtattcgtcagacagtatagatgtaaaattttggcaaattgcattcagtctacaaacttcttaccaaagaaaatgaaaagatcttatccattcaatgccttgtacatcttatatacaacactgctaaaaagggatgtgagttgcttaaatgtgacattgagactttcataatgaaagcttttggttacttttcaatttcctcaaaaagtgcaaaagcacttatggagatttttgacttcacagaaatggaaggtaacctctttagacgtgtgcctgcaagatggctgtcattgtaagtgagccatagaaacgatgctaaaatgttggcctgccataagatcatattttcaaaggacaagaataatgtcctttgacattgtttgaaatctgaaaggagaaaaaaatcaagaatctgaagtgggccttaaaaaaatcagtaagtcccttgtgactctgatttttatgaatctgtctctcaaaagccagggtgcccccagaagaactgagacaaactgagtttctgaacatttgaaaatgaggagcaggctcaggatccacagggtgtaaccatcccgtgaggccctgcctgagcagccagccagtcagtgaggctcttcaccttacttccatttctctgattccatctatgtacaacttacgaaaacttgcattattatagactgggagttcttaaattggaatctgtgaatctaaaggggccagaggatagaaatcaggaaatctgaaaacttcgatggaaaaaagtttttatttatttccatcaggaaaataggcaacaaaccacagcagtattagtacctgtgtctctgtcatcactaggaatcacagatatccacgttacagatatcttaaaatatttatgtacagcaccactctgaaattatggtaataattagatccaccccctaggtcttgtaatctttaatatgttaataaagaagcacatctattatgtgacagatttaaatgtttaagaatttgatttcaatgaaattgcatttcaataaaattggcttcctttgcaa

SEQ ID NO: 4563 - protein, 64 aa, Homo sapiens [sequence omitted]

SEQ ID NO: 4564 - DNA, 3756 bp, Homo sapiens
gggctgtcccaggctgaggcggttgctcccctgccgggtgtgttagaagcaagttagaggaagaaggtcttggggactacgggcgccaccgagaacccatacgaggcagccgccgacggcgggtcgccggggcggggccagaacggcgccaaggccaaccagaacggcggcaagaactagggggacgcggggcaggtgctgtgggagttggctggacctgtgggatcgacgtctgcgccgtccaggagccgcccaggggagagagcggagactcgggaggaggatgtgcgctccgacccgggcaaggcttcccatccctcccttcctcttctctccttccctccacctgggctcggagtcaggatctgaccgcgggctctgcccaggaagaccgagttccttgagagcgacacctaagcgccggggaagacagggatagaagagacgacagccctttgataagagggtttttagactaacttccacctgtgacgagtgcatggggcctgcgccctgagaggttgcctttccttttcctctcccaccctgggggtttgtggtgatgttaagttctgttaggaccaaggtggatctcagtaaggaggtagagtagatttgtgaacagctgtcggaggtagaatctttgcagacccagagtgggtgggtgtagacactttgccatgggtggtagctttatttgtaatcctcccagtgaaagctttgggaaatccagccctcccaaactcttgcctttcttgtaagactttctaagcgcatggctttgtcgtaagacttctcgtggccatgtgtctcaccctaccgttcgtctcaccaatgaaccagagctgggataccagcaaaaaggacccaaaagactgtttcaccacaattgaagaggtcgtggaccatcccccaaaatgaatcccaacactggaagaccaagagggttgacgtttgctatcttgaaagctgcagcccccgtagagaagatcctagagcagaaggagcacaggctgggctgccatagcatggacccccaaaaagccactgtcatgaagaaatatcctgtgaagaaaatctttgcagggcacctgaactcccaaagccactgaggagaaggtaagggagtactttggtgagtttggggaggtgaatttctccccaggatatggtttatgctccccaccagccaccagtggatgcttttttctgttttccttggctggtggagttgtcagtggagctgctctcacctcctttcttgcctttggagggccgccttttctgagttccctttagggcctgagccaggggaaggcattggccctgagctttgcctgtgtttccagatggaggccattgaactttcagtggatccaaagtctaacaaaagacaatgtcttgttttcgtcaccccccaaagaagaggaacctgtgagaaatattctggagaaatttaacaccatcagtggaagcaaggtgaggagtctctacctccatgtgcctcccctcctgcctctggagaggtagccctttggttaatggcaacccaatagggtaaccaaccatcccattttagcattgagagcattgtgtcctgggagacccttccctggaatgtaaataatcctggttttagcaacaaagtgtggaaggttggaggaaatgcacaaaacccgtaagttttagagggtctgaaagcaacattgtctatcaaatggatacggcacagattattcatctttacttgttgtcacccatttgaccactgatactggcaaccataatttgtagttcagaatggtcatccatccatcgttgcatcattcaaagtgatgtggcttaagtgtatataatgattattaatagttcatcttcgactttgcctgtggattaattggtgtgctttgtaacaagatagtgctagtttaattttttaacattgtgaatattgtgaccatgttttctaagaggtcagataatgagaatggttataataccaatgcaaccatgaccccatcactgaagaagaaggctaaacgactatgtaattttgatgatggatggaaggacacatactactgaactaggaaggtaaataaccaaaacagagcatactacataatatacagaaaaaaatttgagattggacatggtggagaaggggatgtgcaagcacatatggagggcaaatctcacaagtaagatgggacaggtgaatgcttctaaaccaatcaaaaatacctttgtttccccaaaagacaccaatgctcagtcaaaaatagcagctgctgaattagcatgggcataccaggcaaataagcctgcattgtcatagcgttcccttgattgctctatgaaactgagtaaagtttcatttcctgattcaagaattgcagctaaaatatcctctggacaaagaagaagggaaattttttgataacagatgtgttggctccttacagtataaagccaatttctgtcatatctcaccaacaatcctggtttctacagtacatcaattttaagtaatatgccaaatcatggcagcaaaaatatgttccctctagctgttaggtactttgacttgaaaacaggagtttcaaatcatcttcttcatttctgtgaggattttaatgaaactgctgaaatcataaaatattgttgatattttgtctaaatacaaactagacttagctcatctatctgtgtattcgtcagacagtatagatgtaaaattttggcaaattgcattcagtctacaaacttcttaccaaagaaaatgaaaagatcttatccattcaatgccttgtacatcttatatacaacactgctaaaaagggatgtgagttgcttaaatgtgacattgagactttcataatgaaagcttttggttacttttcaatttcctcaaaaagtgcaaaagcacttatggagatttttgacttcacagaaatggaaggtaacctctttagacgtgtgcctgcaagatggctgtcattgtaagtgagccatagaaacgatgctaaaatgttggcctgccataagatcatattttcaaaggacaagaataatgtcctttgacattgtttgaaatctgaaaggagaaaaaaatcaagaatctgaagtgggccttaaaaaaatcagtaagtcccttgtgactctgatttttatgaatctgtctctcaaaagccagggtgcccccagaagaactgagacaaactgagtttctgaacatttgaaaatgaggagcaggctcaggatccacagggtgtaaccatcccgtgaggccctgcctgagcagccagccagtcagtgaggctcttcaccttacttccatttctctgattccatctatgtacaacttacgaaaacttgcattattatagactgggagttcttaaattggaatctgtgaatctaaaggggccagaggatagaaatcaggaaatctgaaaacttcgatggaaaaaagtttttatttatttccatcaggaaaataggcaacaaaccacagcagtattagtacctgtgtctctgtcatcactaggaatcacagatatccacgttacagatatcttaaaatatttatgtacagcaccactctgaaattatggtaataattagatccaccccctaggtcttgtaatctttaatatgttaataaagaagcacatctattatgtgacagatttaaatgtttaagaatttgatttcaatgaaattgcatttcaataaaattggcttcctttgcaa

SEQ ID NO: 4565 - protein, 64 aa, Homo sapiens [sequence omitted]

SEQ ID NO: 4566 - DNA, 770 bp, Homo sapiens
ggtgtgttagaagcaagttagaggaagaaggtcttggggactacgggcgccaccgagaacccaggcggcaagaactagggggacgcggggcaggtgctgtgggagttggctggacctgtgggatcgacgtctgcgccgtccaggagccgcccaggggagagagcggagactcgggaggaggatgtgcgctccgacccgggcaaggcttcccatccctcccttcctcttctctccttccctccacctgggctcggagtcaggatctgaccgcgggctctgcccaggaagaccgagttccttgagagcgacacctaagcgccggggaagacagggatagaagagacgacagccctttgataagagggtttttagactaacttccacctgtgacgagtgcatggggcctgcgccctgagaggttgcctttccttttcctctcccaccctgggggtttgtggtgatgttaagttctgttaggaccaaggtggatctcagtaaggaggtagagtagatttgtgaacagctgtcggaggtagaatctttgcagacccagagtgggtgggtgtagacactttgccatgggtggtagctttatttgtaatcctcccagtgaaagctttgggaaatccagccctcccaaactcttgcctttcttgtaagactttctaagcgcatggctttgtcgtaagacttctcgtggccatgtgtctcaccctaccgttcgtctcaccaatgaaccagagctgggataccagcaaaaaggacccaaa

SEQ ID NO: 4567 - protein, 51 aa, Homo sapiens
MCAPTRARLPIPPFLFSPSLHLGSESGSDRGLCPGRPSSLRATPKRRGRQG

SEQ ID NO: 4568 - DNA, 1005 bp, Homo sapiens
gtttccaggagggagcggcctttgctcagcgcgagacggctgggcgccgagtgggacagcgctggtgcggagactgcttccggactccaggtaccgcgcttggcggcagctggccccagacttctgtcttttcagctgcagtgaaggctcggggctgcagaattgcaaccttgccaatggacctgatcggttttggttatgcagccctcgtgacatttggaagcatttttggatataagcggagaggtggtgttccgtctttgattgctggtctttttgttggatgtttggccggctatggagcttaccgtgtctccaatgacaaacgagatgtaaaagtgtcactgtgtaagtaaggcatttttcctggttacagagactcaaacattggaggtgatctttttgataccctatgctagatatactagaacatatttagtcaaatggcaaatggccatatgcatgtgttgaggctgaatacaacacttattcctttctagaaagacctgataaaaaatgatggtactgctaccaggccttccaactcagaagaatatttctataaaaactcgttactagaaaaattgaattaggaaaagcaaggaattattttcagattttctgctaactctcctaaatgcatatttagcatagtttttacattgctgtggaaataactaaaaaagagacagccttgcattatttcatttaattcacaaacatcttttagattctgcactgccttaagacttaacctaaaaaagcaaggctgacgcttttttagctacttcccttgttaagtttaatgggagaatatccacagaaaaaatggaaacctgtgtgtttaaagtcaccaggacacttgactttcatctcacttgaaagagatacacagtgaagatttagaaaaccataccaaggacattttctctagttgatttattattcaaagtgccttggtcgtgtatggaaaaaaatataaatgaagacaaaattgttctatat

SEQ ID NO: 4569 - protein, 59 aa, Homo sapiens
MDLIGFGYAALVTFGSIFGYKRRGGVPSLIAGLFVGCLAGYGAYRVSNDKRDVKVSLCK

SEQ ID NO: 4570 - DNA, 723 bp, Homo sapiens
gtttccaggagggagcggcctttgctcagcgcgagacggctgggcgccgagtgggacagcgctggtgcggagactgcttccggactccaggtaccgcgcttggcggcagctggccccagacttctgtcttttcagctgcagtgaaggctcggggctgcagaattgcaaccttgccaatggacctgatcggttttggttatgcagccctcgtgacatttggaagcatttttggatataagcggagaggtggtgttccgtctttgattgctggtctttttgttggatgtttggccggctatggagcttaccgtgtctccaatgacaaacgagatgtaaaagtgtcactgtttacagctttcttcctggctaccataatgggtgtgagatttaagaggtccaagaaaataatgcctgctggtttggttgcaggtttaagcctcatgatgatcctgagacttgtcttgttgctgctctgagcatctggaggaacagaaaactaagttcatgtcatcctgctgtaatgggcagagcatattttttttgtatttaaaagataaacttcaatatggaatgctagaaacacaaatagcactgtcacctctaatatgaacattagtttgaggtagtttttttctaaagcaaaaattttaactgttttctaattgtcaagcactattttcattaaaagtgtctaatgaatcatgatatactcttccatttgtt

SEQ ID NO: 4571 - protein, 99 aa, Homo sapiens; identical to SEQ ID NO: 551

SEQ ID NO: 4572 - DNA, 846 bp, Homo sapiens
gtttccaggagggagcggcctttgctcagcgcgagacggctgggcgccgagtgggacagcgctggtgcggagactgcttccggactccaggtaccgcgcttggcggcagctggccccagacttctgtcttttcagctgcagtgaaggctcggggctgcaggctggagtgcagtggcacgatcacagttgattgcaacctctgcctcgcaggttcaagggattttccggtctcagcctcctgagtagctgggattacagacatgcaccaccatgccacgtccggaattgcaaccttgccaatggacctgatcggttttggttatgcagccctcgtgacatttggaagcatttttggatataagcggagaggtggtgttccgtctttgattgctggtctttttgttggatgtttggccggctatggagcttaccgtgtctccaatgacaaacgagatgtaaaagtgtcactgtttacagctttcttcctggctaccataatgggtgtgagatttaagaggtccaagaaaataatgcctgctggtttggttgcaggtttaagcctcatgatgatcctgagacttgtcttgttgctgctctgagcatctggaggaacagaaaactaagttcatgtcatcctgctgtaatgggcagagcatattttttttgtatttaaaagataaacttcaatatggaatgctagaaacacaaatagcactgtcacctctaatatgaacattagtttgaggtagtttttttctaaagcaaaaattttaactgttttctaattgtcaagcactattttcattaaaagtgtctaatgaatcatgatatactcttccatttgtt

SEQ ID NO: 4573 - protein, 112 aa, Homo sapiens [sequence omitted]

SEQ ID NO: 4574 - DNA, 642 bp, Homo sapiens
gtttccaggagggagcggcctttgctcagcgcgagacggctgggcgccgagtgggacagcgctggtgcggagactgcttccggactccaggtaccgcgcttggcggcagctggccccagacttctgtcttttcagctgcagtgaaggctcggggctgcagaattgcaaccttgccaatggacctgatcggttttggttatgcagccctcgtgacatttggaagcatttttggatataagcggagaggtggtgttccgtctttgattgctggtctttttgttggatgtttggccggctatggagcttaccgtgtctccaatgacaaacgagatgtaaaagtgtcactgtttacagctttcttcctggctaccataatgggtgtgagatttaagaggtccaagaaaataatgcctgctggtttggttgcaggtttaagcctcatgatgatcctgagacttgtcttgttgctgctctgagcatctggaggaacagaaaactaagttcatgtcatcctgctgtaatgggcagagcatattttttttgtatttaaaagataaacttcaatatggaattgctatttttttctttaaaaaattttattcttagcacactgttatgtcctaactgaatgtattcagtatt

SEQ ID NO: 4575 - protein, 99 aa, Homo sapiens; identical to SEQ ID NO: 551

SEQ ID NO: 4576 - DNA, 1015 bp, Homo sapiens; identical to SEQ ID NO: 550

SEQ ID NO: 4577 - protein, 99 aa, Homo sapiens; identical to SEQ ID NO: 551

SEQ ID NO: 4578 - DNA, 1138 bp, Homo sapiens
gtttccaggagggagcggcctttgctcagcgcgagacggctgggcgccgagtgggacagcgctggtgcggagactgcttccggactccaggtaccgcgcttggcggcagctggccccagacttctgtcttttcagctgcagtgaaggctcggggctgcaggctggagtgcagtggcacgatcacagttgattgcaacctctgcctcgcaggttcaagggattttccggtctcagcctcctgagtagctgggattacagacatgcaccaccatgccacgtccggaattgcaaccttgccaatggacctgatcggttttggttatgcagccctcgtgacatttggaagcatttttggatataagcggagaggtggtgttccgtctttgattgctggtctttttgttggatgtttggccggctatggagcttaccgtgtctccaatgacaaacgagatgtaaaagtgtcactgtttacagctttcttcctggctaccataatgggtgtgagatttaagaggtccaagaaaataatgcctgctggtttggttgcaggtttaagcctcatgatgatcctgagacttgtcttgttgctgctctgagcatctggaggaacagaaaactaagttcatgtcatcctgctgtaatgggcagagcatattttttttgtatttaaaagataaacttcaatatggaatgctagaaacacaaatagcactgtcacctctaatatgaacattagtttgaggtagtttttttctaaagcaaaaattttaactgttttctaattgtcaagcactattttcattaaaagtgtctaatgaatcatgatatactcttccatttgttgtgtctattttttatatatttggtattttttgaaaattccaaatactcatgtctcaagtaagcttaaactacaacttgtcacataaaggaagtcttaagtggagttcacagaatgataatgtatctatttgtcatttgtgttatatttgaaattattagaaattatgctttttccattttaattgtattgctgccagtgctatttttttctttaaaaaattttattcttagcacactgttatgtcctaactgaatgtattcagtattcaaataaaagacattttggttcaaa

SEQ ID NO: 4579 - protein, 112 aa, Homo sapiens [sequence omitted]

SEQ ID NO: 4580 - DNA, 913 bp, Homo sapiens
gagacggctgggcgccgagtgggacagcgctggtgcggagactgcttccggactccagaattgcaaccttgccaatggacctgatcggttttggttatgcagccctcgtgacatttggaagcatttttggatataagcggagaggtggtgttccgtctttgattgctggtctttttgttggatgtttggccggctatggagcttaccgtgtctccaatgacaaacgagatgtaaaagtgtcactgtttacagctttcttcctggctaccataatgggtgtgagatttaagaggtccaagaaaataatgcctgctggtttggttgcaggtttaagcctcatgatgatcctgagacttgtcttgttgctgctctgagcatctggaggaacagaaaactaagttcatgtcatcctgctgtaatgggcagagcatattttttttgtatttaaaagataaacttcaatatggaatgctagaaacacaaatagcactgtcacctctaatatgaacattagtttgaggtagtttttttctaaagcaaaaattttaactgttttctaattgtcaagcactattttcattaaaagtgtctaatgaatcatgatatactcttccatttgttgtgtctattttttatatatttggtattttttgaaaattccaaatactcatgtctcaagtaagcttaaactacaacttgtcacataaaggaagtcttaagtggagttcacagaatgataatgtatctatttgtcatttgtgttatatttgaaattattagaaattatgctttttccattttaattgtattgctgccagtgctatttttttctttaaaaaattttattcttagcacactgttatgtcctaactgaatgtattcagtattcaaataaaagacattttggttcaaa

SEQ ID NO: 4581 - protein, 99 aa, Homo sapiens; identical to SEQ ID NO: 551

SEQ ID NO: 4582 - DNA, 413 bp, Homo sapiens
caagcattgataacatgtttgaaactctggttcatgaattagtttggttttcagttacagctttcttcctggctaccataatgggtgtgagatttaagaggtccaagaaaataatgcctgctggtttggttgcaggtttaagcctcatgatgatcctgagacttgtcttgttgctgctctgagcatctggaggaacagaaaactaagttcatgtcatcctgctgtaatgggcagagcatattttttttgtatttaaaagataaacttcaatatggaatgctagaaacacaaatagcactgtcacctctaatatgaacattagtttgaggtagtttttttctaaagcaaaaattttaactgttttctaattgtcaagcactattttcattaaaagtgtctaatgaatcatgata

SEQ ID NO: 4583 - protein, 55 aa, Homo sapiens
MFETLVHELVWFSVTAFFLATIMGVRFKRSKKIMPAGLVAGLSLMMILRLVLLLL

SEQ ID NO: 4584 - DNA, 721 bp, Homo sapiens
caagcattgataacatgtttgaaactctggttcatgaattagtttggttttcagttacagctttcttcctggctaccataatgggtgtgagatttaagaggtccaagaaaataatgcctgctggtttggttgcaggtttaagcctcatgatgatcctgagacttgtcttgttgctgctctgagcatctggaggaacagaaaactaagttcatgtcatcctgctgtaatgggcagagcatattttttttgtatttaaaagataaacttcaatatggaatgctagaaacacaaatagcactgtcacctctaatatgaacattagtttgaggtagtttttttctaaagcaaaaattttaactgttttctaattgtcaagcactattttcattaaaagtgtctaatgaatcatgatatactcttccatttgttgtgtctattttttatatatttggtattttttgaaaattccaaatactcatgtctcaagtaagcttaaactacaacttgtcacataaaggaagtcttaagtggagttcacagaatgataatgtatctatttgtcatttgtgttatatttgaaattattagaaattatgctttttccattttaattgtattgctgccagtgctatttttttctttaaaaaattttattcttagcacactgttatgtcctaactgaatgtattcagtattcaaataaaagacattttggttcaaa

SEQ ID NO: 4585 - protein, 55 aa, Homo sapiens; identical to SEQ ID NO: 4583

SEQ ID NO: 4586 - DNA, 1303 bp, Homo sapiens
ttttccctaacttgacccttctttcagtgggagggaactattgagaggaacaaagagcttataaatacattaggacctggaattcggttgtccagccacaaaggtgacagcatttaacaaagcttagagaaacctccaggagactgctaccatggcagagaagcccaagctccactactccaatatacggggcagaatggagtccatccggtggctcctggctgcagctggagtagagtttgaagagaaatttataaaatctgcagaagatttggacaagttaagaaatgatggatatttgatgttccagcaagtgccaatggttgagattgatgggatgaagctggtgcagaccagagccattctcaactacattgccagcaaatacaacctctatgggaaagacataaaggagaaagccctgattgatatgtatatagaaggtatagcagatttgggtgaaatgatccttcttctgccctttagtcaacctgaggaacaagatgccaagcttgccttgatccaagagaaaacaaaaaatcgctacttccctgcctttgaaaaagtcttaaagagccacggacaagactaccttgttggcaacaagctgagccgggctgacattcacctggtggaacttctctactacgtggaagagcttgactctagccttatttccagcttccctctgctgaaggccctgaaaaccagaatcagtaacctgcccacagtgaagaagtttctacagcctggcagcccaaggaagcctcccatggatgagaaatctttagaagaatcaaggaagattttcaggttttaataaaccagccatagaggtcaagaacatgcaagaccagtattctaaagttttgcaacaattaagtgctttacctaagtgttgattgtgcctgttgtgaagctaatgaactctttcaaattatatgctaattaaataatacaactcctattcacccacttagttaaaattgatttcttctcattaggatctgatgtgaattcagttttccaatctcctcctagccaacaattttcttggaattacaaattcagtaaaaatggaaactataaattatgtggtttgtttgacttttccaagaattgccctgtaacatacaatttgtcatacaatctattaaaatgccaatgtaaaaatgcacctctgacattttcaggtatgcacaggagaagagttaccatcctggataatggcataaagacattttcttcttttcctgaacagtcattttatttctgataaaagcattctttctaatgcatttgc

SEQ ID NO: 4587 - protein, 222 aa, Homo sapiens
MAEKPKLHYSNIRGRMESIRWLLAAAGVEFEEKFIKSAEDLDKLRNDGYLMFQQVPMVEIDGMKLVQTRAILNYIASKYNLYGKDIKEKALIDMYIEGIADLGEMILLLPFSQPEEQDAKLALIQEKTKNRYFPAFEKVLKSHGQDYLVGNKLSRADIHLVELLYYVEELDSSLISSFPLLKALKTRISNLPTVKKFLQPGSPRKPPMDEKSLEESRKIFRF

SEQ ID NO: 4588 - DNA, 970 bp, Homo sapiens
ttttccctaacttgacccttctttcagtgggagggaactattgagaggaacaaagagcttataaatacattaggacctggaattcggttgtccagccacaaaggtgacagcatttaacaaagcttagagaaacctccaggagactgctaccatggcagagaagcccaagctccactactccaatatacggggcagaatggagtccatccggtggctcctggctgcagctggagtagagtttgaagagaaatttataaaatctgcagaagatttggacaagttaagaaatgatggatatttgatgttccagcaagtgccaatggttgagattgatgggatgaagctggtgcagaccagagccattctcaactacattgccagcaaatacaacctctatgggaaagacataaaggagaaagccctgattgatatgtatatagaaggtatagcagatttgggtgaaatgatccttcttctgccctttagtcaacctgaggaacaagatgccaagcttgccttgatccaagagaaaacaaaaaatcgctacttccctgcctttgaaaaagtcttaaagagccacggacaagactaccttgttggcaacaagctgagccgggctgacattcacctggtggaacttctctactacgtggaagagcttgactctagccttatttccagcttccctctgctgaaggccctgaaaaccagaatcagtaacctgcccacagtgaagaagtttctacagcctggcagcccaaggaagcctcccatggatgagaaatctttagaagaatcaaggaagattttcaggttttaataaaccagccatagaggtcaagaacatgcaagaccagtattctaaagttttgcaacaattaagtgctttacctaagtgttgattgtgcctgttgtgaagctaatgaactctttcaaattatatgctaattaaataatacaactcctattc

SEQ ID NO: 4589 - protein, 222 aa, Homo sapiens; identical to SEQ ID NO: 4587

SEQ ID NO: 4590 - DNA, 1224 bp, Homo sapiens
gggagagaactattgagaggaacaaagagcttataaatacattaggacctggaattcagttgtcgagccaggacggtgacagcgtttaacaaagcttagagaaacctccaggagactgctatcatggcagagaagcccaagctccactacttcaatgcacggggcagaatggagtccacccggtggctcctggctgcagctggagtagagtttgaagagaaatttataaaatctgcagaagatttggacaagttaagaaatgatggatatttgatgttccagcaagtgccaatggttgagattgatgggatgaagctggtgcagaccagagccattctcaactacattgccagcaaatacaacctctatgggaaagacataaaggagagagccctgattgatatgtatatagaaggtatagcagatttgggtgaaatgatcctccttctgcccgtatgtccacctgaggaaaaagatgccaagcttgccttgatcaaagagaaaataaaaaatcgctacttccctgcctttgaaaaagtcttaaagagccatggacaagactaccttgttggcaacaagctgagccgggctgacattcatctggtggaacttctctactacgtcgaggagcttgactccagtcttatctccagcttccctctgctgaaggccctgaaaaccagaatcagcaacctgcccacagtgaagaagtttctacagcctggcagcccaaggaagcctcccatggatgagaaatctttagaagaagcaaggaagattttcaggttttaataacgcagtcatggaggccaagaacttgcaataccaatgttctaaagttttgcaacaataaagtactttacctaagtgttgattgtgcctgttgtgaagctaatgaactctttcaaattatatgctaattaaataatacaactcctattcgctgacttagttaaaattgatttgttttcattaggatctgatgtgaattcagatttccaatcttctcctagccaaccattttcctggaattaaaaattcagtaaaaaaggaaactatagattatgtggtttgtttgacttttccaagaattgtcccgtaacatacaatttgtcatacaatctattaaaatgtcaatgtagaaatgcacttctgacattttcaggtatgcacaggagaagagttaccatcctggataatggcataaagacattttcttctttt

SEQ ID NO: 4591 - protein, 222 aa, Homo sapiens; identical to SEQ ID NO: 555

SEQ ID NO: 4592 - DNA, 726 bp, Homo sapiens
gattgatatgtatatagaaggtatagcagatttgggtgaaatgatcctccttctgcccgtatgtccacctgaggaaaaagatgccaagcttgccttgatcaaagagaaaataaaaaatcgctacttccctgcctttgaaaaagtcttaaagagccatggacaagactaccttgttggcaacaagctgagccgggctgacattcatctggtggaacttctctactacgtcgaggagcttgactccagtcttatctccagcttccctctgctgaagctctccagaacactggccccccacactgtatctctcactgagaaaaggtggtcccatggccctgaaaaccagaatcagcaacctgcccacagtgaagaagtttctacagcctggcagcccaaggaagcctcccatggatgagaaatctttagaagaagcaaggaagattttcaggttttaataacgcagtcatggaggccaagaacttgcaataccaatgttctaaagttttgcaacaataaagtactttacctaagtgttgattgtgcctgttgtgaagctaatgaactctttcaaattatatgctaattaaataatacaactcctattcgctgacttagttaaaattgatttgttttcattaggatctgatgtgaattcagatttccaatcttctcctagccaaccattttcctggaattaaaaattcagtaaaaaaggaaactatagat

SEQ ID NO: 4593 - protein, 135 aa, Homo sapiens
MYIEGIADLGEMILLLPVCPPEEKDAKLALIKEKIKNRYFPAFEKVLKSHGQDYLVGNKLSRADIHLVELLYYVEELDSSLISSFPLLKLSRTLAPHTVSLTEKRWSHGPENQNQQPAHSEEVSTAWQPKEASHG

SEQ ID NO: 4594 - DNA, 837 bp, Homo sapiens
gcttagagaaacctccaggagactgctatcatggcagagaagcccaagctccactacttcaatgcacggggcagaatggagtccacccggtggctcctggctgcagctggagtagagtttgaagagaaatttataaaatctgcagaagatttggacaagttaagaaatggattgatatgtatatagaaggtatagcagatttgggtgaaatgatcctccttctgcccgtatgtccacctgaggaaaaagatgccaagcttgccttgatcaaagagaaaataaaaaatcgctacttccctgcctttgaaaaagtcttaaagagccatggacaagactaccttgttggcaacaagctgagccgggctgacattcatctggtggaacttctctactacgtcgaggagcttgactccagtcttatctccagcttccctctgctgaaggccctgaaaaccagaatcagcaacctgcccacagtgaagaagtttctacagcctggcagcccaaggaagcctcccatggatgagaaatctttagaagaagcaaggaagattttcaggttttaataacgcagtcatggaggccaagaacttgcaataccaatgttctaaagttttgcaacaataaagtactttacctaagtgttgattgtgcctgttgtgaagctaatgaactctttcaaattatatgctaattaaataatacaactcctattcgctgacttagttaaaattgatttgttttcattaggatctgatgtgaattcagatttccaatcttctcctagccaaccattttcctggaattaaaaattcagtaaaaaaggaaactatagat

SEQ ID NO: 4595 - protein, 129 aa, Homo sapiens
MYIEGIADLGEMILLLPVCPPEEKDAKLALIKEKIKNRYFPAFEKVLKSHGQDYLVGNKLSRADIHLVELLYYVEELDSSLISSFPLLKALKTRISNLPTVKKFLQPGSPRKPPMDEKSLEEARKIFRF

SEQ ID NO: 4596 - DNA, 1000 bp, Homo sapiens
gggagagaactattgagaggaacaaagagcttataaatacattaggacctggaattcagttgtcgagccaggacggtgacagcgtttaacaaagcttagagaaacctccaggagactgctatcatggcagagaagcccaagctccactacttcaatgcacggggcagaatggagtccacccggtggctcctggctgcagctggagtagagtttgaagagaaatttataaaatctgcagaagatttggacaagttaagaaatgatggatatttgatgttccagcaagtgccaatggttgagattgatgggatgaagctggtgcagaccagagccattctcaactacattgccagcaaatacaacctctatgggaaagacataaaggagagagcccttccacctgaggaaaaagatgccaagcttgccttgatcaaagagaaaataaaaaatcgctacttccctgcctttgaaaaagtcttaaagagccatggacaagactaccttgttggcaacaagctgagccgggctgacattcatctggtggaacttctctactacgtcgaggagcttgactccagtcttatctccagcttccctctgctgaaggccctgaaaaccagaatcagcaacctgcccacagtgaagaagtttctacagcctggcagcccaaggaagcctcccatggatgagaaatctttagaagaagcaaggaagattttcaggttttaataacgcagtcatggaggccaagaacttgcaataccaatgttctaaagttttgcaacaataaagtactttacctaagtgttgattgtgcctgttgtgaagctaatgaactctttcaaattatatgctaattaaataatacaactcctattcgctgacttagttaaaattgatttgttttcattaggatctgatgtgaattcagatttccaatcttctcctagccaaccattttcctggaattaaaaattcagtaaaaaaggaaactatagat

SEQ ID NO: 4597 - protein, 201 aa, Homo sapiens
MAEKPKLHYFNARGRMESTRWLLAAAGVEFEEKFIKSAEDLDKLRNDGYLMFQQVPMVEIDGMKLVQTRAILNYIASKYNLYGKDIKERALPPEEKDAKLALIKEKIKNRYFPAFEKVLKSHGQDYLVGNKLSRADIHLVELLYYVEELDSSLISSFPLLKALKTRISNLPTVKKFLQPGSPRKPPMDEKSLEEARKIFRF

SEQ ID NO: 4598 - DNA, 1059 bp, Homo sapiens
gggagagaactattgagaggaacaaagagcttataaatacattaggacctggaattcagttgtcgagccaggacggtgacagcgtttaacaaagcttagagaaacctccaggagactgctatcatggcagagaagcccaagctccactacttcaatgcacggggcagaatggagtccacccggtggctcctggctgcagctggagtagagtttgaagagaaatttataaaatctgcagaagatttggacaagttaagaaatgatggatatttgatgttccagcaagtgccaatggttgagattgatgggatgaagctggtgcagaccagagccattctcaactacattgccagcaaatacaacctctatgggaaagacataaaggagagagccctgattgatatgtatatagaaggtatagcagatttgggtgaaatgatcctccttctgcccgtatgtccacctgaggaaaaagatgccaagcttgccttgatcaaagagaaaataaaaaatcgctacttccctgcctttgaaaaagtcttaaagagccatggacaagactaccttgttggcaacaagctgagccgggctgacattcatctggtggaacttctctactacgtcgaggagcttgactccagtcttatctccagcttccctctgctgaaggccctgaaaaccagaatcagcaacctgcccacagtgaagaagtttctacagcctggcagcccaaggaagcctcccatggatgagaaatctttagaagaagcaaggaagattttcaggttttaataacgcagtcatggaggccaagaacttgcaataccaatgttctaaagttttgcaacaataaagtactttacctaagtgttgattgtgcctgttgtgaagctaatgaactctttcaaattatatgctaattaaataatacaactcctattcgctgacttagttaaaattgatttgttttcattaggatctgatgtgaattcagatttccaatcttctcctagccaaccattttcctggaattaaaaattcagtaaaaaaggaaactat

SEQ ID NO: 4599 - protein, 222 aa, Homo sapiens; identical to SEQ ID NO: 555

SEQ ID NO: 4600 - DNA, 472 bp, Homo sapiens
aggaaaaagatgccaagcttgccttgatcaaagagaaaataaaaaatcgctacttccctgcctttgaaaaagtcttaaagagccatggacaagactaccttgttggcaacaagctgagccgggctgacattcatctggtggaacttctctactacgtcgaggagcttgactccagtcttatctccagcttccctctgctgaaggccctgaaaaccagaatcagcaacctgcccacagtgaagaagtttctacagcctggcagcccaaggaagcctcccatggatgagaaatctttagaagaagcaaggaagattttcaggttttaataacgcagtcatggaggccaagaacttgcaataccaatgttctaaagttttgcaacaataaagtactttacctaagtgttgattgtgcctgttgtgaagctaatgaactctttcaaattatatgctaattaaataatacaactcct

SEQ ID NO: 4601 - protein, 38 aa, Homo sapiens
LQSYLQLPSAEGPENQNQQPAHSEEVSTAWQPKEASHG

SEQ ID NO: 4602 - DNA, 601 bp, Homo sapiens
gattgatatgtatatagaaggtatagcagatttgggtgaaatgatcctccttctgcccgtatgtccacctgaggaaaaagatgccaagcttgccttgatcaaagagaaaataaaaaatcgctacttccctgcctttgaaaaagtcttaaagagccatggacaagactaccttgttggcaacaagctgagccgggctgacattcatctggtggaacttctctactacgtcgaggagcttgactccagtcttatctccagcttccctctgctgaagctctccagaacactggccccccacactgtatctctcactgagaaaaggtggtcccatggccctgaaaaccagaatcagcaacctgcccacagtgaagaagtttctacagcctggcagcccaaggaagcctcccatggatgagaaatctttagaagaagcaaggaagattttcaggttttaataacgcagtcatggaggccaagaacttgcaataccaatgttctaaagttttgcaacaataaagtactttacctaagtgttgattgtgcctgttgtgaagctaatgaactctttcaaattatatgctaattaaataatacaactcct

SEQ ID NO: 4603 - protein, 135 aa, Homo sapiens; identical to SEQ ID NO: 4593

SEQ ID NO: 4604 - DNA, 712 bp, Homo sapiens
gcttagagaaacctccaggagactgctatcatggcagagaagcccaagctccactacttcaatgcacggggcagaatggagtccacccggtggctcctggctgcagctggagtagagtttgaagagaaatttataaaatctgcagaagatttggacaagttaagaaatggattgatatgtatatagaaggtatagcagatttgggtgaaatgatcctccttctgcccgtatgtccacctgaggaaaaagatgccaagcttgccttgatcaaagagaaaataaaaaatcgctacttccctgcctttgaaaaagtcttaaagagccatggacaagactaccttgttggcaacaagctgagccgggctgacattcatctggtggaacttctctactacgtcgaggagcttgactccagtcttatctccagcttccctctgctgaaggccctgaaaaccagaatcagcaacctgcccacagtgaagaagtttctacagcctggcagcccaaggaagcctcccatggatgagaaatctttagaagaagcaaggaagattttcaggttttaataacgcagtcatggaggccaagaacttgcaataccaatgttctaaagttttgcaacaataaagtactttacctaagtgttgattgtgcctgttgtgaagctaatgaactctttcaaattatatgctaattaaataatacaactcct

SEQ ID NO: 4605 - protein, 129 aa, Homo sapiens; identical to SEQ ID NO: 4595

SEQ ID NO: 4606 - DNA, 938 bp, Homo sapiens
gggagagaactattgagaggaacaaagagcttataaatacattaggacctggaattcagttgtcgagccaggacggtgacagcgtttaacaaagcttagagaaacctccaggagactgctatcatggcagagaagcccaagctccactacttcaatgcacggggcagaatggagtccacccggtggctcctggctgcagctggagtagagtttgaagagaaatttataaaatctgcagaagatttggacaagttaagaaatgatggatatttgatgttccagcaagtgccaatggttgagattgatgggatgaagctggtgcagaccagagccattctcaactacattgccagcaaatacaacctctatgggaaagacataaaggagagagccctgattgatatgtatatagaaggtatagcagatttgggtgaaatgatcctccttctgcccgtatgtccacctgaggaaaaagatgccaagcttgccttgatcaaagagaaaataaaaaatcgctacttccctgcctttgaaaaagtcttaaagagccatggacaagactaccttgttggcaacaagctgagccgggctgacattcatctggtggaacttctctactacgtcgaggagcttgactccagtcttatctccagcttccctctgctgaaggccctgaaaaccagaatcagcaacctgcccacagtgaagaagtttctacagcctggcagcccaaggaagcctcccatggatgagaaatctttagaagaagcaaggaagattttcaggttttaataacgcagtcatggaggccaagaacttgcaataccaatgttctaaagttttgcaacaataaagtactttacctaagtgttgattgtgcctgttgtgaagctaatgaactctttcaaattatatgctaattaaataatacaactcct

SEQ ID NO: 4607 - protein, 222 aa, Homo sapiens; identical to SEQ ID NO: 555

SEQ ID NO: 4608 - DNA, 406 bp, Homo sapiens
aggaaaaagatgccaagcttgccttgatcaaagagaaaataaaaaatcgctacttccctgcctttgaaaaagtcttaaagagccatggacaagactaccttgttggcaacaagctgagccgggctgacattcatctggtggaacttctctactacgtcgaggagcttgactccagtcttatctccagcttccctctgctgaaggccctgaaaaccagaatcagcaacctgcccacagtgaagaagtttctacagcctggcagcccaaggaagcctcccatggatgagaaatctttagaagaagcaaggaagattttcaggttttaataacgcagtcatggaggccaagaacttgcaataccaatgttctaaagttttgcaacaataaagtactttacctaagtgtt

SEQ ID NO: 4609 - protein, 38 aa, Homo sapiens; identical to SEQ ID NO: 4601

SEQ ID NO: 4610 - DNA, 872 bp, Homo sapiens
gggagagaactattgagaggaacaaagagcttataaatacattaggacctggaattcagttgtcgagccaggacggtgacagcgtttaacaaagcttagagaaacctccaggagactgctatcatggcagagaagcccaagctccactacttcaatgcacggggcagaatggagtccacccggtggctcctggctgcagctggagtagagtttgaagagaaatttataaaatctgcagaagatttggacaagttaagaaatgatggatatttgatgttccagcaagtgccaatggttgagattgatgggatgaagctggtgcagaccagagccattctcaactacattgccagcaaatacaacctctatgggaaagacataaaggagagagccctgattgatatgtatatagaaggtatagcagatttgggtgaaatgatcctccttctgcccgtatgtccacctgaggaaaaagatgccaagcttgccttgatcaaagagaaaataaaaaatcgctacttccctgcctttgaaaaagtcttaaagagccatggacaagactaccttgttggcaacaagctgagccgggctgacattcatctggtggaacttctctactacgtcgaggagcttgactccagtcttatctccagcttccctctgctgaaggccctgaaaaccagaatcagcaacctgcccacagtgaagaagtttctacagcctggcagcccaaggaagcctcccatggatgagaaatctttagaagaagcaaggaagattttcaggttttaataacgcagtcatggaggccaagaacttgcaataccaatgttctaaagttttgcaacaataaagtactttacctaagtgtt

SEQ ID NO: 4611 - protein, 222 aa, Homo sapiens; identical to SEQ ID NO: 555

SEQ ID NO: 4612 - DNA, 530 bp, Homo sapiens
gattgatatgtatatagaaggtatagcagatttgggtgaaatgatcctccttctgcccgtatgtccacctgaggaaaaagatgccaagcttgccttgatcaaagagaaaataaaaaatcgctacttccctgcctttgaaaaagtcttaaagagccatggacaagactaccttgttggcaacaagctgagccgggctgacattcatctggtggaacttctctactacgtcgaggagcttgactccagtcttatctccagcttccctctgctgaagctctccagaacactggccccccacactgtatctctcactgagaaaaggtggtcccatggccctgaaaaccagaatcagcaacctgcccacagtgaagaagtttctacagcctggcagcccaaggaagcctcccatggatgagaaatctttagaagaagcaaggaagattttcaggttttaataacgcagtcatggaggccaagaacttgcaataccaatgttctaaagttttgcaacaataaagtactttacctaa

SEQ ID NO: 4613 - protein, 135 aa, Homo sapiens; identical to SEQ ID NO: 4593

SEQ ID NO: 4614 - DNA, 668 bp, Homo sapiens
gggagagaactattgagaggaacaaagagcttataaatacattaggacctggaattcagttgtcgagccaggacggtgacagcgtttaacaaagcttagagaaacctccaggagactgctatcatggcagagaagcccaagctccactacttcaatgcacggggcagaatggagtccacccggtggctcctggctgcagctggagtagagtttgaagagaaatttataaaatctgcagaagatttggacaagttaagaaatgatggatatttgatgttccagcaagtgccaatggttgagattgatgggatgaagctggtgcagaccagagccattctcaactacattgccagcaaatacaacctctatgggaaagacataaaggagagagccctgattgatatgtatatagaaggtatagcagatttgggtgaaatgatcctccttctgcccgtatgtccacctgaggaaaaagatgccaagcttgccttgatcaaagagaaaataaaaaatcgctacttccctgcctttgaaaaaccgggctgacattcatctggtggaacttctctactacgtcgaggagcttgactccagtcttatctccagcttccctctgctgaaggtgacccatttcacagcccagagaggcagccccacatctcccatct

SEQ ID NO: 4615 - protein, 140 aa, Homo sapiens
MAEKPKLHYFNARGRMESTRWLLAAAGVEFEEKFIKSAEDLDKLRNDGYLMFQQVPMVEIDGMKLVQTRAILNYIASKYNLYGKDIKERALIDMYIEGIADLGEMILLLPVCPPEEKDAKLALIKEKIKNRYFPAFEKPG

SEQ ID NO: 4616 - DNA, 715 bp, Homo sapiens
gggagagaactattgagaggaacaaagagcttataaatacattaggacctggaattcagttgtcgagccaggacggtgacagcgtttaacaaagcttagagaaacctccaggagactgctatcatggcagagaagcccaagctccactacttcaatgcacggggcagaatggagtccacccggtggctcctggctgcagctggagtagagtttgaagagaaatttataaaatctgcagaagatttggacaagttaagaaatgatggatatttgatgttccagcaagtgccaatggttgagattgatgggatgaagctggtgcagaccagagccattctcaactacattgccagcaaatacaacctctatgggaaagacataaaggagagagccctgattgatatgtatatagaaggtatagcagatttgggtgaaatgatcctccttctgcccgtatgtccacctgaggaaaaagatgccaagcttgccttgatcaaagagaaaataaaaaatcgctacttccctgcctttgaaaaagtcttaaagagccatggacaagactaccttgttggcaacaagctgagccgggctgacattcatctggtggaacttctctactacgtcgaggagcttgactccagtcttatctccagcttccctctgctgaaggtgacccatttcacagcccagagaggcagccccacatctcccatct

SEQ ID NO: 4617 - protein, 196 aa, Homo sapiens
MAEKPKLHYFNARGRMESTRWLLAAAGVEFEEKFIKSAEDLDKLRNDGYLMFQQVPMVEIDGMKLVQTRAILNYIASKYNLYGKDIKERALIDMYIEGIADLGEMILLLPVCPPEEKDAKLALIKEKIKNRYFPAFEKVLKSHGQDYLVGNKLSRADIHLVELLYYVEELDSSLISSFPLLKVTHFTAQRGSPTSP

SEQ ID NO: 4618 - DNA, 845 bp, Homo sapiens; identical to SEQ ID NO: 556

SEQ ID NO: 4619 - protein, 222 aa, Homo sapiens; identical to SEQ ID NO: 557

SEQ ID NO: 4620 - DNA, 911 bp, Homo sapiens
atacacatcaggaggtggccttgagaagctgagcggagaccggctagactttactcaaagaaaccaagagactgttaccatggcagggaagcccaagcttcactacttcaatggacggggcagaatggagcccatccggtggctcttggctgcagctggagtggagtttgaagagaaatttataggatctgcagaagatttgggaaagttaagaaatgatgggagtttgatgttccagcaagtaccaatggttgagattgatgggatgaagttggtacagaccagagccattctcaactacattgccagcaaatacaacctctacgggaaagacataaaggagagagccctaattgatatgtatacagaaggtatggcagatttgaatgaaatgatccttcttctgcccttatgtcgacctgaggaaaaagatgccaagattgccttgatcaaagagaaaacaaaaagtcgctatttccctgccttcgaaaaagtgttacagagccatggacaagactaccttgttggcaacaagctgagccgggctgacattagcctggtggaacttctctactatgtggaagagcttgactccagccttatctccaacttccctctgctgaaggccctgaaaaccagaatcagcaacctgcccacggtgaagaagtttctacagcctggcagcccaaggaagcctcccgcagatgcaaaagctttagaagaagccagaaagattttcaggttttaataaagcagccatggaggctaagaacatgcaagaccaatattctaaagttttgcaacaatgaagtgctttacttaagtgttgattgtgcctgttgtaaagctaatgaaccctttccaattatatgctaattaaataataaaaactcctatttgctaacttagtt

SEQ ID NO: 4621 - protein, 222 aa, Homo sapiens; identical to SEQ ID NO: 559

SEQ ID NO: 4622 - DNA, 803 bp, Homo sapiens
atacacatcaggaggtggccttgagaagctgagcggagaccggctagactttactcaatttgaagagaaatttataggatctgcagaagatttgggaaagttaagaaatgatgggagtttgatgttccagcaagtaccaatggttgagattgatgggatgaagttggtacagaccagagccattctcaactacattgccagcaaatacaacctctacgggaaagacataaaggagagagccctaattgatatgtatacagaaggtatggcagatttgaatgaaatgatccttcttctgcccttatgtcgacctgaggaaaaagatgccaagattgccttgatcaaagagaaaacaaaaagtcgctatttccctgccttcgaaaaagtgttacagagccatggacaagactaccttgttggcaacaagctgagccgggctgacattagcctggtggaacttctctactatgtggaagagcttgactccagccttatctccaacttccctctgctgaaggccctgaaaaccagaatcagcaacctgcccacggtgaagaagtttctacagcctggcagcccaaggaagcctcccgcagatgcaaaagctttagaagaagccagaaagattttcaggttttaataaagcagccatggaggctaagaacatgcaagaccaatattctaaagttttgcaacaatgaagtgctttacttaagtgttgattgtgcctgttgtaaagctaatgaaccctttccaattatatgctaattaaataataaaaactcctatttgctaacttagtt

SEQ ID NO: 4623 - protein, 172 aa, Homo sapiens
MFQQVPMVEIDGMKLVQTRAILNYIASKYNLYGKDIKERALIDMYTEGMADLNEMILLLPLCRPEEKDAKIALIKEKTKSRYFPAFEKVLQSHGQDYLVGNKLSRADISLVELLYYVEELDSSLISNFPLLKALKTRISNLPTVKKFLQPGSPRKPPADAKALEEARKIFRF

SEQ ID NO: 4624 - DNA, 418 bp, Homo sapiens
cccaagcttcactacttcaatggacggggcagaatggagcccatccggtggctcttggctgcagctggagtggagatgggagtttgatgttccagcaagtaccaatggttgagattgatgggatgaagttggtacagaccagagccattctcaactacattgccagcaaatacaacctctacgggaaagacataaaggagagagccctaattgatatgtatacagaaggtatggcagatttgaatgaaatgatccttcttctgcccttatgtcgacctgaggaaaaagatgccaagattgccttgatcaaagagaaaacaaaaagtcgctatttccctgccttcgaaaaaccgggctgacattagcctggtggaacttctctactatgtggaagagcttgactccagccttatctcca

SEQ ID NO: 4625 - protein, 90 aa, Homo sapiens
MFQQVPMVEIDGMKLVQTRAILNYIASKYNLYGKDIKERALIDMYTEGMADLNEMILLLPLCRPEEKDAKIALIKEKTKSRYFPAFEKPG

SEQ ID NO: 4626 - DNA, 522 bp, Homo sapiens
gattttgaaagaccatggagaggattttcttgttggcaacaaattcagctgggcagacatacagctgttagaagctattttaatggtggaagaactcaaagcttctgttctttctgacttccctctgctaaaggttcgagtgcagtggcatgatcatggctcactgcagacttgacctcttggcctcaagcgatcctcccacctcatcctccagagtagctgggaccacaggcatttaaaataagaatcagcaacatccctacaattaagaagttcctgcagcctgggagtcagaggaagccacccccgatacccactatgttgaacttgccaggaagatagtgctgctctaatggcagcaggttgcgtgatgacaaacatgatgatccagtcacagcaccagcatgtgctgtctgcagaggataatagaagcaaactgtagatcccaggagcaaagtgtctgaaaagaacaaaaccatgctgccattaacagcaacgctgattaaatgtagtataaaatca

SEQ ID NO: 4627 - protein, 30 aa, Homo sapiens
MVEELKASVLSDFPLLKVRVQWHDHGSLQT

SEQ ID NO: 4628 - DNA, 1314 bp, Homo sapiens
gctttttccctttcttgcacattcactattgttaagtattaggaatgaggagctgctgtgacattcaaggcctgggagagtgagcattagattataatttgaaatcaaagcctggtccttgcaccccttagatgtatgaccctgggcaacgtgggtataagaatagtacatttctcatagtgtcatgtgatttaatgagataatggatagagagtgtttagcaccatgcctggtacactctaagcactcaataagtggtattcactatttttataaagttgaagtttgacccatacgaagagaccaaaacatggatgctggggtaaaagtggaggagtaggatgccaggagagagagcactcatgactgtcaagctgtctgatctgtgacagatttttctgagttacaactagaattgaccttatatctttgctcttaagagacaggtataggtaaatgcttctagggacttaagttgcagcatctttaaaaaaaaaaaaaaaagcactctgaattcttagttgtggaaactgatggcttcaaagagaggagaaactgagacaactgcttttttgttttaaggattgacatgtacgtggaggggacactggatctgctggaactgcttatcatgcatcctttcttaaaaccagatgatcagcaaaaggaagtggttaacatggcccagaaggctataattagatactttcctgtgtttgaactggcagcaagaagaagcctccccctgatgaaatttatgtgagaaccgtctacaacatctttaggccataaaacaacacatccatgtgtgagtgacagtgtgttcctagagatggtattgtctacagtcatgtcttaatggatcccagctctgtcatggtgctatctatgtattaagttgggtcctaagttgggtcttttgtgtcaacgagatcatctcttctagaaatatcaaccttttttgtccagtaaataattgttaggggatctttattggaaaacttttttggagaggctggtatttaagttagatctgattgggctactcatgtcctgtagccagttcatcctcataataagaatgggcaggatctcttgttctctcctgagtgtctttctactctcctgagcgtctttctgctctccttatcctgttctcttatccttatcccctccagtctctgcctaatttttagtgtttaataacaaccgaatgtctagtaaatgactctcctctgagctgtaataaataaaatggtagtaatgaatgcaatcagtattagccaaaataaagaatttatgagtcattgctca

SEQ ID NO: 4629 - protein, 57 aa, Homo sapiens
MYVEGTLDLLELLIMHPFLKPDDQQKEVVNMAQKAIIRYFPVFELAARRSLPLMKFM

SEQ ID NO: 4630 - DNA, 822 bp, Homo sapiens
gaattgaccttatatctttgctcttaagagacaggtataggtaaatgcttctagggacttaagttgcagcatctttaaaaaaaaaaaaaaaagcactctgaattcttagttgtggaaactgatggcttcaaagagaggagaaactgagacaactgcttttttgttttaaggattgacatgtacgtggaggggacactggatctgctggaactgcttatcatgcatcctttcttaaaaccagatgatcagcaaaaggaagtggttaacatggcccagaaggctataattagatactttcctgtgtttgaaaagattttaaggggtcacggacaaagctttcttgttggtaatcagctgagcgtcttaatggatcccagctctgtcatggtgctatctatgtattaagttgggtcctaagttgggtcttttgtgtcaacgagatcatctcttctagaaatatcaaccttttttgtccagtaaataattgttaggggatctttattggaaaacttttttggagaggctggtatttaagttagatctgattgggctactcatgtcctgtagccagttcatcctcataataagaatgggcaggatctcttgttctctcctgagtgtctttctactctcctgagcgtctttctgctctccttatcctgttctcttatccttatcccctccagtctctgcctaatttttagtgtttaataacaaccgaatgtctagtaaatgactctcctctgagctgtaataaataaaatggtagtaatgaatgcaatcagtattagccaaaataaagaatttatgagtcattgctca

SEQ ID NO: 4631 - protein, 75 aa, Homo sapiens
MYVEGTLDLLELLIMHPFLKPDDQQKEVVNMAQKAIIRYFPVFEKILRGHGQSFLVGNQLSVLMDPSSVMVLSMY

SEQ ID NO: 4632 - DNA, 1306 bp, Homo sapiens
cccagctcccgcgcgctagagccgcctgctggtctcacccagccgggaccgctgacctggcgctttgtgcggctccaggcctccgagtggactccagaaagcctgaaaagctatcatggcagcaaggcccaagctccactatcccaacggaagaggccggatggagtccgtgagatgggttttagctgccgccggagtcgagtttgatgaagaatttctggaaacaaaagaacagttgtacaagttgcaggatggtaaccacctgctgttccaacaagtgcccatggttgaaattgacgggatgaagttggtacagacccgaagcattctccactacatagcagacaagcacaatctctttggcaagaacctcaaggagagaaccctgattgacatgtacgtggaggggacactggatctgctggaactgcttatcatgcatcctttcttaaaaccagatgatcagcaaaaggaagtggttaacatggcccagaaggctataattagatactttcctgtgtttgaaaagattttaaggggtcacggacaaagctttcttgttggtaatcagctgagccttgcagatgtgattttactccaaaccattttagctctagaagagaaaattcctaatatcctgtctgcatttcctttcctccaggaatacacagtgaaactaagtaatatccctacaattaagagattccttgaacctggcagcaagaagaagcctccccctgatgaaatttatgtgagaaccgtctacaacatctttaggccataaaacaacacatccatgtgtgagtgacagtgtgttcctagagatggtattgtctacagtcatgtcttaatggatcccagctctgtcatggtgctatctatgtattaagttgggtcctaagttgggtcttttgtgtcaacgagatcatctcttctagaaatatcaaccttttttgtccagtaaataattgttaggggatctttattggaaaacttttttggagaggctggtatttaagttagatctgattgggctactcatgtcctgtagccagttcatcctcataataagaatgggcaggatctcttgttctctcctgagtgtctttctactctcctgagcgtctttctgctctccttatcctgttctcttatccttatcccctccagtctctgcctaatttttagtgtttaataacaaccgaatgtctagtaaatgactctcctctgagctgtaataaataaaatggtagtaatgaatgcaatcagtattagccaaaataaagaatttatgagtcattgctca

SEQ ID NO: 4633 - protein, 222 aa, Homo sapiens; identical to SEQ ID NO: 561

SEQ ID NO: 4634 - DNA, 1254 bp, Homo sapiens
cccagctcccgcgcgctagagccgcctgctggtctcacccagccgggaccgctgacctggcgctttgtgcggctccaggcctccgagtggactccagaaagcctgaaaagctatcatggcagcaaggcccaagctccactatcccaacggaagaggccggatggagtccgtgagatgggttttagctgccgccggagtcgaggtaaccacctgctgttccaacaagtgcccatggttgaaattgacgggatgaagttggtacagacccgaagcattctccactacatagcagacaagcacaatctctttggcaagaacctcaaggagagaaccctgattgacatgtacgtggaggggacactggatctgctggaactgcttatcatgcatcctttcttaaaaccagatgatcagcaaaaggaagtggttaacatggcccagaaggctataattagatactttcctgtgtttgaaaagattttaaggggtcacggacaaagctttcttgttggtaatcagctgagccttgcagatgtgattttactccaaaccattttagctctagaagagaaaattcctaatatcctgtctgcatttcctttcctccaggaatacacagtgaaactaagtaatatccctacaattaagagattccttgaacctggcagcaagaagaagcctccccctgatgaaatttatgtgagaaccgtctacaacatctttaggccataaaacaacacatccatgtgtgagtgacagtgtgttcctagagatggtattgtctacagtcatgtcttaatggatcccagctctgtcatggtgctatctatgtattaagttgggtcctaagttgggtcttttgtgtcaacgagatcatctcttctagaaatatcaaccttttttgtccagtaaataattgttaggggatctttattggaaaacttttttggagaggctggtatttaagttagatctgattgggctactcatgtcctgtagccagttcatcctcataataagaatgggcaggatctcttgttctctcctgagtgtctttctactctcctgagcgtctttctgctctccttatcctgttctcttatccttatcccctccagtctctgcctaatttttagtgtttaataacaaccgaatgtctagtaaatgactctcctctgagctgtaataaataaaatggtagtaatgaatgcaatcagtattagccaaaataaagaatttatgagtcattgctca

SEQ ID NO: 4635 - protein, 185 aa, Homo sapiens
MGFSCRRSRGNHLLFQQVPMVEIDGMKLVQTRSILHYIADKHNLFGKNLKERTLIDMYVEGTLDLLELLIMHPFLKPDDQQKEVVNMAQKAIIRYFPVFEKILRGHGQSFLVGNQLSLADVILLQTILALEEKIPNILSAFPFLQEYTVKLSNIPTIKRFLEPGSKKKPPPDEIYVRTVYNIFRP

SEQ ID NO: 4636 - DNA, 1173 bp, Homo sapiens
cccagctcccgcgcgctagagccgcctgctggtctcacccagccgggaccgctgacctggcgctttgtgcggctccaggcctccgagtggactccagaaagcctgaaaagctatcatggcagcaaggcccaagctccactatcccaacggaagaggccggatggagtccgtgagatgggttttagctgccgccggagtcgagtttgatgaagaatttctggaaacaaaagaacagttgtacaagttgcaggatggattgacatgtacgtggaggggacactggatctgctggaactgcttatcatgcatcctttcttaaaaccagatgatcagcaaaaggaagtggttaacatggcccagaaggctataattagatactttcctgtgtttgaaaagattttaaggggtcacggacaaagctttcttgttggtaatcagctgagccttgcagatgtgattttactccaaaccattttagctctagaagagaaaattcctaatatcctgtctgcatttcctttcctccaggaatacacagtgaaactaagtaatatccctacaattaagagattccttgaacctggcagcaagaagaagcctccccctgatgaaatttatgtgagaaccgtctacaacatctttaggccataaaacaacacatccatgtgtgagtgacagtgtgttcctagagatggtattgtctacagtcatgtcttaatggatcccagctctgtcatggtgctatctatgtattaagttgggtcctaagttgggtcttttgtgtcaacgagatcatctcttctagaaatatcaaccttttttgtccagtaaataattgttaggggatctttattggaaaacttttttggagaggctggtatttaagttagatctgattgggctactcatgtcctgtagccagttcatcctcataataagaatgggcaggatctcttgttctctcctgagtgtctttctactctcctgagcgtctttctgctctccttatcctgttctcttatccttatcccctccagtctctgcctaatttttagtgtttaataacaaccgaatgtctagtaaatgactctcctctgagctgtaataaataaaatggtagtaatgaatgcaatcagtattagccaaaataaagaatttatgagtcattgctca

SEQ ID NO: 4637 - protein, 129 aa, Homo sapiens
MYVEGTLDLLELLIMHPFLKPDDQQKEVVNMAQKAIIRYFPVFEKILRGHGQSFLVGNQLSLADVILLQTILALEEKIPNILSAFPFLQEYTVKLSNIPTIKRFLEPGSKKKPPPDEIYVRTVYNIFRP

SEQ ID NO: 4638 - DNA, 1501 bp, Homo sapiens
gctttttccctttcttgcacattcactattgttaagtattaggaatgaggagctgctgtgacattcaaggcctgggagagtgagcattagattataatttgaaatcaaagcctggtccttgcaccccttagatgtatgaccctgggcaacgtgggtataagaatagtacatttctcatagtgtcatgtgatttaatgagataatggatagagagtgtttagcaccatgcctggtacactctaagcactcaataagtggtattcactatttttataaagttgaagtttgacccatacgaagagaccaaaacatggatgctggggtaaaagtggaggagtaggatgccaggagagagagcactcatgactgtcaagctgtctgatctgtgacagatttttctgagttacaactagaattgaccttatatctttgctcttaagagacaggtataggtaaatgcttctagggacttaagttgcagcatctttaaaaaaaaaaaaaaaagcactctgaattcttagttgtggaaactgatggcttcaaagagaggagaaactgagacaactgcttttttgttttaaggattgacatgtacgtggaggggacactggatctgctggaactgcttatcatgcatcctttcttaaaaccagatgatcagcaaaaggaagtggttaacatggcccagaaggctataattagatactttcctgtgtttgaaaagattttaaggggtcacggacaaagctttcttgttggtaatcagctgagccttgcagatgtgattttactccaaaccattttagctctagaagagaaaattcctaatatcctgtctgcatttcctttcctccaggaatacacagtgaaactaagtaatatccctacaattaagagattccttgaacctggcagcaagaagaagcctccccctgatgaaatttatgtgagaaccgtctacaacatctttaggccataaaacaacacatccatgtgtgagtgacagtgtgttcctagagatggtattgtctacagtcatgtcttaatggatcccagctctgtcatggtgctatctatgtattaagttgggtcctaagttgggtcttttgtgtcaacgagatcatctcttctagaaatatcaaccttttttgtccagtaaataattgttaggggatctttattggaaaacttttttggagaggctggtatttaagttagatctgattgggctactcatgtcctgtagccagttcatcctcataataagaatgggcaggatctcttgttctctcctgagtgtctttctactctcctgagcgtctttctgctctccttatcctgttctcttatccttatcccctccagtctctgcctaatttttagtgtttaataacaaccgaatgtctagtaaatgactctcctctgagctgtaataaataaaatggtagtaatgaatgcaatcagtattagccaaaataaagaatttatgagtcattgctca

SEQ ID NO: 4639 - protein, 129 aa, Homo sapiens; identical to SEQ ID NO: 4637

SEQ ID NO: 4640 - DNA, 1223 bp, Homo sapiens
gtggctaaatctgctctcctgaatgaagttaaggttatctgtcatctggaagctttacactatttcctaaggccatgattccaccgtttcttttcattccacagagcattttttaggggttgggggacagagaagaaaagatcacttctaactctgggcttccattctcaggtaaccacctgctgttccaacaagtgcccatggttgaaattgacgggatgaagttggtacagacccgaagcattctccactacatagcagacaagcacaatctctttggcaagaacctcaaggagagaaccctgattgacatgtacgtggaggggacactggatctgctggaactgcttatcatgcatcctttcttaaaaccagatgatcagcaaaaggaagtggttaacatggcccagaaggctataattagatactttcctgtgtttgaaaagattttaaggggtcacggacaaagctttcttgttggtaatcagctgagccttgcagatgtgattttactccaaaccattttagctctagaagagaaaattcctaatatcctgtctgcatttcctttcctccaggaatacacagtgaaactaagtaatatccctacaattaagagattccttgaacctggcagcaagaagaagcctccccctgatgaaatttatgtgagaaccgtctacaacatctttaggccataaaacaacacatccatgtgtgagtgacagtgtgttcctagagatggtattgtctacagtcatgtcttaatggatcccagctctgtcatggtgctatctatgtattaagttgggtcctaagttgggtcttttgtgtcaacgagatcatctcttctagaaatatcaaccttttttgtccagtaaataattgttaggggatctttattggaaaacttttttggagaggctggtatttaagttagatctgattgggctactcatgtcctgtagccagttcatcctcataataagaatgggcaggatctcttgttctctcctgagtgtctttctactctcctgagcgtctttctgctctccttatcctgttctcttatccttatcccctccagtctctgcctaatttttagtgtttaataacaaccgaatgtctagtaaatgactctcctctgagctgtaataaataaaatggtagtaatgaatgcaatcagtattagccaaaataaagaatttatgagtcattgctca

SEQ ID NO: 4641 - protein, 166 aa, Homo sapiens
MVEIDGMKLVQTRSILHYIADKHNLFGKNLKERTLIDMYVEGTLDLLELLIMHPFLKPDDQQKEVVNMAQKAIIRYFPVFEKILRGHGQSFLVGNQLSLADVILLQTILALEEKIPNILSAFPFLQEYTVKLSNIPTIKRFLEPGSKKKPPPDEIYVRTVYNIFRP

SEQ ID NO: 4642 - DNA, 1698 bp, Homo sapiens
taacttggcattttttgtcctgagcctgtatgatatttacctccttttggagggtgaggatatctttttaaaaaattgatgcataatgtacatatttggggaatacatttgatattttgatacatgtgtatcatgtgtagtgatcaaatcagggtaattaggatatccatcacccacctcaaacatttatctttcctttatggcggaacattccaattctcttctagccattttgaactgtgtaatacgttattgttaactatagcctactgtactatcgaacactagattttatttcttctgtctagctgtatttatgtaccattaaccaacctcttttcacatcccattcctctctacacttcccagcctctagtaagcaccaatcaactttctatttccatgagatccacttttttagctcccacatatgaatcagaacatgcagtctttgtctttctgtgcctggcttatttcacttaacgtaatgacctctgtttctgttggtgttgctgaaaatgacaggattttgttttcttaatggctgaataatattccactatgtatatatacgtttcttttttaaaaatttagtttgatgaagaatttctggaaacaaaagaacagttgtacaagttgcaggatggtaaccacctgctgttccaacaagtgcccatggttgaaattgacgggatgaagttggtacagacccgaagcattctccactacatagcagacaagcacaatctctttggcaagaacctcaaggagagaaccctgattgacatgtacgtggaggggacactggatctgctggaactgcttatcatgcatcctttcttaaaaccagatgatcagcaaaaggaagtggttaacatggcccagaaggctataattagatactttcctgtgtttgaaaagattttaaggggtcacggacaaagctttcttgttggtaatcagctgagccttgcagatgtgattttactccaaaccattttagctctagaagagaaaattcctaatatcctgtctgcatttcctttcctccaggaatacacagtgaaactaagtaatatccctacaattaagagattccttgaacctggcagcaagaagaagcctccccctgatgaaatttatgtgagaaccgtctacaacatctttaggccataaaacaacacatccatgtgtgagtgacagtgtgttcctagagatggtattgtctacagtcatgtcttaatggatcccagctctgtcatggtgctatctatgtattaagttgggtcctaagttgggtcttttgtgtcaacgagatcatctcttctagaaatatcaaccttttttgtccagtaaataattgttaggggatctttattggaaaacttttttggagaggctggtatttaagttagatctgattgggctactcatgtcctgtagccagttcatcctcataataagaatgggcaggatctcttgttctctcctgagtgtctttctactctcctgagcgtctttctgctctccttatcctgttctcttatccttatcccctccagtctctgcctaatttttagtgtttaataacaaccgaatgtctagtaaatgactctcctctgagctgtaataaataaaatggtagtaatgaatgcaatcagtattagccaaaataaagaatttatgagtcattgctca

SEQ ID NO: 4643 - protein, 166 aa, Homo sapiens; identical to SEQ ID NO: 4641

SEQ ID NO: 4644 - DNA, 1636 bp, Homo sapiens
ggcctgttcaccttccagttgccgtgataataaaatatgatgatgtatgtaaaagcatgaatacttgaagagcttccagtggctgtgcgattttccttcgctaccctcttcaacgcctgccaccccctatcccccagctgaatttggaaaatctgagattctcgaggtcaaaatatataatattctgaatttgtgaaatcccgtactgctagcacatatgtttttacaacaaatggccccagcttcccaagatccaggataagaagtcataaatagaaatcatataaaagccaaggtttttttctccatgttttaaaatggtggtttttttttcttgagtgagggaaaatgcagcaacaaaaataaagaacagtttcccgtgccaaaatcctgaatattcatttcgcccctgagcactgggttgaagacgcgaaattgggactgttggtctgcgacgagctgctgcatttgtatttcagaaagcctgaaaagctatcatggcagcaaggcccaagctccactatcccaacggaagaggccggatggagtccgtgagatgggttttagctgccgccggagtcgaggtaaccacctgctgttccaacaagtgcccatggttgaaattgacgggatgaagttggtacagacccgaagcattctccactacatagcagacaagcacaatctctttggcaagaacctcaaggagagaaccctgattgacatgtacgtggaggggacactggatctgctggaactgcttatcatgcatcctttcttaaaaccagatgatcagcaaaaggaagtggttaacatggcccagaaggctataattagatactttcctgtgtttgaaaagattttaaggggtcacggacaaagctttcttgttggtaatcagctgagccttgcagatgtgattttactccaaaccattttagctctagaagagaaaattcctaatatcctgtctgcatttcctttcctccaggaatacacagtgaaactaagtaatatccctacaattaagagattccttgaacctggcagcaagaagaagcctccccctgatgaaatttatgtgagaaccgtctacaacatctttaggccataaaacaacacatccatgtgtgagtgacagtgtgttcctagagatggtattgtctacagtcatgtcttaatggatcccagctctgtcatggtgctatctatgtattaagttgggtcctaagttgggtcttttgtgtcaacgagatcatctcttctagaaatatcaaccttttttgtccagtaaataattgttaggggatctttattggaaaacttttttggagaggctggtatttaagttagatctgattgggctactcatgtcctgtagccagttcatcctcataataagaatgggcaggatctcttgttctctcctgagtgtctttctactctcctgagcgtctttctgctctccttatcctgttctcttatccttatcccctccagtctctgcctaatttttagtgtttaataacaaccgaatgtctagtaaatgactctcctctgagctgtaataaataaaatggtagtaatgaatgcaatcagtattagccaaaataaagaatttatgagtcattgctca

SEQ ID NO: 4645 - protein, 185 aa, Homo sapiens; identical to SEQ ID NO: 4635

SEQ ID NO: 4646 - DNA, 1503 bp, Homo sapiens
ggcctgttcaccttccagttgccgtgataataaaatatgatgatgtatgtaaaagcatgaatacttgaagagcttccagtggctgtgcgattttccttcgctaccctcttcaacgcctgccaccccctatcccccagctgaatttggaaaatctgagattctcgaggtcaaaatatataatattctgaatttgtgaaatcccgtactgctagcacatatgtttttacaacaaatggccccagcttcccaagatccaggataagaagtcataaatagaaatcatataaaagccaaggtttttttctccatgttttaaaatggtggtttttttttcttgagtgagggaaaatgcagcaacaaaaataaagaacagtttcccgtgccaaaatcctgaatattcatttcgcccctgagcactgggttgaagacgcgaaattgggactgttggtctgcgacgagctgctgcatttgtatttcagaaagcctgaaaagctatcatggcagcaaggcccaagctccactatcccaacggaagaggccggatggagtccgtgagatgggttttagctgccgccggagtcgaggattgacatgtacgtggaggggacactggatctgctggaactgcttatcatgcatcctttcttaaaaccagatgatcagcaaaaggaagtggttaacatggcccagaaggctataattagatactttcctgtgtttgaaaagattttaaggggtcacggacaaagctttcttgttggtaatcagctgagccttgcagatgtgattttactccaaaccattttagctctagaagagaaaattcctaatatcctgtctgcatttcctttcctccaggaatacacagtgaaactaagtaatatccctacaattaagagattccttgaacctggcagcaagaagaagcctccccctgatgaaatttatgtgagaaccgtctacaacatctttaggccataaaacaacacatccatgtgtgagtgacagtgtgttcctagagatggtattgtctacagtcatgtcttaatggatcccagctctgtcatggtgctatctatgtattaagttgggtcctaagttgggtcttttgtgtcaacgagatcatctcttctagaaatatcaaccttttttgtccagtaaataattgttaggggatctttattggaaaacttttttggagaggctggtatttaagttagatctgattgggctactcatgtcctgtagccagttcatcctcataataagaatgggcaggatctcttgttctctcctgagtgtctttctactctcctgagcgtctttctgctctccttatcctgttctcttatccttatcccctccagtctctgcctaatttttagtgtttaataacaaccgaatgtctagtaaatgactctcctctgagctgtaataaataaaatggtagtaatgaatgcaatcagtattagccaaaataaagaatttatgagtcattgctca

SEQ ID NO: 4647 - protein, 129 aa, Homo sapiens; identical to SEQ ID NO: 4637

SEQ ID NO: 4648 - DNA, 1311 bp, Homo sapiens
gtctcactctcgcattcttccctcactcccccagttcagtccttctcttgtcttttcttcctcttgtcctttgtcctcctgctccatccagtctgggcagagaaagcctgaaaagctatcatggcagcaaggcccaagctccactatcccaacggaagaggccggatggagtccgtgagatgggttttagctgccgccggagtcgagtttgatgaagaatttctggaaacaaaagaacagttgtacaagttgcaggatggtaaccacctgctgttccaacaagtgcccatggttgaaattgacgggatgaagttggtacagacccgaagcattctccactacatagcagacaagcacaatctctttggcaagaacctcaaggagagaaccctgattgacatgtacgtggaggggacactggatctgctggaactgcttatcatgcatcctttcttaaaaccagatgatcagcaaaaggaagtggttaacatggcccagaaggctataattagatactttcctgtgtttgaaaagattttaaggggtcacggacaaagctttcttgttggtaatcagctgagccttgcagatgtgattttactccaaaccattttagctctagaagagaaaattcctaatatcctgtctgcatttcctttcctccaggaatacacagtgaaactaagtaatatccctacaattaagagattccttgaacctggcagcaagaagaagcctccccctgatgaaatttatgtgagaaccgtctacaacatctttaggccataaaacaacacatccatgtgtgagtgacagtgtgttcctagagatggtattgtctacagtcatgtcttaatggatcccagctctgtcatggtgctatctatgtattaagttgggtcctaagttgggtcttttgtgtcaacgagatcatctcttctagaaatatcaaccttttttgtccagtaaataattgttaggggatctttattggaaaacttttttggagaggctggtatttaagttagatctgattgggctactcatgtcctgtagccagttcatcctcataataagaatgggcaggatctcttgttctctcctgagtgtctttctactctcctgagcgtctttctgctctccttatcctgttctcttatccttatcccctccagtctctgcctaatttttagtgtttaataacaaccgaatgtctagtaaatgactctcctctgagctgtaataaataaaatggtagtaatgaatgcaatcagtattagccaaaataaagaatttatgagtcattgctca

SEQ ID NO: 4649 - protein, 222 aa, Homo sapiens; identical to SEQ ID NO: 561

SEQ ID NO: 4650 - DNA, 1235 bp, Homo sapiens
cccagctcccgcgcgctagagccgcctgctggtctcacccagccgggaccgctgacctggcgctttgtgcggctccaggcctccgagtggactccagaaagcctgaaaagctatcatggcagcaaggcccaagctccactatcccaacggaagaggccggatggagtccgtgagatgggttttagctgccgccggagtcgagtttgatgaagaatttctggaaacaaaagaacagttgtacaagttgcaggatggtaaccacctgctgttccaacaagtgcccatggttgaaattgacgggatgaagttggtacagacccgaagcattctccactacatagcagacaagcacaatctctttggcaagaacctcaaggagagaaccctatgatcagcaaaaggaagtggttaacatggcccagaaggctataattagatactttcctgtgtttgaaaagattttaaggggtcacggacaaagctttcttgttggtaatcagctgagccttgcagatgtgattttactccaaaccattttagctctagaagagaaaattcctaatatcctgtctgcatttcctttcctccaggaatacacagtgaaactaagtaatatccctacaattaagagattccttgaacctggcagcaagaagaagcctccccctgatgaaatttatgtgagaaccgtctacaacatctttaggccataaaacaacacatccatgtgtgagtgacagtgtgttcctagagatggtattgtctacagtcatgtcttaatggatcccagctctgtcatggtgctatctatgtattaagttgggtcctaagttgggtcttttgtgtcaacgagatcatctcttctagaaatatcaaccttttttgtccagtaaataattgttaggggatctttattggaaaacttttttggagaggctggtatttaagttagatctgattgggctactcatgtcctgtagccagttcatcctcataataagaatgggcaggatctcttgttctctcctgagtgtctttctactctcctgagcgtctttctgctctccttatcctgttctcttatccttatcccctccagtctctgcctaatttttagtgtttaataacaaccgaatgtctagtaaatgactctcctctgagctgtaataaataaaatggtagtaatgaatgcaatcagtattagccaaaataaagaatttatgagtcattgctca

SEQ ID NO: 4651 - protein, 99 aa, Homo sapiens
MAQKAIIRYFPVFEKILRGHGQSFLVGNQLSLADVILLQTILALEEKIPNILSAFPFLQEYTVKLSNIPTIKRFLEPGSKKKPPPDEIYVRTVYNIFRP

SEQ ID NO: 4652 - DNA, 1037 bp, Homo sapiens
cccagctcccgcgcgctagagccgcctgctggtctcacccagccgggaccgctgacctggcgctttgtgcggctccaggcctccgagtggactccagaaagcctgaaaagctatcatggcagcaaggcccaagctccactatcccaacggaagaggccggatggagtccgtgagatgggttttagctgccgccggagtcgagtttgatgaagaatttctggaaacaaaagaacagttgtacaagttgcaggatggtaaccacctgctgttccaacaagtgcccatggttgaaattgacgggatgaagttggtacagacccgaagcattctccactacatagcagacaagcacaatctctttggcaagaacctcaaggagagaaccctgtactgaatacacagtgaaactaagtaatatccctacaattaagagattccttgaacctggcagcaagaagaagcctccccctgatgaaatttatgtgagaaccgtctacaacatctttaggccataaaacaacacatccatgtgtgagtgacagtgtgttcctagagatggtattgtctacagtcatgtcttaatggatcccagctctgtcatggtgctatctatgtattaagttgggtcctaagttgggtcttttgtgtcaacgagatcatctcttctagaaatatcaaccttttttgtccagtaaataattgttaggggatctttattggaaaacttttttggagaggctggtatttaagttagatctgattgggctactcatgtcctgtagccagttcatcctcataataagaatgggcaggatctcttgttctctcctgagtgtctttctactctcctgagcgtctttctgctctccttatcctgttctcttatccttatcccctccagtctctgcctaatttttagtgtttaataacaaccgaatgtctagtaaatgactctcctctgagctgtaataaataaaatggtagtaatgaatgcaatcagtattagccaaaataaagaatttatgagtcattgctca

SEQ ID NO: 4653 - protein, 92 aa, Homo sapiens
MAARPKLHYPNGRGRMESVRWVLAAAGVEFDEEFLETKEQLYKLQDGNHLLFQQVPMVEIDGMKLVQTRSILHYIADKHNLFGKNLKERTLY

SEQ ID NO: 4654 - DNA, 659 bp, Homo sapiens
cccagctcccgcgcgctagagccgcctgctggtctcacccagccgggaccgctgacctggcgctttgtgcggctccaggcctccgagtggactccagaaagcctgaaaagctatcatggcagcaaggcccaagctccactatcccaacggaagaggccggatggagtccgtgagatgggttttagctgccgccggagtcgagtttgatgaagaatttctggaaacaaaagaacagttgtacaagttgcaggatggtaaccacctgctgttccaacaagtgcccatggttgaaattgacgggatgaagttggtacagacccgaagcattctccactacatagcagacaagcacaatctctttggcaagaacctcaaggagagaaccctgattgacatgtacgtggaggggacactggatctgctggaactgcttatcatgcatcctttcttaaaaccagatgatcagcaaaaggaagtggttaacatggcccagaaggctataattagatactttcctgtgtttgaaaagattttaaggggtcacggacaaagctttcttgttggtaatcagctgagccttgcagatgtgattttactccaaaccattttagctctagaagagaaaattcctaatatcctgtctgcatttcctttcctcc

SEQ ID NO: 4655 - protein, 180 aa, Homo sapiens
MAARPKLHYPNGRGRMESVRWVLAAAGVEFDEEFLETKEQLYKLQDGNHLLFQQVPMVEIDGMKLVQTRSILHYIADKHNLFGKNLKERTLIDMYVEGTLDLLELLIMHPFLKPDDQQKEVVNMAQKAIIRYFPVFEKILRGHGQSFLVGNQLSLADVILLQTILALEEKIPNILSAFPF

SEQ ID NO: 4656 - DNA, 880 bp, Homo sapiens
cccagctcccgcgcgctagagccgcctgctggtctcacccagccgggaccgctgacctggcgctttgtgcggctccaggcctccgagtggactccagaaagcctgaaaagctatcatggcagcaaggcccaagctccactatcccaacggaagaggccggatggagtccgtgagatgggttttagctgccgccggagtcgagtttgatgaagaatttctggaaacaaaagaacagttgtacaagttgcaggatggattgacatgtacgtggaggggacactggatctgctggaactgcttatcatgcatcctttcttaaaaccagatgatcagcaaaaggaagtggttaacatggcccagaaggctataattagatactttcctgtgtttgaaaaggcactttgtgaatgtaaaataggataatgaagaaatgtggtctggaacgggcacagaggacctggtgctttggcaaaggttcactgctcattcttaggtcccaagggcccagactgtgtcagggtttcttgcaacacgcctatgaggtgagaaccgttgtcccttttacacataatgaaatgaagtcatgaagagattcagtgacctgtccaaggtaacatggccagaaaatggagagcagggttggaactctggcctctgactacaaattcaggatgcattgtactatgccactctggctccagtagctatatttgacctggaattgtgttcggagtccctgtgacacacacacttgtgcacatgcagacacccatgggcatccaagagttgactgtgaaggggatctcccctttgctactactgcttcttgcctctccctaatcacaatctattcttataagccccacacctatacgttacc

SEQ ID NO: 4657 - protein, 67 aa, Homo sapiens
MAARPKLHYPNGRGRMESVRWVLAAAGVEFDEEFLETKEQLYKLQDGLTCTWRGHWICWNCLSCILS

SEQ ID NO: 4658 - DNA, 1368 bp, Homo sapiens
agtctccattggtgaggtcgtcccggagcctcgcccagctcccgcgcgctagagccgcctgctggtctcacccagccgggaccgctgacctggcgctttgtgcggctccaggcctccgagtggactccagaaagcctgaaaagctatcatggcagcaaggcccaagctccactatcccaacggaagaggccggatggagtccgtgagatgggttttagctgccgccggagtcgagtttgatgaagaatttctggaaacaaaagaacagttgtacaagttgcaggatggtaaccacctgctgttccaacaagtgcccatggttgaaattgacgggatgaagttggattgacatgtacgtggaggggacactggatctgctggaactgcttatcatgcatcctttcttaaaaccagatgatcagcaaaaggaagtggttaacatggcccagaaggctataattagatactttcctgtgtttgaaaaggtaggtggcagagatgcctacatacacagagcaaccaaaccacaaaccacaaagaagctgccacaaacacccttttctgtccaaggattttaaaactgagcccagttgaactaacctaagcgctaatggactcctaagagcgaatagtagccacagcacaaagctggtgtcttagagccccttggactctgctaggaccacatgattcagaagtctagaaaaagtatgggctccctgcctttgttccttattgttccttgcattcaccaagttcccaccttgtgtggatacagcagaaacttcagaagatacagaaaacaaaaactacctcattcattcattcaacaaaagttgtcgaacagctgtctcagctgacatcctccctgataattcgatatgagtagaagaaccatttccattttatttatcttccctttgctctttttgtttttggttttgttgtttttctcttcttgttatatctgcttttctgagcttcaaattctttattcctgaactgggaggaacttttttagtgtttcaatgcaaacactaaagaagagggtgtgaaaatatgggaagacctatttggcaagcttcctctgaccatctttatggaactagatttaggaaaaaggagaggtattttctggggtttctgtagctaggttttatggtatctttcccacaggcactttgtgaatgtaaaataggataatgaagaaatgtggtctggaacgggcacagaggacctggtgctttggcaaaggttcactgctcattcttaggtcccaagggcccagactgtgtcagggtttcttgcaacacgcctatgaggtgagaaccgttgtcccttttacacataatgaaatgaagtcatgaa

SEQ ID NO: 4659 - protein, 66 aa, Homo sapiens
MAARPKLHYPNGRGRMESVRWVLAAAGVEFDEEFLETKEQLYKLQDGNHLLFQQVPMVEIDGMKLD

SEQ ID NO: 4660 - DNA, 839 bp, Homo sapiens
tctcacccagccgggaccgctgacctggcgctttgtgcggctccaggcctccgagtggactccagaaagcctgaaaagctatcatggcagcaaggcccaagctccactatcccaacggaagaggccggatggagtccgtgagatgggttttagctgccgccggagtcgaggtaccttatatgctgtttcttcacggatttgtcatacagcttttgagacctttgaaagaaaaatacgttttgaagcaccgttcagttctagttctcgtccaccaaaatcacaggcacgcttcactgagtcagataccatccctgaagggatttttctttataattagaacgtagttgatggaattctattttccttttgacttttacttaattattggcttctgatctagcaccagtgaatatttattaataagaagaaaggaaatttacctgaaaattgtcagttactctgagctcttattaattatgcattctcagggtaaatttcttgttttcttcagtggcttcaaactggcagccttggtatcttgcttacatatgtgtgtgtgtctgtttttgttttcgttctgttcttttagcttcttagtatggaaattttcaaataccaataaatgtagagagaacattgccatgaattctatgtactcatcacccgacttcagcaatcatcagctctatgctaatcttgtttcatctatcacctcccttcccttgttttgtgggagtattttaaagcaaaatccaaacatcataacatttcatctgggagttcctcaacattttcctctaacagatgaggattttaaaatgtaacaatattattatcac

SEQ ID NO: 4661 - protein, 115 aa, Homo sapiens
MHSQGKFLVFFSGFKLAALVSCLHMCVCLFLFSFCSFSFLVWKFSNTNKCRENIAMNSMYSSPDFSNHQLYANLVSSITSLPLFCGSILKQNPNIITFHLGVPQHFPLTDEDFKM

SEQ ID NO: 4662 - DNA, 4371 bp, Homo sapiens
caaccaacccaccctctatttggttgcccctcacaggagcagcactgtctttggcccccgcagtctttctgacagggtagtatggtgggatgcttggctctgaactcatttttatcatgatttgctcttttccctaaaagtaaaaacttagtttgttattgctctgcagtgctgtcatttaaccttgttggtgtcctgggtacatgtctttgtaataatgagctttttgcttttgcaaatcagttggttccagctctacaagttctagtggactgactggaaactatgtcccttcctttctgaaaaaagaaatcggttctgctatgcagagggtacacctagcacctattccagacccttcccctggttattcctccctgaaggccatgagacctcatcctgggcgaccattcttccacacccagcctagaagcactcctgggttgataccacggcctccagccgcccagccagtgcatggccggacagactgggcttccaagtacgcatctcggcgatgactgtctgccttggtgatgaatctcttcctagggagaagcaggatactttccctcagctgactggtgttctacctgcaagatgtgcagagggcataaaagcaaatcaacactttatagttattcttctgaactaagacatgtcaatattcttttttaaagtttttttttaaaatattgatttgaatgcagtaggcttttttgtataaaattattttattctaaaactgggtcccattattttcttaaacaacagcattttgtatatatggattatgttttagcattttatacagtcaactttgtaatgaactttttaaaaattaattgattttcctttggggttccagataatattttctacagattttgaaaaatgtaataatattaatgcagtattgcaacaggggtgcaatttaaggctatgtgatagagggttatttactcagtgtgtgcagatatttatgaagtggtgaaatttcaagtgtggctcactaggtacttcaggccttcttggactgttgttagaaaagtgatcctctgcttttcttagtaggtcattggtttgatttttggataccactctgctgttctaaaaggactattatattatataattcactttgttttacttttgttccccagatgaaagaactctaagtaaatacattttaaaaaatttttctgacaccctttaatgtggttgcagatctcagatgaaaccaagcttaattatactatgccattatattctaatttattccatttttgaaatcaagttgtatgtgtaccaataaaagagatttctgcttcaaaaggctctcaacatgaaggttaacacagtcaatcaaacttacattcctgccaagatgcatggccaaaaaactaagtatcaaagcagcagaaggtttttgattatagtaactgagatggaattttgtgcctagctcagttctccagatctggctaggagcagtcaatgactaatgttctgtcctagccaaattctcaggacaatttggggagcagaaagagttatggcagaggttccactcatctacaaagtcacagtcacatgccacatttgatctcctaaccctggtgtagtttctttcaagagtgagaactttatttgttgggcagaggctgttccattgagaggaatgtttacagcagtttcaaaaatgacaaagtcagtttggagacagaaaaagacaaaaggtccagtctcatccatctctatatggtacatttgcctcacttatggttgccttaaaggcaagagggaaggtcaccatcagtgaacgcaatgcaatctcaacagtgtattgattcatattctcctagggctcaaactactctctattggttccaggataatgacaaattgaaccatatgtaagtaatcttttattttttattttttttttgagacagagtctcactctgtcacccaggctggagtgcagtggcgcgatcttagctctctgcaacctctgcctcccaggttcaagcctcctgagtaactgggactacaggcgcccgccaccacgcccagctaattttttgtatttttagtagagacggggtttcactgtgttagccaggacggcctcgatctcctgacctcgtgatccaccctcctccacctcccaaagtactgggattacaggcatgagccactgcacccagccaagtgatcatttttataggttaaaatgataggtgaaatgaatatagacactttcatatggttcaacctaatgacttggtaaattattgccttggtgtattaataatatgttgcattctgaacaaataaccatggcttccaaagggccctaacctaaaatcggagagtaatttatgctttggagaatttgactcaaatatatacttgaccaagcaccatgatccctaggggcatgagaaaagcacataatggatgtggatgtgataggtggtcttttcctgttaacaagctggcagcaaagcttcagaaaatatatatgcaagcacaacttgaagctgaattcatttctgtattatattctcaactcgttatctaaagcatcagaacatgtgttttcagagatgagtcctttactataaggttaatatttattttcattttctgtattatatatgaaaagtaaattaatgtgaaacctggcccagcttgctggaaagcaggttttaaattgtaaatattccttagaggagcaaatggattgtttaataccatagtctcagtaatctagcttatataaggtcattacattttttaactgaaaaacctagttacctgattattgcacattataaaattgtttttctaatactttatagggcccaacttcagaaaatacttcgcttttttctttttatgctttcgtttgtttaccagcaagcaacttccctggggaagccaaacacatattcataaaaaaaatcaagtagctgatgtgcagttgagaaaactagaggactgaaaaaacaaattttaactagcaaatgctgtgaattactcttcctccccttctctgaaatgggtaaaggacaaattgtgtaaaaaaacctatgcactatagaagggaatagtaaccatttcttttgtctctctgtttctgttctgactgagaacctgcagccatttcttgttacatgaaaacaaaatgctacttgttacctctattttttgttactatacaattatgaaatgtaatgtaagacaccaacagaaatgatatacctgtaactgtacctatcaggactatacctcatttacagtcagaaagcttactgggatgtcaggaaatgatacagggttggttctcatttcgtgccgaaatgagacagaaattcagtgacgaaggtgcgttgtaggggtattgatgtgccccaggtagtgccagcagagtagggaaaactgcatttgcataaaaactactcttgacatgattgttcattttacaaaaaaattccattaattaccaagccctcacccagcccatgtgtgataggatttatgtaggaagaaacttgattttcaaataattttttaaatgtatctcttgcctaaaggactatatacatctaataaagtaacactgtgtcatcttctggagttatcaaaaattgtatacaatcaagacaacacaagaattattttatttttgagtgcaaatacaggtactgttggagttgatgggcaccatgctttctcatgaagtagcatttccctaccatcaagccattgttttgtgccattcaggagaggaaaaaaaggaatttatgctgtacatttcagttcagtgtatgaccaaaagcaatatgtttataagaagatgtttgacatactaattattttatatcatttaaaccatactgtagcaacataatatatggagctaatttgtagaattatttttacgatttccaaacaaatgtactgtactgttatataatttattgtgaggaccttctcatggaagccattaggaaaacaaactagaggtaaatatcacattaatctgtattatcaatttctcatagacactgtgctaatgtgaattttaaatgacctgcatcaagtcttctgatctcagataactcagtacagatagcaattagtcagctgatttgattacaatggagtaaccgacaatatatttatttataaagcacatattcataataacgagaagaattcagaaaaccacttaagcaagacccttctgaaataaaaaatgttgctttttaaatagtttgtcctaaggtgtttaaaacatgtcaaccttatgtaaggaaaaatttcctggtccaaataaagttgaagtttaagaaaaattga

SEQ ID NO: 4663 - protein, 65 aa, Homo sapiens
MQRVHLAPIPDPSPGYSSLKAMRPHPGRPFFHTQPRSTPGLIPRPPAAQPVHGRTDWASKYASRR

SEQ ID NO: 4664 - DNA, 4453 bp, Homo sapiens
acaggctgagctggagtcagaagggaggaatggggtgagaatggcaggccctcttgatgcatgaaattcctcaccctctggtttggaatgtggcttctaaatattgctagacttcatcaggattgacattttgttcttagaagattggcctgacaggccccaggatgatctggaagaagagagatccagatgacagggatcagtataagaaatggcatactctcgaatccaggcaaggaatttattccacctaatccatggtctagttctggcttgtctggaaaatcttcagggacaatgtcagtaatcagcaaagtaaattcagttggttccagctctacaagttctagtggactgactggaaactatgtcccttcctttctgaaaaaagaaatcggttctgctatgcagagggtacacctagcacctattccagacccttcccctggttattcctccctgaaggccatgagacctcatcctgggcgaccattcttccacacccagcctagaagcactcctgggttgataccacggcctccagccgcccagccagtgcatggccggacagactgggcttccaagtacgcatctcggcgatgactgtctgccttggtgatgaatctcttcctagggagaagcaggatactttccctcagctgactggtgttctacctgcaagatgtgcagagggcataaaagcaaatcaacactttatagttattcttctgaactaagacatgtcaatattcttttttaaagtttttttttaaaatattgatttgaatgcagtaggcttttttgtataaaattattttattctaaaactgggtcccattattttcttaaacaacagcattttgtatatatggattatgttttagcattttatacagtcaactttgtaatgaactttttaaaaattaattgattttcctttggggttccagataatattttctacagattttgaaaaatgtaataatattaatgcagtattgcaacaggggtgcaatttaaggctatgtgatagagggttatttactcagtgtgtgcagatatttatgaagtggtgaaatttcaagtgtggctcactaggtacttcaggccttcttggactgttgttagaaaagtgatcctctgcttttcttagtaggtcattggtttgatttttggataccactctgctgttctaaaaggactattatattatataattcactttgttttacttttgttccccagatgaaagaactctaagtaaatacattttaaaaaatttttctgacaccctttaatgtggttgcagatctcagatgaaaccaagcttaattatactatgccattatattctaatttattccatttttgaaatcaagttgtatgtgtaccaataaaagagatttctgcttcaaaaggctctcaacatgaaggttaacacagtcaatcaaacttacattcctgccaagatgcatggccaaaaaactaagtatcaaagcagcagaaggtttttgattatagtaactgagatggaattttgtgcctagctcagttctccagatctggctaggagcagtcaatgactaatgttctgtcctagccaaattctcaggacaatttggggagcagaaagagttatggcagaggttccactcatctacaaagtcacagtcacatgccacatttgatctcctaaccctggtgtagtttctttcaagagtgagaactttatttgttgggcagaggctgttccattgagaggaatgtttacagcagtttcaaaaatgacaaagtcagtttggagacagaaaaagacaaaaggtccagtctcatccatctctatatggtacatttgcctcacttatggttgccttaaaggcaagagggaaggtcaccatcagtgaacgcaatgcaatctcaacagtgtattgattcatattctcctagggctcaaactactctctattggttccaggataatgacaaattgaaccatatgtaagtaatcttttattttttattttttttttgagacagagtctcactctgtcacccaggctggagtgcagtggcgcgatcttagctctctgcaacctctgcctcccaggttcaagcctcctgagtaactgggactacaggcgcccgccaccacgcccagctaattttttgtatttttagtagagacggggtttcactgtgttagccaggacggcctcgatctcctgacctcgtgatccaccctcctccacctcccaaagtactgggattacaggcatgagccactgcacccagccaagtgatcatttttataggttaaaatgataggtgaaatgaatatagacactttcatatggttcaacctaatgacttggtaaattattgccttggtgtattaataatatgttgcattctgaacaaataaccatggcttccaaagggccctaacctaaaatcggagagtaatttatgctttggagaatttgactcaaatatatacttgaccaagcaccatgatccctaggggcatgagaaaagcacataatggatgtggatgtgataggtggtcttttcctgttaacaagctggcagcaaagcttcagaaaatatatatgcaagcacaacttgaagctgaattcatttctgtattatattctcaactcgttatctaaagcatcagaacatgtgttttcagagatgagtcctttactataaggttaatatttattttcattttctgtattatatatgaaaagtaaattaatgtgaaacctggcccagcttgctggaaagcaggttttaaattgtaaatattccttagaggagcaaatggattgtttaataccatagtctcagtaatctagcttatataaggtcattacattttttaactgaaaaacctagttacctgattattgcacattataaaattgtttttctaatactttatagggcccaacttcagaaaatacttcgcttttttctttttatgctttcgtttgtttaccagcaagcaacttccctggggaagccaaacacatattcataaaaaaaatcaagtagctgatgtgcagttgagaaaactagaggactgaaaaaacaaattttaactagcaaatgctgtgaattactcttcctccccttctctgaaatgggtaaaggacaaattgtgtaaaaaaacctatgcactatagaagggaatagtaaccatttcttttgtctctctgtttctgttctgactgagaacctgcagccatttcttgttacatgaaaacaaaatgctacttgttacctctattttttgttactatacaattatgaaatgtaatgtaagacaccaacagaaatgatatacctgtaactgtacctatcaggactatacctcatttacagtcagaaagcttactgggatgtcaggaaatgatacagggttggttctcatttcgtgccgaaatgagacagaaattcagtgacgaaggtgcgttgtaggggtattgatgtgccccaggtagtgccagcagagtagggaaaactgcatttgcataaaaactactcttgacatgattgttcattttacaaaaaaattccattaattaccaagccctcacccagcccatgtgtgataggatttatgtaggaagaaacttgattttcaaataattttttaaatgtatctcttgcctaaaggactatatacatctaataaagtaacactgtgtcatcttctggagttatcaaaaattgtatacaatcaagacaacacaagaattattttatttttgagtgcaaatacaggtactgttggagttgatgggcaccatgctttctcatgaagtagcatttccctaccatcaagccattgttttgtgccattcaggagaggaaaaaaaggaatttatgctgtacatttcagttcagtgtatgaccaaaagcaatatgtttataagaagatgtttgacatactaattattttatatcatttaaaccatactgtagcaacataatatatggagctaatttgtagaattatttttacgatttccaaacaaatgtactgtactgttatataatttattgtgaggaccttctcatggaagccattaggaaaacaaactagaggtaaatatcacattaatctgtattatcaatttctcatagacactgtgctaatgtgaattttaaatgacctgcatcaagtcttctgatctcagataactcagtacagatagcaattagtcagctgatttgattacaatggagtaaccgacaatatatttatttataaagcacatattcataataacgagaagaattcagaaaaccacttaagcaagacccttctgaaataaaaaatgttgctttttaaatagtttgtcctaaggtgtttaaaacatgtcaaccttatgtaaggaaaaatttcctggtccaaataaagttgaagtttaagaaaaattga

SEQ ID NO: 4665 - protein, 137 aa, Homo sapiens
MTGISIRNGILSNPGKEFIPPNPWSSSGLSGKSSGTMSVISKVNSVGSSSTSSSGLTGNYVPSFLKKEIGSAMQRVHLAPIPDPSPGYSSLKAMRPHPGRPFFHTQPRSTPGLIPRPPAAQPVHGRTDWASKYASRR

SEQ ID NO: 4666 - DNA, 6096 bp, Homo sapiens
gcgccgtgcggcccgtgcgactcgccggacctcgcgggcgtccctgtacggagccctcggccggtcctagcagggattgtccccatttccagctccggagcgggcggctgcgccccgctcgtcgaggagctgcgctcacctcaggggcgggcccccgcctgcgttcgcggcgccagcagaagactgatttttggaaatatgtatttgggagacagtcacgtcctattgaataccttgtgctggtgctgccatcgaaaaatctggttacactctggggaggactgctaccactgcagaactgaaccacttcggccgtgagatgagtgtccggcctgagcaggcacaccatgaatagatacacaacaatcaggcagctcggggatggaacctacggttccgtcctgctgggaagaagcattgagtctggggagctgatcgctattaaaaaaatgaaaagaaaattttattcctgggaggaatgcatgaaccttcgggaggttaagtctttaaagaagctcaaccatgccaatgtagtcaaattaaaagaagttatcagggaaaatgatcatctttattttatcttcgagtacatgaaggaaaatctttaccagctcattaaagagagaaataagttgtttcctgagtctgctataaggaatatcatgtatcagatattacaaggactcgcatttattcacaaacacggcttctttcatcgagacttaaagcctgagaacctcctctgcatgggaccagaacttgtgaaaattgcagactttggtttggcccgagaaatacgatcaaaacctccatatacagattatgtatctaccagatggtacagggctccagaagtactcctgaggtctaccaactacagctcccccattgacgtctgggcggtgggctgcatcatggcagaagtttacaccctcaggccactcttccctggagccagtgaaattgacacaatattcaaaatttgccaagtgctggggacaccaaaaaagactgactggcctgaaggctatcaactttcaagtgcaatgaacttccgttggccacagtgtgtacccaataacttaaagaccttgattcccaatgctagcagtgaagcagtccagctcctgagagacatgcttcagtgggatcccaagaaacgaccaacagctagtcaggcacttcgatatccttacttccaagttggacacccactaggcagcaccacacaaaaccttcaggattcagaaaaaccacagaaaggcatcctggaaaaggcaggcccacctccttatattaagccagtcccacctgcccagccaccagccaagccacacacacgaatttcttcacgacagcatcaagccagccagccccctctgcatctcacgtacccctacaaagcagaggtctccaggacagatcacccaagccatctccaggaggacaagccaagcccgttgcttttcccatccctccacaacaagcatccacagtcgaaaatcacagctggcctggagcacaaaaatggtgagataaagccaaagagtaggagaaggtggggtcttatttccaggtcaacaaaggattcagatgattgggctgacttggatgacttggatttcagtccatccctcagcaggattgacctgaaaaacaagaaaagacagagtgatgacactctctgcaggtttgagagtgttttggacctgaagccctctgagcctgtgggcacaggaaacagtgcccccacccagacgtcatatcagcggcgagacacgcccaccctgagatctgcagccaagcagcactatttgaagcactctcgatacttgcctgggatcagtataagaaatggcatactctcgaatccaggcaaggaatttattccacctaatccatggtctagttctggcttgtctggaaaatcttcagggacaatgtcagtaatcagcaaagtaaattcagttggttccagctctacaagttctagtggactgactggaaactatgtcccttcctttctgaaaaaagaaatcggttctgctatgcagagggtacacctagcacctattccagacccttcccctggttattcctccctgaaggccatgagacctcatcctgggcgaccattcttccacacccagcctagaagcactcctgggttgataccacggcctccagccgcccagccagtgcatggccggacagactgggcttccaagtacgcatctcggcgatgactgtctgccttggtgatgaatctcttcctagggagaagcaggatactttccctcagctgactggtgttctacctgcaagatgtgcagagggcataaaagcaaatcaacactttatagttattcttctgaactaagacatgtcaatattcttttttaaagtttttttttaaaatattgatttgaatgcagtaggcttttttgtataaaattattttattctaaaactgggtcccattattttcttaaacaacagcattttgtatatatggattatgttttagcattttatacagtcaactttgtaatgaactttttaaaaattaattgattttcctttggggttccagataatattttctacagattttgaaaaatgtaataatattaatgcagtattgcaacaggggtgcaatttaaggctatgtgatagagggttatttactcagtgtgtgcagatatttatgaagtggtgaaatttcaagtgtggctcactaggtacttcaggccttcttggactgttgttagaaaagtgatcctctgcttttcttagtaggtcattggtttgatttttggataccactctgctgttctaaaaggactattatattatataattcactttgttttacttttgttccccagatgaaagaactctaagtaaatacattttaaaaaatttttctgacaccctttaatgtggttgcagatctcagatgaaaccaagcttaattatactatgccattatattctaatttattccatttttgaaatcaagttgtatgtgtaccaataaaagagatttctgcttcaaaaggctctcaacatgaaggttaacacagtcaatcaaacttacattcctgccaagatgcatggccaaaaaactaagtatcaaagcagcagaaggtttttgattatagtaactgagatggaattttgtgcctagctcagttctccagatctggctaggagcagtcaatgactaatgttctgtcctagccaaattctcaggacaatttggggagcagaaagagttatggcagaggttccactcatctacaaagtcacagtcacatgccacatttgatctcctaaccctggtgtagtttctttcaagagtgagaactttatttgttgggcagaggctgttccattgagaggaatgtttacagcagtttcaaaaatgacaaagtcagtttggagacagaaaaagacaaaaggtccagtctcatccatctctatatggtacatttgcctcacttatggttgccttaaaggcaagagggaaggtcaccatcagtgaacgcaatgcaatctcaacagtgtattgattcatattctcctagggctcaaactactctctattggttccaggataatgacaaattgaaccatatgtaagtaatcttttattttttattttttttttgagacagagtctcactctgtcacccaggctggagtgcagtggcgcgatcttagctctctgcaacctctgcctcccaggttcaagcctcctgagtaactgggactacaggcgcccgccaccacgcccagctaattttttgtatttttagtagagacggggtttcactgtgttagccaggacggcctcgatctcctgacctcgtgatccaccctcctccacctcccaaagtactgggattacaggcatgagccactgcacccagccaagtgatcatttttataggttaaaatgataggtgaaatgaatatagacactttcatatggttcaacctaatgacttggtaaattattgccttggtgtattaataatatgttgcattctgaacaaataaccatggcttccaaagggccctaacctaaaatcggagagtaatttatgctttggagaatttgactcaaatatatacttgaccaagcaccatgatccctaggggcatgagaaaagcacataatggatgtggatgtgataggtggtcttttcctgttaacaagctggcagcaaagcttcagaaaatatatatgcaagcacaacttgaagctgaattcatttctgtattatattctcaactcgttatctaaagcatcagaacatgtgttttcagagatgagtcctttactataaggttaatatttattttcattttctgtattatatatgaaaagtaaattaatgtgaaacctggcccagcttgctggaaagcaggttttaaattgtaaatattccttagaggagcaaatggattgtttaataccatagtctcagtaatctagcttatataaggtcattacattttttaactgaaaaacctagttacctgattattgcacattataaaattgtttttctaatactttatagggcccaacttcagaaaatacttcgcttttttctttttatgctttcgtttgtttaccagcaagcaacttccctggggaagccaaacacatattcataaaaaaaatcaagtagctgatgtgcagttgagaaaactagaggactgaaaaaacaaattttaactagcaaatgctgtgaattactcttcctccccttctctgaaatgggtaaaggacaaattgtgtaaaaaaacctatgcactatagaagggaatagtaaccatttcttttgtctctctgtttctgttctgactgagaacctgcagccatttcttgttacatgaaaacaaaatgctacttgttacctctattttttgttactatacaattatgaaatgtaatgtaagacaccaacagaaatgatatacctgtaactgtacctatcaggactatacctcatttacagtcagaaagcttactgggatgtcaggaaatgatacagggttggttctcatttcgtgccgaaatgagacagaaattcagtgacgaaggtgcgttgtaggggtattgatgtgccccaggtagtgccagcagagtagggaaaactgcatttgcataaaaactactcttgacatgattgttcattttacaaaaaaattccattaattaccaagccctcacccagcccatgtgtgataggatttatgtaggaagaaacttgattttcaaataattttttaaatgtatctcttgcctaaaggactatatacatctaataaagtaacactgtgtcatcttctggagttatcaaaaattgtatacaatcaagacaacacaagaattattttatttttgagtgcaaatacaggtactgttggagttgatgggcaccatgctttctcatgaagtagcatttccctaccatcaagccattgttttgtgccattcaggagaggaaaaaaaggaatttatgctgtacatttcagttcagtgtatgaccaaaagcaatatgtttataagaagatgtttgacatactaattattttatatcatttaaaccatactgtagcaacataatatatggagctaatttgtagaattatttttacgatttccaaacaaatgtactgtactgttatataatttattgtgaggaccttctcatggaagccattaggaaaacaaactagaggtaaatatcacattaatctgtattatcaatttctcatagacactgtgctaatgtgaattttaaatgacctgcatcaagtcttctgatctcagataactcagtacagatagcaattagtcagctgatttgattacaatggagtaaccgacaatatatttatttataaagcacatattcataataacgagaagaattcagaaaaccacttaagcaagacccttctgaaataaaaaatgttgctttttaaatagtttgtcctaaggtgtttaaaacatgtcaaccttatgtaaggaaaaatttcctggtccaaataaagttgaagtttaagaaaaattga

SEQ ID NO: 4667 - protein, 632 aa, Homo sapiens; identical to SEQ ID NO: 564

SEQ ID NO: 4668 - DNA, 6229 bp, Homo sapiens
cgggttcctgctgcactaccatgcgccgtgcggcccgtgcgactcgccggacctcgcgggcgtccctgtacggagccctcggccggtcctagcagggattgtccccatttccagctccggagcgggcggctgcgccccgctcgtcgaggagctgcgctcacctcaggggcgggcccccgcctgcgttcgcggcgccaagaagagtattcctttccacttacaactaaataagacctgcttttgctggagctgtgctaggctgagggaattccacactgaattttacaagcgggatggatttctctaaggcagaagactgatttttggaaatatgtatttgggagacagtcacgtcctattgaataccttgtgctggtgctgccatcgaaaaatctggttacactctggggaggactgctaccactgcagaactgaaccacttcggccgtgagatgagtgtccggcctgagcaggcacaccatgaatagatacacaacaatcaggcagctcggggatggaacctacggttccgtcctgctgggaagaagcattgagtctggggagctgatcgctattaaaaaaatgaaaagaaaattttattcctgggaggaatgcatgaaccttcgggaggttaagtctttaaagaagctcaaccatgccaatgtagtcaaattaaaagaagttatcagggaaaatgatcatctttattttatcttcgagtacatgaaggaaaatctttaccagctcattaaagagagaaataagttgtttcctgagtctgctataaggaatatcatgtatcagatattacaaggactcgcatttattcacaaacacggcttctttcatcgagacttaaagcctgagaacctcctctgcatgggaccagaacttgtgaaaattgcagactttggtttggcccgagaaatacgatcaaaacctccatatacagattatgtatctaccagatggtacagggctccagaagtactcctgaggtctaccaactacagctcccccattgacgtctgggcggtgggctgcatcatggcagaagtttacaccctcaggccactcttccctggagccagtgaaattgacacaatattcaaaatttgccaagtgctggggacaccaaaaaagactgactggcctgaaggctatcaactttcaagtgcaatgaacttccgttggccacagtgtgtacccaataacttaaagaccttgattcccaatgctagcagtgaagcagtccagctcctgagagacatgcttcagtgggatcccaagaaacgaccaacagctagtcaggcacttcgatatccttacttccaagttggacacccactaggcagcaccacacaaaaccttcaggattcagaaaaaccacagaaaggcatcctggaaaaggcaggcccacctccttatattaagccagtcccacctgcccagccaccagccaagccacacacacgaatttcttcacgacagcatcaagccagccagccccctctgcatctcacgtacccctacaaagcagaggtctccaggacagatcacccaagccatctccaggaggacaagccaagcccgttgcttttcccatccctccacaacaagcatccacagtcgaaaatcacagctggcctggagcacaaaaatggtgagataaagccaaagagtaggagaaggtggggtcttatttccaggtcaacaaaggattcagatgattgggctgacttggatgacttggatttcagtccatccctcagcaggattgacctgaaaaacaagaaaagacagagtgatgacactctctgcaggtttgagagtgttttggacctgaagccctctgagcctgtgggcacaggaaacagtgcccccacccagacgtcatatcagcggcgagacacgcccaccctgagatctgcagccaagcagcactatttgaagcactctcgatacttgcctgggatcagtataagaaatggcatactctcgaatccaggcaaggaatttattccacctaatccatggtctagttctggcttgtctggaaaatcttcagggacaatgtcagtaatcagcaaagtaaattcagttggttccagctctacaagttctagtggactgactggaaactatgtcccttcctttctgaaaaaagaaatcggttctgctatgcagagggtacacctagcacctattccagacccttcccctggttattcctccctgaaggccatgagacctcatcctgggcgaccattcttccacacccagcctagaagcactcctgggttgataccacggcctccagccgcccagccagtgcatggccggacagactgggcttccaagtacgcatctcggcgatgactgtctgccttggtgatgaatctcttcctagggagaagcaggatactttccctcagctgactggtgttctacctgcaagatgtgcagagggcataaaagcaaatcaacactttatagttattcttctgaactaagacatgtcaatattcttttttaaagtttttttttaaaatattgatttgaatgcagtaggcttttttgtataaaattattttattctaaaactgggtcccattattttcttaaacaacagcattttgtatatatggattatgttttagcattttatacagtcaactttgtaatgaactttttaaaaattaattgattttcctttggggttccagataatattttctacagattttgaaaaatgtaataatattaatgcagtattgcaacaggggtgcaatttaaggctatgtgatagagggttatttactcagtgtgtgcagatatttatgaagtggtgaaatttcaagtgtggctcactaggtacttcaggccttcttggactgttgttagaaaagtgatcctctgcttttcttagtaggtcattggtttgatttttggataccactctgctgttctaaaaggactattatattatataattcactttgttttacttttgttccccagatgaaagaactctaagtaaatacattttaaaaaatttttctgacaccctttaatgtggttgcagatctcagatgaaaccaagcttaattatactatgccattatattctaatttattccatttttgaaatcaagttgtatgtgtaccaataaaagagatttctgcttcaaaaggctctcaacatgaaggttaacacagtcaatcaaacttacattcctgccaagatgcatggccaaaaaactaagtatcaaagcagcagaaggtttttgattatagtaactgagatggaattttgtgcctagctcagttctccagatctggctaggagcagtcaatgactaatgttctgtcctagccaaattctcaggacaatttggggagcagaaagagttatggcagaggttccactcatctacaaagtcacagtcacatgccacatttgatctcctaaccctggtgtagtttctttcaagagtgagaactttatttgttgggcagaggctgttccattgagaggaatgtttacagcagtttcaaaaatgacaaagtcagtttggagacagaaaaagacaaaaggtccagtctcatccatctctatatggtacatttgcctcacttatggttgccttaaaggcaagagggaaggtcaccatcagtgaacgcaatgcaatctcaacagtgtattgattcatattctcctagggctcaaactactctctattggttccaggataatgacaaattgaaccatatgtaagtaatcttttattttttattttttttttgagacagagtctcactctgtcacccaggctggagtgcagtggcgcgatcttagctctctgcaacctctgcctcccaggttcaagcctcctgagtaactgggactacaggcgcccgccaccacgcccagctaattttttgtatttttagtagagacggggtttcactgtgttagccaggacggcctcgatctcctgacctcgtgatccaccctcctccacctcccaaagtactgggattacaggcatgagccactgcacccagccaagtgatcatttttataggttaaaatgataggtgaaatgaatatagacactttcatatggttcaacctaatgacttggtaaattattgccttggtgtattaataatatgttgcattctgaacaaataaccatggcttccaaagggccctaacctaaaatcggagagtaatttatgctttggagaatttgactcaaatatatacttgaccaagcaccatgatccctaggggcatgagaaaagcacataatggatgtggatgtgataggtggtcttttcctgttaacaagctggcagcaaagcttcagaaaatatatatgcaagcacaacttgaagctgaattcatttctgtattatattctcaactcgttatctaaagcatcagaacatgtgttttcagagatgagtcctttactataaggttaatatttattttcattttctgtattatatatgaaaagtaaattaatgtgaaacctggcccagcttgctggaaagcaggttttaaattgtaaatattccttagaggagcaaatggattgtttaataccatagtctcagtaatctagcttatataaggtcattacattttttaactgaaaaacctagttacctgattattgcacattataaaattgtttttctaatactttatagggcccaacttcagaaaatacttcgcttttttctttttatgctttcgtttgtttaccagcaagcaacttccctggggaagccaaacacatattcataaaaaaaatcaagtagctgatgtgcagttgagaaaactagaggactgaaaaaacaaattttaactagcaaatgctgtgaattactcttcctccccttctctgaaatgggtaaaggacaaattgtgtaaaaaaacctatgcactatagaagggaatagtaaccatttcttttgtctctctgtttctgttctgactgagaacctgcagccatttcttgttacatgaaaacaaaatgctacttgttacctctattttttgttactatacaattatgaaatgtaatgtaagacaccaacagaaatgatatacctgtaactgtacctatcaggactatacctcatttacagtcagaaagcttactgggatgtcaggaaatgatacagggttggttctcatttcgtgccgaaatgagacagaaattcagtgacgaaggtgcgttgtaggggtattgatgtgccccaggtagtgccagcagagtagggaaaactgcatttgcataaaaactactcttgacatgattgttcattttacaaaaaaattccattaattaccaagccctcacccagcccatgtgtgataggatttatgtaggaagaaacttgattttcaaataattttttaaatgtatctcttgcctaaaggactatatacatctaataaagtaacactgtgtcatcttctggagttatcaaaaattgtatacaatcaagacaacacaagaattattttatttttgagtgcaaatacaggtactgttggagttgatgggcaccatgctttctcatgaagtagcatttccctaccatcaagccattgttttgtgccattcaggagaggaaaaaaaggaatttatgctgtacatttcagttcagtgtatgaccaaaagcaatatgtttataagaagatgtttgacatactaattattttatatcatttaaaccatactgtagcaacataatatatggagctaatttgtagaattatttttacgatttccaaacaaatgtactgtactgttatataatttattgtgaggaccttctcatggaagccattaggaaaacaaactagaggtaaatatcacattaatctgtattatcaatttctcatagacactgtgctaatgtgaattttaaatgacctgcatcaagtcttctgatctcagataactcagtacagatagcaattagtcagctgatttgattacaatggagtaaccgacaatatatttatttataaagcacatattcataataacgagaagaattcagaaaaccacttaagcaagacccttctgaaataaaaaatgttgctttttaaatagtttgtcctaaggtgtttaaaacatgtcaaccttatgtaaggaaaaatttcctggtccaaataaagttgaagtttaagaaaaattga

SEQ ID NO: 4669 - protein, 632 aa, Homo sapiens; identical to SEQ ID NO: 564

SEQ ID NO: 4670 - DNA, 1776 bp, Homo sapiens
gttatgagaaggatattgacggatattccagaacaactgattcttttgtaatgttaaccttttaaagtttgactttgacactaacattaaggacttatatgtaatatagctaatgcatcattctgcagagaagagtattcctttccacttacaactaaataagacctgcttttgctggagctgtgctaggctgagggaattccacactgaattttacaagcgggatggatttctctaaggcagaagactgatttttggaaatatgtatttgggagacagtcacgtcctattgaataccttgtgctggtgctgccatcgaaaaatctggttacactctggggaggactgctaccactgcagaactgaaccacttcggccgtgagatgagtgtccggcctgagcaggcacaccatgaatagatacacaacaatcaggcagctcggggatggaacctacggttccgtcctgctgggaagaagcattgagtctggggagctgatcgctattaaaaaaatgaaaagaaaattttattcctgggaggaatgcatgaaccttcgggaggttaagtctttaaagaagctcaaccatgccaatgtagtcaaattaaaagaagttatcagggaaaatgatcatctttattttatcttcgagtacatgaaggaaaatctttaccagctcattaaagagagaaataagttgtttcctgagtctgctataaggaatatcatgtatcagatattacaaggactcgcatttattcacaaacacggcttctttcatcgagacttaaagcctgagaacctcctctgcatgggaccagaacttgtgaaaattgcagactttggtttggcccgagaaatacgatcaaaacctccatatacagattatgtatctaccagatggtacagggctccagaagtactcctgaggtctaccaactacagctcccccattgacgtctgggcggtgggctgcatcatggcagaagtttacaccctcaggccactcttccctggagccagtgaaattgacacaatattcaaaatttgccaagtgctggggacaccaaaaaagactgactggcctgaaggctatcaactttcaagtgcaatgaacttccgttggccacagtgtgtacccaataacttaaagaccttgattcccaatgctagcagtgaagcagtccagctcctgagagacatgcttcagtgggatcccaagaaacgaccaacagctagtcaggttttcttccattttcttgttataacgttcatatctaactctgaataatttctatgaattgcacaggaaatatttagtatttagtattatgggtgagaaatagtacagaataccactaatggtgtactatataaggtatgagaacttaaaatagtttgaaacttactgggtataaagtagttacaatgtaaacaatatagttgctttgaaaattggcatgtaattcacatgatatatcaccatttatatggaaatggaaataaacatatatttatctgtctttggagaatgttttcaaatctattctctatgagttacaattatatagtagtttgtttataagccggtactggttgttgaaaggcaacttcatattatgtaaaagtccaactgactcataacctgaagagattgacagatgagatagacctaggatagtaactgcacttagtatttcatagcactttacagtgtgcaaatgcttgaatatattttatatgatttttaatccaataaagactccatgagacaggc

SEQ ID NO: 4671 - protein, 292 aa, Homo sapiens
MNRYTTIRQLGDGTYGSVLLGRSIESGELIAIKKMKRKFYSWEECMNLREVKSLKKLNHANVVKLKEVIRENDHLYFIFEYMKENLYQLIKERNKLFPESAIRNIMYQILQGLAFIHKHGFFHRDLKPENLLCMGPELVKIADFGLAREIRSKPPYTDYVSTRWYRAPEVLLRSTNYSSPIDVWAVGCIMAEVYTLRPLFPGASEIDTIFKICQVLGTPKKTDWPEGYQLSSAMNFRWPQCVPNNLKTLIPNASSEAVQLLRDMLQWDPKKRPTASQVFFHFLVITFISNSE

SEQ ID NO: 4672 - DNA, 548 bp, Homo sapiens
gcgggagaacacagaacacgcaccctttcttttagtcaccctggaggcctcggagaaggcggtttcagtgatccgtgaagagaccccgagtcttttacatcccggagaatgacaagagagcgagtacctgggcgacgtttacgttctgggatttcgggagatgcggttttctgcacgccaggggccaagcctgagacgtagatggacggcagggataggagctctctccgcgccacaaacgcccctgctcatacctgggttccttgattttcctgcctatataacccagcctcccatggccgggctctgagctctcattctgcggactgggacaaaggggttaactgtgatgcgctttgtataaccccaggattctgcacttgcccaagggcgaggtgcaaatcaaaaactacgcacaactgaacaccgagatcagaaattgacaagcttattctgaaggacctagagtaacctaaataattaggaaaagaaaaacaaagttagaggacttacaccaagtaatttcaagacttattataaagctaagg

SEQ ID NO: 4673 - protein, 49 aa, Homo sapiens
MRFSARQGPSLRRRWTAGIGALSAPQTPLLIPGFLDFPAYITQPPMAGL

SEQ ID NO: 4674 - DNA, 251 bp, Homo sapiens
agtgcagtaaccagttcaagttggaagtgtgtcttttgaatgcagaaaacaaagtcgtggacaaccaggctgggacccagggccagctgaaggtgctgggtgccaacctctggtggccgtacctgatgcacgaacaccccgcctacctgtactcgtgggaggtgcggctgactgcacagaagtcactggggcctttgacttctacacactccctgtggggctccgcactgtgcccgtcaccgagagccagt

SEQ ID NO: 4675 - protein, 41 aa, Homo sapiens
MHEHPAYLYSWEVRLTAQKSLGPLTSTHSLWGSALCPSPRA

SEQ ID NO: 4676 - DNA, 1785 bp, Homo sapiens
atgtgagccaattctcctgataaactcaccttcatatatacatctatcctattagttctatccgtttagagaaccctgactaatacacaggccatgctcagatggagtgctgtctggaaatgggagtaattctgtggttgaatgtcttaattgtcctggaaggtgggagaaatggaatgaggctggtgctacaattgatgtaaaagcagcagctgctcacataagccggggtggaggatgcctaggcgtatttgtggtattgaccatgttcttgtttttgtttgtgaccagaccagattacagaggggtattgatttgccttgcccccgcccccaccatcacagtgtgtccctgtccagtgttggtgctgtgtggcattgcttgtgtccataggagtccatcaaggcagagcggcagagcggcaagcagagcggcaaggcagttcaacccaatggaaatggattgaaagagtgaaagtcactggtctcaaagaatctacggaatttagcattttgaaaatcacagagcaattttgggtaggtattcacatgcactaaaaaaccaggcaaacatctgactcccaggataaagtgactgagagcagtagaagacttgttgagccttaaggaataagaggaaaattatgttatgaagtgcaggaacagcacagacccagacgaggggatgcagcccggagccagtaacccggcgcctcctcctccccagggcgcagcgctggctgctccccggataccgtgatcacacgtcccaggtcctgagagcgcctcataggtagacagttctttgggacttttgggacgcagcacttgaagagaggtttacctaaactttcctcctgggagcctgtcatcatttgaaagtaacagaagaaagctgtcaggctgaggaaagtttcaacaggcacttggtgagaatgggaagcatccattcattgggaaatcacggggacagaggaggaattcacgggatcagagcactgagaaactccagaggcttctggttcaccgccctgattccacagatgtgggtcagaggcagagatggaagttggaatggacaagcctgccctctcctcagctctccatggctctgtcctcaggctgtttctgcaatttgacatgaggcctggccccagggaaaccagtggggcctcatctcctccctgtgctgctctgaggtggagccttctcagggtcagtccagctctggagcccctctccagctcggtcaccaaagctgtctggtcccagggcagtgtggagtgacaggcacgccagccaatccaatcggccatttcatacccaatgcatgtgactgataaagagataacaccctgtctccaagacacaggctttacataaacagctttaatgacttcttcacttagggacaagactccttagtggtggaacctcaggcatccatgcaggatgtaagaaagctcccgtatatacatgaactgagaagtgtgtagaagagtaaatactgtaataggtaataaaatgtatgtatttttatttatgtgctactttgtctttctccctctctgtgtatatacacatacatacaaaaatgtattcattctatggaaaacatgaaagatgtaatattctttacatatttaattaatgtattttttctgatcatatgaacaccacaaatataattttataatttttttacctaacaataagtcttaaacataaatatacatggacaatatcatagttttttttttaatcataattaaaatggttgtgaaac

SEQ ID NO: 4677 - protein, 66 aa, Homo sapiens
MFLFLFVTRPDYRGVLICLAPAPTITVCPCPVLVLCGIACVHRSPSRQSGRAASRAARQFNPMEMD

SEQ ID NO: 4678 - DNA, 3024 bp, Homo sapiens
catcccaaagcacttcagcttgaagaagatctaggacacagtttgttgttaccacctcagagcatttagatgggacgtgatggatggaattgaagttgaaaacccattcaccatttctagttagtacagtaggctcctaatttacagaaatgcttgtgaaattgagaatcatgataaaatcctcatacctcctcctcttttgaccaaatctttctaaaatgcacaattataatttcttatctttaggaaaaagtaattatgttatatgtgttatatacactatgtaaatatagttcattaaatcattctttggtgtttgaagactttctaattcattacttcattccagacatcaatgacaacagcacataccgagcaggtacacatatgagctacctactaatatgccctgattttgattgtattttgtgaaaaccttggtatgggttatttttaaatgaatgttttcccaaattttaagctgaaactaggatgcatcaaaattatcttggtcataatcttgtcaatgatgtcatctaaaggccaccaggaacacacctgtagcccagcaaagttgaggccatcgactggctcatcacaacaaggaaggctgtgcaccactgggacccagcagcagctcagcagcagcagtgagagggccttgggaaagacttggagggtttggcttatacaaggtgatcttggggagggtcaaggaaacaggctgtgatggttaatattgagtgtcaacttgattggattgaaggatgcaaaggattgttcctgggtgtatatgtgagagtgtggccaaaggagattaacattttagtcagtggactgggagaggcacacccaccctcaatctgggtgggcatcatctaatcagctgccacagcagctaaaataaagcaggcagaagttggaatgagcagacttgctgagtgttccagccttcatctttctcccatgctggatgcttcctgccctcgaacatcagactccaagttcttcagcttttttttttttttttggactcttggacttacagcattggtttgccaggggctcccaggcctctagccgcagactgaaggctgcactgtgagcctccctacctttgaagtttgggactcagactggcttcttggctcctcagcttgcagtcggcctattgtgagacttccccttgtgatcatgtgagccaattctcctgataaactcaccttcatatatacatctatcctattagttctatccgtttagagaaccctgactaatacacaggccatgctcagatggagtgctgtctggaaatgggagtaattctgtggttgaatgtcttaattgtcctggaaggtgggagaaatggaatgaggctggtgctacaattgatgtaaaagcagcagctgctcacataagccggggtggaggatgcctaggcgtatttgtggtattgaccatgttcttgtttttgtttgtgaccagaccagattacagaggggtattgatttgccttgcccccgcccccaccatcacagtgtgtccctgtccagtgttggtgctgtgtggcattgcttgtgtccataggagtccatcaaggcagagcggcagagcggcaagcagagcggcaaggcaggtcagcttccggctcttccaggctgcatgtccccctcaatatcctttcaacccaatggaaatggattgaaagagtgaaagtcactggtctcaaagaatctacggaatttagcattttgaaaatcacagagcaattttgggtaggtattcacatgcactaaaaaaccaggcaaacatctgactcccaggataaagtgactgagagcagtagaagacttgttgagccttaaggaataagaggaaaattatgttatgaagtgcaggaacagcacagacccagacgaggggatgcagcccggagccagtaacccggcgcctcctcctccccagggcgcagcgctggctgctccccggataccgtgatcacacgtcccaggtcctgagagcgcctcataggtagacagttctttgggacttttgggacgcagcacttgaagagaggtttacctaaactttcctcctgggagcctgtcatcatttgaaagtaacagaagaaagctgtcaggctgaggaaagtttcaacaggcacttggtgagaatgggaagcatccattcattgggaaatcacggggacagaggaggaattcacgggatcagagcactgagaaactccagaggcttctggttcaccgccctgattccacagatgtgggtcagaggcagagatggaagttggaatggacaagcctgccctctcctcagctctccatggctctgtcctcaggctgtttctgcaatttgacatgaggcctggccccagggaaaccagtggggcctcatctcctccctgtgctgctctgaggtggagccttctcagggtcagtccagctctggagcccctctccagctcggtcaccaaagctgtctggtcccagggcagtgtggagtgacaggcacgccagccaatccaatcggccatttcatacccaatgcatgtgactgataaagagataacaccctgtctccaagacacaggctttacataaacagctttaatgacttcttcacttagggacaagactccttagtggtggaacctcaggcatccatgcaggatgtaagaaagctcccgtatatacatgaactgagaagtgtgtagaagagtaaatactgtaataggtaataaaatgtatgtatttttatttatgtgctactttgtctttctccctctctgtgtatatacacatacatacaaaaatgtattcattctatggaaaacatgaaagatgtaatattctttacatatttaattaatgtattttttctgatcatatgaacaccacaaatataattttataatttttttacctaacaataagtcttaaacataaatatacatggacaatatcatagttttttttttaatcataattaaaatggttgtgaaac

SEQ ID NO: 4679 - protein, 81 aa, Homo sapiens
MFLFLFVTRPDYRGVLICLAPAPTITVCPCPVLVLCGIACVHRSPSRQSGRAASRAARQVSFRLFQAACPPQYPFNPMEMD

SEQ ID NO: 4680 - DNA, 1845 bp, Homo sapiens
cggtgtgcggccagccatggagcgctctgggcccagcgaagtgacaggctcagacgcatcgggaccggacccgcagcttgtggtcaccatgggcttcacggggttcggggttcggtaaaaaagctcacacatttgacttggaagcaatgtttgaacaaactcaaagaacagctgtggaaagaagtcacaaaacactgggccaccaggaacacacctgtagcccagcaaagttgaggccatcgactggctcatcacaacaaggaaggctgtgcaccactgggacccagcagcagctcagcagcagcagtgagagggccttgggaaagacttggagggtttggcttatacaagaccagattacagaggggtattgatttgccttgcccccgcccccaccatcacagtgtgtccctgtccagtgttggtgctgtgtggcattgcttgtgtccataggagtccatcaaggcagagcggcagagcggcaagcagagcggcaaggcagttcaacccaatggaaatggattgaaagagtgaaagtcactggtctcaaagaatctacggaatttagcattttgaaaatcacagagcaattttgggtaggtattcacatgcactaaaaaaccaggcaaacatctgactcccaggataaagtgactgagagcagtagaagacttgttgagccttaaggaataagaggaaaattatgttatgaagtgcaggaacagcacagacccagacgaggggatgcagcccggagccagtaacccggcgcctcctcctccccagggcgcagcgctggctgctccccggataccgtgatcacacgtcccaggtcctgagagcgcctcataggtagacagttctttgggacttttgggacgcagcacttgaagagaggtttacctaaactttcctcctgggagcctgtcatcatttgaaagtaacagaagaaagctgtcaggctgaggaaagtttcaacaggcacttggtgagaatgggaagcatccattcattgggaaatcacggggacagaggaggaattcacgggatcagagcactgagaaactccagaggcttctggttcaccgccctgattccacagatgtgggtcagaggcagagatggaagttggaatggacaagcctgccctctcctcagctctccatggctctgtcctcaggctgtttctgcaatttgacatgaggcctggccccagggaaaccagtggggcctcatctcctccctgtgctgctctgaggtggagccttctcagggtcagtccagctctggagcccctctccagctcggtcaccaaagctgtctggtcccagggcagtgtggagtgacaggcacgccagccaatccaatcggccatttcatacccaatgcatgtgactgataaagagataacaccctgtctccaagacacaggctttacataaacagctttaatgacttcttcacttagggacaagactccttagtggtggaacctcaggcatccatgcaggatgtaagaaagctcccgtatatacatgaactgagaagtgtgtagaagagtaaatactgtaataggtaataaaatgtatgtatttttatttatgtgctactttgtctttctccctctctgtgtatatacacatacatacaaaaatgtattcattctatggaaaacatgaaagatgtaatattctttacatatttaattaatgtattttttctgatcatatgaacaccacaaatataattttataatttttttacctaacaataagtcttaaacataaatatacatggacaatatcatagttttttttttaatcataattaaaatggttgtgaaac

SEQ ID NO: 4681 - protein, 75 aa, Homo sapiens
MFEQTQRTAVERSHKTLGHQEHTCSPAKLRPSTGSSQQGRLCTTGTQQQLSSSSERALGKTWRVWLIQDQITEGY

SEQ ID NO: 4682 - DNA, 1665 bp, Homo sapiens
gcggtgtgcggccagccatggagcgctctgggcccagcgaaggtaaaaaagctcacacatttgacttggaagcaatgtttgaacaaactcaaagaacagctgtggaaagaagtcacaaaacactggaccagattacagaggggtattgatttgccttgcccccgcccccaccatcacagtgtgtccctgtccagtgttggtgctgtgtggcattgcttgtgtccataggagtccatcaaggcagagcggcagagcggcaagcagagcggcaaggcaggtcagcttccggctcttccaggctgcatgtccccctcaatatcctttcaacccaatggaaatggattgaaagagtgaaagtcactggtctcaaagaatctacggaatttagcattttgaaaatcacagagcaattttgggtaggtattcacatgcactaaaaaaccaggcaaacatctgactcccaggataaagtgactgagagcagtagaagacttgttgagccttaaggaataagaggaaaattatgttatgaagtgcaggaacagcacagacccagacgaggggatgcagcccggagccagtaacccggcgcctcctcctccccagggcgcagcgctggctgctccccggataccgtgatcacacgtcccaggtcctgagagcgcctcataggtagacagttctttgggacttttgggacgcagcacttgaagagaggtttacctaaactttcctcctgggagcctgtcatcatttgaaagtaacagaagaaagctgtcaggctgaggaaagtttcaacaggcacttggtgagaatgggaagcatccattcattgggaaatcacggggacagaggaggaattcacgggatcagagcactgagaaactccagaggcttctggttcaccgccctgattccacagatgtgggtcagaggcagagatggaagttggaatggacaagcctgccctctcctcagctctccatggctctgtcctcaggctgtttctgcaatttgacatgaggcctggccccagggaaaccagtggggcctcatctcctccctgtgctgctctgaggtggagccttctcagggtcagtccagctctggagcccctctccagctcggtcaccaaagctgtctggtcccagggcagtgtggagtgacaggcacgccagccaatccaatcggccatttcatacccaatgcatgtgactgataaagagataacaccctgtctccaagacacaggctttacataaacagctttaatgacttcttcacttagggacaagactccttagtggtggaacctcaggcatccatgcaggatgtaagaaagctcccgtatatacatgaactgagaagtgtgtagaagagtaaatactgtaataggtaataaaatgtatgtatttttatttatgtgctactttgtctttctccctctctgtgtatatacacatacatacaaaaatgtattcattctatggaaaacatgaaagatgtaatattctttacatatttaattaatgtattttttctgatcatatgaacaccacaaatataattttataatttttttacctaacaataagtcttaaacataaatatacatggacaatatcatagttttttttttaatcataattaaaatggttgtgaaac

SEQ ID NO: 4683 - protein, 43 aa, Homo sapiens
MERSGPSEGKKAHTFDLEAMFEQTQRTAVERSHKTLDQITEGY

SEQ ID NO: 4684 - DNA, 1705 bp, Homo sapiens
gtggctggttctgcggtgtgcggccagccatggagcgctctgggcccagcgaagtgacaggctcagacgcatcgggaccggacccgcagcttgtggtcaccatgggcttcacggggttcggggttcggtaaaaaagctcacacatttgacttggaagcaatgtttgaacaaactcaaagaacagctgtggaaagaagtcacaaaacactggaccagattacagaggggtattgatttgccttgcccccgcccccaccatcacagtgtgtccctgtccagtgttggtgctgtgtggcattgcttgtgtccataggagtccatcaaggcagagcggcagagcggcaagcagagcggcaaggcagttcaacccaatggaaatggattgaaagagtgaaagtcactggtctcaaagaatctacggaatttagcattttgaaaatcacagagcaattttgggtaggtattcacatgcactaaaaaaccaggcaaacatctgactcccaggataaagtgactgagagcagtagaagacttgttgagccttaaggaataagaggaaaattatgttatgaagtgcaggaacagcacagacccagacgaggggatgcagcccggagccagtaacccggcgcctcctcctccccagggcgcagcgctggctgctccccggataccgtgatcacacgtcccaggtcctgagagcgcctcataggtagacagttctttgggacttttgggacgcagcacttgaagagaggtttacctaaactttcctcctgggagcctgtcatcatttgaaagtaacagaagaaagctgtcaggctgaggaaagtttcaacaggcacttggtgagaatgggaagcatccattcattgggaaatcacggggacagaggaggaattcacgggatcagagcactgagaaactccagaggcttctggttcaccgccctgattccacagatgtgggtcagaggcagagatggaagttggaatggacaagcctgccctctcctcagctctccatggctctgtcctcaggctgtttctgcaatttgacatgaggcctggccccagggaaaccagtggggcctcatctcctccctgtgctgctctgaggtggagccttctcagggtcagtccagctctggagcccctctccagctcggtcaccaaagctgtctggtcccagggcagtgtggagtgacaggcacgccagccaatccaatcggccatttcatacccaatgcatgtgactgataaagagataacaccctgtctccaagacacaggctttacataaacagctttaatgacttcttcacttagggacaagactccttagtggtggaacctcaggcatccatgcaggatgtaagaaagctcccgtatatacatgaactgagaagtgtgtagaagagtaaatactgtaataggtaataaaatgtatgtatttttatttatgtgctactttgtctttctccctctctgtgtatatacacatacatacaaaaatgtattcattctatggaaaacatgaaagatgtaatattctttacatatttaattaatgtattttttctgatcatatgaacaccacaaatataattttataatttttttacctaacaataagtcttaaacataaatatacatggacaatatcatagttttttttttaatcataattaaaatggttgtgaaac

SEQ ID NO: 4685 - protein, 33 aa, Homo sapiens; identical to SEQ ID NO: 570

SEQ ID NO: 4686 - DNA, 1755 bp, Homo sapiens
tcgctgtggctggttctgcggtgtgcggccagccatggagcgctctgggcccagcgaagtgacaggctcagacgcatcgggaccggacccgcagcttgtggtcaccatgggcttcacggggttcggggttcggtaaaaaagctcacacatttgacttggaagcaatgtttgaacaaactcaaagaacagctgtggaaagaagtcacaaaacactggaccagattacagaggggtattgatttgccttgcccccgcccccaccatcacagtgtgtccctgtccagtgttggtgctgtgtggcattgcttgtgtccataggagtccatcaaggcagagcggcagagcggcaagcagagcggcaaggcaggtcagcttccggctcttccaggctgcatgtccccctcaatatcctttcaacccaatggaaatggattgaaagagtgaaagtcactggtctcaaagaatctacggaatttagcattttgaaaatcacagagcaattttgggtaggtattcacatgcactaaaaaaccaggcaaacatctgactcccaggataaagtgactgagagcagtagaagacttgttgagccttaaggaataagaggaaaattatgttatgaagtgcaggaacagcacagacccagacgaggggatgcagcccggagccagtaacccggcgcctcctcctccccagggcgcagcgctggctgctccccggataccgtgatcacacgtcccaggtcctgagagcgcctcataggtagacagttctttgggacttttgggacgcagcacttgaagagaggtttacctaaactttcctcctgggagcctgtcatcatttgaaagtaacagaagaaagctgtcaggctgaggaaagtttcaacaggcacttggtgagaatgggaagcatccattcattgggaaatcacggggacagaggaggaattcacgggatcagagcactgagaaactccagaggcttctggttcaccgccctgattccacagatgtgggtcagaggcagagatggaagttggaatggacaagcctgccctctcctcagctctccatggctctgtcctcaggctgtttctgcaatttgacatgaggcctggccccagggaaaccagtggggcctcatctcctccctgtgctgctctgaggtggagccttctcagggtcagtccagctctggagcccctctccagctcggtcaccaaagctgtctggtcccagggcagtgtggagtgacaggcacgccagccaatccaatcggccatttcatacccaatgcatgtgactgataaagagataacaccctgtctccaagacacaggctttacataaacagctttaatgacttcttcacttagggacaagactccttagtggtggaacctcaggcatccatgcaggatgtaagaaagctcccgtatatacatgaactgagaagtgtgtagaagagtaaatactgtaataggtaataaaatgtatgtatttttatttatgtgctactttgtctttctccctctctgtgtatatacacatacatacaaaaatgtattcattctatggaaaacatgaaagatgtaatattctttacatatttaattaatgtattttttctgatcatatgaacaccacaaatataattttataatttttttacctaacaataagtcttaaacataaatatacatggacaatatcatagttttttttttaatcataattaaaatggttgtgaaac

SEQ ID NO: 4687 - protein, 33 aa, Homo sapiens; identical to SEQ ID NO: 570

SEQ ID NO: 4688 - DNA, 1910 bp, Homo sapiens
tgtcgctgtggctggttctgcggtgtgcggccagccatggagcgctctgggcccagcgaagtgacaggctcagacgcatcgggaccggacccgcagcttgtggtcaccatgggcttcacggggttcggggttcggtaaaaaagctcacacatttgacttggaagcaatgtttgaacaaactcaaagaacagctgtggaaagaagtcacaaaacactgggccaccaggaacacacctgtagcccagcaaagttgaggccatcgactggctcatcacaacaaggaaggctgtgcaccactgggacccagcagcagctcagcagcagcagtgagagggccttgggaaagacttggagggtttggcttatacaagaccagattacagaggggtattgatttgccttgcccccgcccccaccatcacagtgtgtccctgtccagtgttggtgctgtgtggcattgcttgtgtccataggagtccatcaaggcagagcggcagagcggcaagcagagcggcaaggcaggtcagcttccggctcttccaggctgcatgtccccctcaatatcctttcaacccaatggaaatggattgaaagagtgaaagtcactggtctcaaagaatctacggaatttagcattttgaaaatcacagagcaattttgggtaggtattcacatgcactaaaaaaccaggcaaacatctgactcccaggataaagtgactgagagcagtagaagacttgttgagccttaaggaataagaggaaaattatgttatgaagtgcaggaacagcacagacccagacgaggggatgcagcccggagccagtaacccggcgcctcctcctccccagggcgcagcgctggctgctccccggataccgtgatcacacgtcccaggtcctgagagcgcctcataggtagacagttctttgggacttttgggacgcagcacttgaagagaggtttacctaaactttcctcctgggagcctgtcatcatttgaaagtaacagaagaaagctgtcaggctgaggaaagtttcaacaggcacttggtgagaatgggaagcatccattcattgggaaatcacggggacagaggaggaattcacgggatcagagcactgagaaactccagaggcttctggttcaccgccctgattccacagatgtgggtcagaggcagagatggaagttggaatggacaagcctgccctctcctcagctctccatggctctgtcctcaggctgtttctgcaatttgacatgaggcctggccccagggaaaccagtggggcctcatctcctccctgtgctgctctgaggtggagccttctcagggtcagtccagctctggagcccctctccagctcggtcaccaaagctgtctggtcccagggcagtgtggagtgacaggcacgccagccaatccaatcggccatttcatacccaatgcatgtgactgataaagagataacaccctgtctccaagacacaggctttacataaacagctttaatgacttcttcacttagggacaagactccttagtggtggaacctcaggcatccatgcaggatgtaagaaagctcccgtatatacatgaactgagaagtgtgtagaagagtaaatactgtaataggtaataaaatgtatgtatttttatttatgtgctactttgtctttctccctctctgtgtatatacacatacatacaaaaatgtattcattctatggaaaacatgaaagatgtaatattctttacatatttaattaatgtattttttctgatcatatgaacaccacaaatataattttataatttttttacctaacaataagtcttaaacataaatatacatggacaatatcatagttttttttttaatcataattaaaatggttgtgaaac

SEQ ID NO: 4689 - protein, 75 aa, Homo sapiens; identical to SEQ ID NO: 4681

SEQ ID NO: 4690 - DNA, 2780 bp, Homo sapiens
catcccaaagcacttcagcttgaagaagatctaggacacagtttgttgttaccacctcagagcatttagatgggacgtgatggatggaattgaagttgaaaacccattcaccatttctagttagtacagtaggctcctaatttacagaaatgcttgtgaaattgagaatcatgataaaatcctcatacctcctcctcttttgaccaaatctttctaaaatgcacaattataatttcttatctttaggaaaaagtaattatgttatatgtgttatatacactatgtaaatatagttcattaaatcattctttggtgtttgaagactttctaattcattacttcattccagacatcaatgacaacagcacataccgagcaggtacacatatgagctacctactaatatgccctgattttgattgtattttgtgaaaaccttggtatgggttatttttaaatgaatgttttcccaaattttaagctgaaactaggatgcatcaaaattatcttggtcataatcttgtcaatgatgtcatctaaaggccaccaggaacacacctgtagcccagcaaagttgaggccatcgactggctcatcacaacaaggaaggctgtgcaccactgggacccagcagcagctcagcagcagcagtgagagggccttgggaaagacttggagggtttggcttatacaaggtgatcttggggagggtcaaggaaacaggctgtgatggttaatattgagtgtcaacttgattggattgaaggatgcaaaggattgttcctgggtgtatatgtgagagtgtggccaaaggagattaacattttagtcagtggactgggagaggcacacccaccctcaatctgggtgggcatcatctaatcagctgccacagcagctaaaataaagcaggcagaagttggaatgagcagacttgctgagtgttccagccttcatctttctcccatgctggatgcttcctgccctcgaacatcagactccaagttcttcagcttttttttttttttttggactcttggacttacagcattggtttgccaggggctcccaggcctctagccgcagactgaaggctgcactgtgagcctccctacctttgaagtttgggactcagactggcttcttggctcctcagcttgcagtcggcctattgtgagacttccccttgtgatcatgtgagccaattctcctgataaactcaccttcatatatacatctatcctattagttctatccgtttagagaaccctgactaatacacaggccatgctcagatggagtgctgtctggaaatgggagtaattctgtggttgaatgtcttaattgtcctggaaggtgggagaaatggaatgaggctggtgctacaattgatgtaaaagcagcagctgctcacataagccggggtggaggatgcctaggcgtatttgtggtattgaccatgttcttgtttttgtttgtgaccagaccagattacagaggggtattgatttgccttgcccccgcccccaccatcacagtgtgtccctgtccagtgttggtgctgtgtggcattgcttgtgtccataggagtccatcaaggcagagcggcagagcggcaagcagagcggcaaggcaggtcagcttccggctcttccaggctgcatgtccccctcaatatcctttcaacccaatggaaatggattgaaagagtgaaagtcactggtctcaaagaatctacggaatttagcattttgaaaatcacagagcaattttgggtaggtattcacatgcactaaaaaaccaggcaaacatctgactcccaggataaagtgactgagagcagtagaagacttgttgagccttaaggaataagaggaaaattatgttatgaagtgcaggaacagcacagacccagacgaggggatgcagcccggagccagtaacccggcgcctcctcctccccagggcgcagcgctggctgctccccggataccgtgatcacacgtcccaggtcctgagagcgcctcataggtagacagttctttgggacttttgggacgcagcacttgaagagaggtttacctaaactttcctcctgggagcctgtcatcatttgaaagtaacagaagaaagctgtcaggctgaggaaagtttcaacaggcacttggtgagaatgggaagcatccattcattgggaaatcacggggacagaggaggaattcacgggatcagagcactgagaaactccagaggcttctggttcaccgccctgattccacagatgtgggtcagaggcagagatggaagttggaatggacaagcctgccctctcctcagctctccatggctctgtcctcaggctgtttctgcaatttgacatgaggcctggccccagggaaaccagtggggcctcatctcctccctgtgctgctctgaggtggagccttctcagggtcagtccagctctggagcccctctccagctcggtcaccaaagctgtctggtcccagggcagtgtggagtgacaggcacgccagccaatccaatcggccatttcatacccaatgcatgtgactgataaagagataacaccctgtctccaagacacaggctttacataaacagctttaatgacttcttcacttagggacaagactccttagtggtggaacctcaggcatccatgcaggatgtaagaaagctcccgtatatacatgaactgagaagtgtgtagaagagtaaatactgtaataggtaataaaatgtatgtatttttattt

SEQ ID NO: 4691 - protein, 81 aa, Homo sapiens; identical to SEQ ID NO: 4679

SEQ ID NO: 4692 - DNA, 2491 bp, Homo sapiens
catcccaaagcacttcagcttgaagaagatctaggacacagtttgttgttaccacctcagagcatttagatgggacgtgatggatggaattgaagttgaaaacccattcaccatttctagttagtacagtaggctcctaatttacagaaatgcttgtgaaattgagaatcatgataaaatcctcatacctcctcctcttttgaccaaatctttctaaaatgcacaattataatttcttatctttaggaaaaagtaattatgttatatgtgttatatacactatgtaaatatagttcattaaatcattctttggtgtttgaagactttctaattcattacttcattccagacatcaatgacaacagcacataccgagcaggtacacatatgagctacctactaatatgccctgattttgattgtattttgtgaaaaccttggtatgggttatttttaaatgaatgttttcccaaattttaagctgaaactaggatgcatcaaaattatcttggtcataatcttgtcaatgatgtcatctaaaggccaccaggaacacacctgtagcccagcaaagttgaggccatcgactggctcatcacaacaaggaaggctgtgcaccactgggacccagcagcagctcagcagcagcagtgagagggccttgggaaagacttggagggtttggcttatacaaggtgatcttggggagggtcaaggaaacaggctgtgatggttaatattgagtgtcaacttgattggattgaaggatgcaaaggattgttcctgggtgtatatgtgagagtgtggccaaaggagattaacattttagtcagtggactgggagaggcacacccaccctcaatctgggtgggcatcatctaatcagctgccacagcagctaaaataaagcaggcagaagttggaatgagcagacttgctgagtgttccagccttcatctttctcccatgctggatgcttcctgccctcgaacatcagactccaagttcttcagcttttttttttttttttggactcttggacttacagcattggtttgccaggggctcccaggcctctagccgcagactgaaggctgcactgtgagcctccctacctttgaagtttgggactcagactggcttcttggctcctcagcttgcagtcggcctattgtgagacttccccttgtgatcataccagattacagaggggtattgatttgccttgcccccgcccccaccatcacagtgtgtccctgtccagtgttggtgctgtgtggcattgcttgtgtccataggagtccatcaaggcagagcggcagagcggcaagcagagcggcaaggcaggtcagcttccggctcttccaggctgcatgtccccctcaatatcctttcaacccaatggaaatggattgaaagagtgaaagtcactggtctcaaagaatctacggaatttagcattttgaaaatcacagagcaattttgggtaggtattcacatgcactaaaaaaccaggcaaacatctgactcccaggataaagtgactgagagcagtagaagacttgttgagccttaaggaataagaggaaaattatgttatgaagtgcaggaacagcacagacccagacgaggggatgcagcccggagccagtaacccggcgcctcctcctccccagggcgcagcgctggctgctccccggataccgtgatcacacgtcccaggtcctgagagcgcctcataggtagacagttctttgggacttttgggacgcagcacttgaagagaggtttacctaaactttcctcctgggagcctgtcatcatttgaaagtaacagaagaaagctgtcaggctgaggaaagtttcaacaggcacttggtgagaatgggaagcatccattcattgggaaatcacggggacagaggaggaattcacgggatcagagcactgagaaactccagaggcttctggttcaccgccctgattccacagatgtgggtcagaggcagagatggaagttggaatggacaagcctgccctctcctcagctctccatggctctgtcctcaggctgtttctgcaatttgacatgaggcctggccccagggaaaccagtggggcctcatctcctccctgtgctgctctgaggtggagccttctcagggtcagtccagctctggagcccctctccagctcggtcaccaaagctgtctggtcccagggcagtgtggagtgacaggcacgccagccaatccaatcggccatttcatacccaatgcatgtgactgataaagagataacaccctgtctccaagacacaggctttacataaacagctttaatgacttcttcacttagggacaagactccttagtggtggaacctcaggcatccatgcaggatgtaagaaagctcccgtatatacatgaactgagaagtgtgtagaagagtaaatactgtaataggtaataaaatgtatgtatttttattt

SEQ ID NO: 4693 - protein, 90 aa, Homo sapiens [sequence omitted]

SEQ ID NO: 4694 - DNA, 1421 bp, Homo sapiens
gcggtgtgcggccagccatggagcgctctgggcccagcgaaggtaaaaaagctcacacatttgacttggaagcaatgtttgaacaaactcaaagaacagctgtggaaagaagtcacaaaacactggaccagattacagaggggtattgatttgccttgcccccgcccccaccatcacagtgtgtccctgtccagtgttggtgctgtgtggcattgcttgtgtccataggagtccatcaaggcagagcggcagagcggcaagcagagcggcaaggcaggtcagcttccggctcttccaggctgcatgtccccctcaatatcctttcaacccaatggaaatggattgaaagagtgaaagtcactggtctcaaagaatctacggaatttagcattttgaaaatcacagagcaattttgggtaggtattcacatgcactaaaaaaccaggcaaacatctgactcccaggataaagtgactgagagcagtagaagacttgttgagccttaaggaataagaggaaaattatgttatgaagtgcaggaacagcacagacccagacgaggggatgcagcccggagccagtaacccggcgcctcctcctccccagggcgcagcgctggctgctccccggataccgtgatcacacgtcccaggtcctgagagcgcctcataggtagacagttctttgggacttttgggacgcagcacttgaagagaggtttacctaaactttcctcctgggagcctgtcatcatttgaaagtaacagaagaaagctgtcaggctgaggaaagtttcaacaggcacttggtgagaatgggaagcatccattcattgggaaatcacggggacagaggaggaattcacgggatcagagcactgagaaactccagaggcttctggttcaccgccctgattccacagatgtgggtcagaggcagagatggaagttggaatggacaagcctgccctctcctcagctctccatggctctgtcctcaggctgtttctgcaatttgacatgaggcctggccccagggaaaccagtggggcctcatctcctccctgtgctgctctgaggtggagccttctcagggtcagtccagctctggagcccctctccagctcggtcaccaaagctgtctggtcccagggcagtgtggagtgacaggcacgccagccaatccaatcggccatttcatacccaatgcatgtgactgataaagagataacaccctgtctccaagacacaggctttacataaacagctttaatgacttcttcacttagggacaagactccttagtggtggaacctcaggcatccatgcaggatgtaagaaagctcccgtatatacatgaactgagaagtgtgtagaagagtaaatactgtaataggtaataaaatgtatgtatttttattt

SEQ ID NO: 4695 - protein, 43 aa, Homo sapiens; identical to SEQ ID NO: 4683

SEQ ID NO: 4696 - DNA, 1511 bp, Homo sapiens
tcgctgtggctggttctgcggtgtgcggccagccatggagcgctctgggcccagcgaagtgacaggctcagacgcatcgggaccggacccgcagcttgtggtcaccatgggcttcacggggttcggggttcggtaaaaaagctcacacatttgacttggaagcaatgtttgaacaaactcaaagaacagctgtggaaagaagtcacaaaacactggaccagattacagaggggtattgatttgccttgcccccgcccccaccatcacagtgtgtccctgtccagtgttggtgctgtgtggcattgcttgtgtccataggagtccatcaaggcagagcggcagagcggcaagcagagcggcaaggcaggtcagcttccggctcttccaggctgcatgtccccctcaatatcctttcaacccaatggaaatggattgaaagagtgaaagtcactggtctcaaagaatctacggaatttagcattttgaaaatcacagagcaattttgggtaggtattcacatgcactaaaaaaccaggcaaacatctgactcccaggataaagtgactgagagcagtagaagacttgttgagccttaaggaataagaggaaaattatgttatgaagtgcaggaacagcacagacccagacgaggggatgcagcccggagccagtaacccggcgcctcctcctccccagggcgcagcgctggctgctccccggataccgtgatcacacgtcccaggtcctgagagcgcctcataggtagacagttctttgggacttttgggacgcagcacttgaagagaggtttacctaaactttcctcctgggagcctgtcatcatttgaaagtaacagaagaaagctgtcaggctgaggaaagtttcaacaggcacttggtgagaatgggaagcatccattcattgggaaatcacggggacagaggaggaattcacgggatcagagcactgagaaactccagaggcttctggttcaccgccctgattccacagatgtgggtcagaggcagagatggaagttggaatggacaagcctgccctctcctcagctctccatggctctgtcctcaggctgtttctgcaatttgacatgaggcctggccccagggaaaccagtggggcctcatctcctccctgtgctgctctgaggtggagccttctcagggtcagtccagctctggagcccctctccagctcggtcaccaaagctgtctggtcccagggcagtgtggagtgacaggcacgccagccaatccaatcggccatttcatacccaatgcatgtgactgataaagagataacaccctgtctccaagacacaggctttacataaacagctttaatgacttcttcacttagggacaagactccttagtggtggaacctcaggcatccatgcaggatgtaagaaagctcccgtatatacatgaactgagaagtgtgtagaagagtaaatactgtaataggtaataaaatgtatgtatttttattt

SEQ ID NO: 4697 - protein, 33 aa, Homo sapiens; identical to SEQ ID NO: 570

SEQ ID NO: 4698 - DNA, 1666 bp, Homo sapiens
tgtcgctgtggctggttctgcggtgtgcggccagccatggagcgctctgggcccagcgaagtgacaggctcagacgcatcgggaccggacccgcagcttgtggtcaccatgggcttcacggggttcggggttcggtaaaaaagctcacacatttgacttggaagcaatgtttgaacaaactcaaagaacagctgtggaaagaagtcacaaaacactgggccaccaggaacacacctgtagcccagcaaagttgaggccatcgactggctcatcacaacaaggaaggctgtgcaccactgggacccagcagcagctcagcagcagcagtgagagggccttgggaaagacttggagggtttggcttatacaagaccagattacagaggggtattgatttgccttgcccccgcccccaccatcacagtgtgtccctgtccagtgttggtgctgtgtggcattgcttgtgtccataggagtccatcaaggcagagcggcagagcggcaagcagagcggcaaggcaggtcagcttccggctcttccaggctgcatgtccccctcaatatcctttcaacccaatggaaatggattgaaagagtgaaagtcactggtctcaaagaatctacggaatttagcattttgaaaatcacagagcaattttgggtaggtattcacatgcactaaaaaaccaggcaaacatctgactcccaggataaagtgactgagagcagtagaagacttgttgagccttaaggaataagaggaaaattatgttatgaagtgcaggaacagcacagacccagacgaggggatgcagcccggagccagtaacccggcgcctcctcctccccagggcgcagcgctggctgctccccggataccgtgatcacacgtcccaggtcctgagagcgcctcataggtagacagttctttgggacttttgggacgcagcacttgaagagaggtttacctaaactttcctcctgggagcctgtcatcatttgaaagtaacagaagaaagctgtcaggctgaggaaagtttcaacaggcacttggtgagaatgggaagcatccattcattgggaaatcacggggacagaggaggaattcacgggatcagagcactgagaaactccagaggcttctggttcaccgccctgattccacagatgtgggtcagaggcagagatggaagttggaatggacaagcctgccctctcctcagctctccatggctctgtcctcaggctgtttctgcaatttgacatgaggcctggccccagggaaaccagtggggcctcatctcctccctgtgctgctctgaggtggagccttctcagggtcagtccagctctggagcccctctccagctcggtcaccaaagctgtctggtcccagggcagtgtggagtgacaggcacgccagccaatccaatcggccatttcatacccaatgcatgtgactgataaagagataacaccctgtctccaagacacaggctttacataaacagctttaatgacttcttcacttagggacaagactccttagtggtggaacctcaggcatccatgcaggatgtaagaaagctcccgtatatacatgaactgagaagtgtgtagaagagtaaatactgtaataggtaataaaatgtatgtatttttattt

SEQ ID NO: 4699 - protein, 75 aa, Homo sapiens; identical to SEQ ID NO: 4681

SEQ ID NO: 4700 - DNA, 1658 bp, Homo sapiens
gcgagttattggcaagttcccctgcagttgtttgggctgtcgctgtggctggttctgcggtgtgcggccagccatggagcgctctgggcccagcgaagtgacaggctcagacgcatcgggaccggacccgcagcttgtggtcaccatgggcttcacggggttcggggttcggtaaaaaagctcacacatttgacttggaagcaatgtttgaacaaactcaaagaacagctgtggaaagaagtcacaaaacactgggccaccaggaacacacctgtagcccagcaaagttgaggccatcgactggctcatcacaacaaggaaggctgtgcaccactgggacccagcagcagctcagcagcagcagtgagagggccttgggaaagacttggagggtttggcttatacaagaccagattacagaggggtattgatttgccttgcccccgcccccaccatcacagtgtgtccctgtccagtgttggtgctgtgtggcattgcttgtgtccataggagtccatcaaggcagagcggcagagcggcaagcagagcggcaaggcagttcaacccaatggaaatggattgaaagagtgaaagtcactggtctcaaagaatctacggaatttagcattttgaaaatcacagagcaattttgggtaggtattcacatgcactaaaaaaccaggcaaacatctgactcccaggataaagtgactgagagcagtagaagacttgttgagccttaaggaataagaggaaaattatgttatgaagtgcaggaacagcacagacccagacgaggggatgcagcccggagccagtaacccggcgcctcctcctccccagggcgcagcgctggctgctccccggataccgtgatcacacgtcccaggtcctgagagcgcctcataggtagacagttctttgggacttttgggacgcagcacttgaagagaggtttacctaaactttcctcctgggagcctgtcatcatttgaaagtaacagaagaaagctgtcaggctgaggaaagtttcaacaggcacttggtgagaatgggaagcatccattcattgggaaatcacggggacagaggaggaattcacgggatcagagcactgagaaactccagaggcttctggttcaccgccctgattccacagatgtgggtcagaggcagagatggaagttggaatggacaagcctgccctctcctcagctctccatggctctgtcctcaggctgtttctgcaatttgacatgaggcctggccccagggaaaccagtggggcctcatctcctccctgtgctgctctgaggtggagccttctcagggtcagtccagctctggagcccctctccagctcggtcaccaaagctgtctggtcccagggcagtgtggagtgacaggcacgccagccaatccaatcggccatttcatacccaatgcatgtgactgataaagagataacaccctgtctccaagacacaggctttacataaacagctttaatgacttcttcacttagggacaagactccttagtggtggaacctcaggcatccatgcaggatgtaagaaagctcccgtatatacatgaactgagaagtgtgtagaagagtaaatactgtaataggtaataaaatgtatgtatttttattt

SEQ ID NO: 4701 - protein, 75 aa, Homo sapiens; identical to SEQ ID NO: 4681

SEQ ID NO: 4702 - DNA, 1505 bp, Homo sapiens
gcgagttattggcaagttcccctgcagttgtttgggctgtcgctgtggctggttctgcggtgtgcggccagccatggagcgctctgggcccagcgaagtgacaggctcagacgcatcgggaccggacccgcagcttgtggtcaccatgggcttcacggggttcggggttcggtaaaaaagctcacacatttgacttggaagcaatgtttgaacaaactcaaagaacagctgtggaaagaagtcacaaaacactggaccagattacagaggggtattgatttgccttgcccccgcccccaccatcacagtgtgtccctgtccagtgttggtgctgtgtggcattgcttgtgtccataggagtccatcaaggcagagcggcagagcggcaagcagagcggcaaggcagttcaacccaatggaaatggattgaaagagtgaaagtcactggtctcaaagaatctacggaatttagcattttgaaaatcacagagcaattttgggtaggtattcacatgcactaaaaaaccaggcaaacatctgactcccaggataaagtgactgagagcagtagaagacttgttgagccttaaggaataagaggaaaattatgttatgaagtgcaggaacagcacagacccagacgaggggatgcagcccggagccagtaacccggcgcctcctcctccccagggcgcagcgctggctgctccccggataccgtgatcacacgtcccaggtcctgagagcgcctcataggtagacagttctttgggacttttgggacgcagcacttgaagagaggtttacctaaactttcctcctgggagcctgtcatcatttgaaagtaacagaagaaagctgtcaggctgaggaaagtttcaacaggcacttggtgagaatgggaagcatccattcattgggaaatcacggggacagaggaggaattcacgggatcagagcactgagaaactccagaggcttctggttcaccgccctgattccacagatgtgggtcagaggcagagatggaagttggaatggacaagcctgccctctcctcagctctccatggctctgtcctcaggctgtttctgcaatttgacatgaggcctggccccagggaaaccagtggggcctcatctcctccctgtgctgctctgaggtggagccttctcagggtcagtccagctctggagcccctctccagctcggtcaccaaagctgtctggtcccagggcagtgtggagtgacaggcacgccagccaatccaatcggccatttcatacccaatgcatgtgactgataaagagataacaccctgtctccaagacacaggctttacataaacagctttaatgacttcttcacttagggacaagactccttagtggtggaacctcaggcatccatgcaggatgtaagaaagctcccgtatatacatgaactgagaagtgtgtagaagagtaaatactgtaataggtaataaaatgtatgtatttttattt

SEQ ID NO: 4703 - protein, 33 aa, Homo sapiens; identical to SEQ ID NO: 570

SEQ ID NO: 4704 - DNA, 1541 bp, Homo sapiens
atgtgagccaattctcctgataaactcaccttcatatatacatctatcctattagttctatccgtttagagaaccctgactaatacacaggccatgctcagatggagtgctgtctggaaatgggagtaattctgtggttgaatgtcttaattgtcctggaaggtgggagaaatggaatgaggctggtgctacaattgatgtaaaagcagcagctgctcacataagccggggtggaggatgcctaggcgtatttgtggtattgaccatgttcttgtttttgtttgtgaccagaccagattacagaggggtattgatttgccttgcccccgcccccaccatcacagtgtgtccctgtccagtgttggtgctgtgtggcattgcttgtgtccataggagtccatcaaggcagagcggcagagcggcaagcagagcggcaaggcagttcaacccaatggaaatggattgaaagagtgaaagtcactggtctcaaagaatctacggaatttagcattttgaaaatcacagagcaattttgggtaggtattcacatgcactaaaaaaccaggcaaacatctgactcccaggataaagtgactgagagcagtagaagacttgttgagccttaaggaataagaggaaaattatgttatgaagtgcaggaacagcacagacccagacgaggggatgcagcccggagccagtaacccggcgcctcctcctccccagggcgcagcgctggctgctccccggataccgtgatcacacgtcccaggtcctgagagcgcctcataggtagacagttctttgggacttttgggacgcagcacttgaagagaggtttacctaaactttcctcctgggagcctgtcatcatttgaaagtaacagaagaaagctgtcaggctgaggaaagtttcaacaggcacttggtgagaatgggaagcatccattcattgggaaatcacggggacagaggaggaattcacgggatcagagcactgagaaactccagaggcttctggttcaccgccctgattccacagatgtgggtcagaggcagagatggaagttggaatggacaagcctgccctctcctcagctctccatggctctgtcctcaggctgtttctgcaatttgacatgaggcctggccccagggaaaccagtggggcctcatctcctccctgtgctgctctgaggtggagccttctcagggtcagtccagctctggagcccctctccagctcggtcaccaaagctgtctggtcccagggcagtgtggagtgacaggcacgccagccaatccaatcggccatttcatacccaatgcatgtgactgataaagagataacaccctgtctccaagacacaggctttacataaacagctttaatgacttcttcacttagggacaagactccttagtggtggaacctcaggcatccatgcaggatgtaagaaagctcccgtatatacatgaactgagaagtgtgtagaagagtaaatactgtaataggtaataaaatgtatgtatttttattt

SEQ ID NO: 4705 - protein, 66 aa, Homo sapiens; identical to SEQ ID NO: 4677

SEQ ID NO: 4706 - DNA, 555 bp, Homo sapiens
gcagttgtttgggctgtcgctgtggctggttctgcggtgtgcggccagccatggagcgctctgggcccagcgaagtgacaggctcagacgcatcgggaccggacccgcagcttgtggtcaccatgggcttcacggggttcggggttcggtaaaaaagctcacacatttgacttggaagcaatgtttgaacaaactcaaagaacagctgtggaaagaagtcacaaaacactgggccaccaggaacacacctgtagcccagcaaagttgaggccatcgactggctcatcacaacaaggaaggctgtgcaccactgggacccagcagcagctcagcagcagcagtgagagggccttgggaaagacttggagggtttggcttatacaagcattggtttgccaggggctcccaggcctctagccgcagactgaaggctgcactgtgagcctccctacctttgaagtttgggactcagactggcttcttggctcctcagcttgcagtcggcctattgtgagacttccccttgtgatcataccagattacagaggggtattg

SEQ ID NO: 4707 - protein, 78 aa, Homo sapiens
MFEQTQRTAVERSHKTLGHQEHTCSPAKLRPSTGSSQQGRLCTTGTQQQLSSSSERALGKTWRVWLIQALVCQGLPGL

SEQ ID NO: 4708 - DNA, 323 bp, Homo sapiens
cactttaattctgacaccgtctgcctggagaccaccgcacctggccaaatatatttcatattatgccacaatatcatcacatcaaaaaacaattttaatatcctcaaacgatagacaaagacatgctatctgaggcatttacaaatgttttaaacaatttagtgaatgtttgtactatcacagtataggtaccttgtatttgccattttaagcatataatacaacatgttttgaacaaggattgtcttatttggctatgtcggctttttgttgttatttacttatttatttttttgagttgcccagactggagggcaatagtg

SEQ ID NO: 4709 - protein, 43 aa, Homo sapiens [sequence omitted]

SEQ ID NO: 4710 - DNA, 646 bp, Homo sapiens
atcagtggtttccgcttttccgtcttcctgattctctctttgccagctgccatccaaatcaaccctgaggattgggaaggaactatacataccaggaggcaaggagcactgggggccctcctggaactgcctgtcacagctctccttaggttttcactctcctaggatgacccaggtatagaatctgcccctatggttcggctccaccctctcacctgtctcttgagagcattgtgaaattctgagacacagcaaggacagaaacagagggcatggaagatgctttcagagatcagatccagagcctgacaagtttatttacttggagaagcagattctaggttctagaaaagaaggctgaaaatacaactttaagggaaaggataatctgatgactaattctcatttatcaaaaagccactttgccttagatctatctgtataaactccatgcttcacagtaaaatccttctaactttattgaaaaaagggggccacctagcaaataacaccaagagtattatttctggggttcagttaacccaaagacaattatttatcttactaaaatccatttctaggtctataaacctattgtgtagtacataaatacataggctttagtcctagatagttggagcagatc

SEQ ID NO: 4711 - protein, 52 aa, Homo sapiens
MLHSKILLTLLKKGGHLANNTKSIISGVQLTQRQLFILLKSISRSINLLCST

SEQ ID NO: 4712 - DNA, 525 bp, Homo sapiens
agcgagatttacaataaagtagatgttggagctatgctgactgggttcaaatcctcataccatcactgcctagttgtataagcttgaacaaattacttgttattgctgtgcttcaatttcctcagctgtaaaatatggttttaaaatgaaaagcctttgagatcttttagaattaagtgaaaatttaagcagaacagaaggaacaccagatgggagtctctcaagaagtgtcctcagggatatcacatgaaagtgaggtgatcttagatattatcttatctgaaataaattacccattgtaaatgaatacaaggatggcacatcatcttttctcatacatatattcagagagctggcagctatgttgcaggaagatgaaaggaacctcaagtgtgtcagctgtgaagcatgtactgtattcttctggtggaaattagcatggccactatatcacaaatggatattatcgcaaaagttaattgtattactagttctgtttaaagataaagaatcagacatgtgcaa

SEQ ID NO: 4713 - protein, 53 aa, Homo sapiens
MLQEDERNLKCVSCEACTVFFWWKLAWPLYHKWILSQKLIVLLVLFKDKESDM

SEQ ID NO: 4714 - DNA, 3561 bp, Homo sapiens
caggctggagtgcagtggtgcaatctcagctcactgtaccgtccacctcccgggttcaagcgattctcctgcttcagcctccagagtagctgggattacaggtgcctgccaccatgctgggctgattttttataattttaataggggtggggtttcacagtgttggccaggctggtcgcaaactcctgacctcaagtgatccacgtgcctcggcctcccaaagtgctgggattacaggtgtgagccaacatgcctggccagaaggttctggtttgttaaccaggttacttcctcagaatgttggcctcctgtatgttggaggttatgaaagaccctttgcacaaatcaaggtgacaaaagagctgaaacagtatgacaacaaaattatagaatgcaaatttgagaacaacagctgggtcttcatgagacagagaacagacaaaagttttcctaatgcctacaacactgccatggctgtgtgtaacagcatctcaaaccctgtcaccaaggagatgctgtttgagttcatcgacagatgtactgcagcttctcaaggacagaagcgaaaacatcatctggaccctgacacggagctcatgccaccaccacctcccaaaagaccacgccctttaacctaagacctgcctgtgacttgagggttaagaagaaagaggaatgaggaaaaaacgctgttgcccatttttgtagccagagaaattgaaaaacgactgtggcttgatgttgatacacatttgaattttttttaaaaaaagaaagttatcgtagccagcctgtaaatacttgatgcattcgtttcctcagtgctgcaatacatcgtggacttaaacatcttatttatctgataaactcagccttaccttgtggaatctgaagattgaaatatccaaaggtttaaacaagatggaaatcaatgaaaaagaggccttgtttatatatgggtagcttcacatttaatttataaagttaacaatctggaaactgtgagcccataaaacagtattttttagaagttgtgttacaactgtagcaaattttccttttaaaaaatccaggcaatggcattaaacattcttgctatcatttaccatggatttcctacatttctgagatccctgtattcaaaaacaaatgacagggttgttaagttgtactatattaaacaacttggtctggtttatatcattttaacaagttttttggaaatgtaaaagaaaaaagtaaagctccatttttgtgaattgcattgtttctaaaggaagtattttgagtattttcatctgtttgtattgtttcgactatgatatcagatatccagtgtgtccattctggcagtggttttgagttacttcatggaacttggacatacaccaccaggtcctttatgtgttgttctcctgggagacttctttttttaaatgccagggctacttctgctttacctcagtggtatcagcacattgtaaattacgttaaaacacacaactcactgtgatctatgggagtgatatcaaatacaaacgatgttgtgttccttctctcgaacaaaacagcaaagggaatgccagctaacttctttgattagaaggtaatgtcatggaatagaatgctgtcaccagaaaatgctctcccactgctagataaatgcagaggcaaagtgtagacatctgtaggaactaaatatcaaggaaatcaagacatttattttcaaagcgagaattctatctacattctattctgcggatgttatttctgttatacatctgaattttaaaatgtttactgatagataatggatttaaagggcggctaattgattgtctgccattgttgataaactgttctaattggtttgtgaaagaactctgagaattagctaaatggaggctagtgtatttatttttagaggtacatgttttaagtaaatgtatttaaaacaaattttcatggtctgaattgtatatgtaaatgcatatctgtgtaagtatatgcaagtgtatattcttctactgattcagtcagacacgaaatccaactgaattacccggtagactgaatatctgacgggatttctatatggacatagcacagatgaaccaaaaatgtatttatattcacctgagttttaatgtttttaaacaaagttttctcctgcagtgcttttctatatgaaatagttgagtcaagcttgggcttttttcttcgttgttcccaagtcatgtaatgtatagtgaatttatccaaaacgccattgtaacgttttttactagagtgtttttgcacatttgggcgctaaagggattaaaacaactgatgccacaatgactattgaaggagggaaaattctcaaggttccatagtatcttttacaaaatggattaaaaaaaaaatgcctatgcaacttcaaatagtctgatgcctgcttccccaggacgagtgactcttccacggtgtgctgctttccctccgagcctgtggaaaggcagagcccttttgcagatacgaaagcaagcttttgccaatgatctttaatggagttaaaatgtttatggtaattgtaacctttcaaatgagttacgtgaaaagagcatctcacttttaatacacccagatattttcttcaagtctttgtgcattttagcaggacttaattttcttaatttattctttcctttcaattatagtgacatagagtagttggccttataagtagatcccatttagcccctgaacataataccatctgcagtattataaaagtcatttagaaggtcagggggataatctagaggcaggattttggacattgtgaaggaaatgtgctccttctcagctcacttcaataactattttctgagactgaagttttttagacaagaataagaaaactttgctttcttcagttatcacatgtgaaagcttttgctttttgttaggaaaaggtgtggatgactctactgcgtggatggttacatttgctttccgtgaaatgctcagaaaatgtcaggacattccttttccaattgtgtgtcagtgcgtattgtaataaaactactgatttaaattagcataagtgtatctactttgttttactggtgatactcttgtgtcccttctattgctggcatcacatcctactgctgtcagccacacccagtgtaatccatctggctttgtagagattagcataaagacttggaaagcctctatttttctttctgagaaactgagaaatttgattgacacaggggggtgtagtttgaaccttttatttttgaagtggagaggaatgggagaaagcacatctttatatgatgtttatattatttctcttcatctaatcttagcagtctactgtatgagtagatattctgttacattatttttaatgcatttaaattttttagaatactcagcaatagcaataaatattctgaaatgatgaagtcgtgaactaccaaatttttttttgcattgcatttttatagtatggaatttgccatctttaaatgtttaaataataccaccattttgaactctgca

SEQ ID NO: 4715 - protein, 71 aa, Homo sapiens
MRQRTDKSFPNAYNTAMAVCNSISNPVTKEMLFEFIDRCTAASQGQKRKHHLDPDTELMPPPPPKRPRPLT

SEQ ID NO: 4716 - DNA, 4868 bp, Homo sapiens
gaagttgcggtgcattgtgggttctcctggagctgtggagttgatcctgaatgaaagtggcgcgccgcccctgacgttacccggatcggagaggttggaattcagattacggctgcgattcgggtgtctcggaccccggtgtgcaccggaccacggggaggcggctccaaaggcgcggtgaacgttggtgagggagggcagctctgcgcagccccaagacatggctcacaacaagatcccgccgcggtggctgaactgtccccggcgcggccagccggtggcaggaagattcttacctctgaagacaatgttaggaccaagatatgatagtcaagttgctgaagaaaatcggttccatcccagcatgctctcaaattacctaaagagcctaaaggttaaaatgggcttgttggtggacctgacaaatacttcaaggttctatgaccgaaatgacatagaaaaagaaggaatcaaatatataaaacttcagtgtaaaggacatggtgagtgccctaccactgagaatactgagacctttattcgtctgtgtgagcggtttaatgaaagaaatccacctgaacttataggtgttcattgtactcatggcttcaatcgcactggtttcctcatatgtgcctttttggtggagaaaatggattggagtatcgaagcagcagttgctacttttgcccaagccagaccaccaggaatctacaagggtgattatttgaaggaactttttcgtcggtatggtgacatagaggaagcaccacccccacctctattgccagattggtgttttgaggatgatgaagacgaagatgaggatgaggatggaaagaaggaatcagaacccgggtcaagtgcttcttttggcaaaaggagaaaagaacggttaaaactgggcgctattttcttggaaggtgttactgttaaaggtgtaactcaagtaacaacacaaccaaagttaggagaggtacagcagaagtgtcatcaattctgtggctgggaagggtctggattccctggagcacagcctgtttccatggacaagcaaaatattaaacttttagacctgaagccatacaaagtaagctggaaagcagatggtactcggtacatgatgttgattgatggcacaaatgaagtttttatgattgatagagacaattcagtatttcatgtttcaaatctggaatttccatttcgtaaagatcttcgtatgcatttatcaaatactctcttggatggcgagatgattattgacagagtaaatggacaggctgttcctagatatttgatatatgacataattaaattcaattcacagcccgttggagattgtgattttaatgttcgtctgcagtgtatagaacgagaaattataagtcctcgacacgaaaaaatgaagactgggctcattgacaaaacacaggaaccatttagcgtcagaaataagccgttttttgacatctgtacttcaagaaagaaatacaaacctggtcgatgtgatgatattttgaaatggaagcctcccagtctgaattctgtggattttcgtctaaaaataacaagaatgggaggagaagggttacttcctcagaatgttggcctcctgtatgttggaggttatgaaagaccctttgcacaaatcaaggtgacaaaagagctgaaacagtatgacaacaaaattatagaatgcaaatttgagaacaacagctgggtcttcatgagacagagaacagacaaaagttttcctaatgcctacaacactgccatggctgtgtgtaacagcatctcaaaccctgtcaccaaggagatgctgtttgagttcatcgacagatgtactgcagcttctcaaggacagaagcgaaaacatcatctggaccctgacacggagctcatgccaccaccacctcccaaaagaccacgccctttaacctaagacctgcctgtgacttgagggttaagaagaaagaggaatgaggaaaaaacgctgttgcccatttttgtagccagagaaattgaaaaacgactgtggcttgatgttgatacacatttgaattttttttaaaaaaagaaagttatcgtagccagcctgtaaatacttgatgcattcgtttcctcagtgctgcaatacatcgtggacttaaacatcttatttatctgataaactcagccttaccttgtggaatctgaagattgaaatatccaaaggtttaaacaagatggaaatcaatgaaaaagaggccttgtttatatatgggtagcttcacatttaatttataaagttaacaatctggaaactgtgagcccataaaacagtattttttagaagttgtgttacaactgtagcaaattttccttttaaaaaatccaggcaatggcattaaacattcttgctatcatttaccatggatttcctacatttctgagatccctgtattcaaaaacaaatgacagggttgttaagttgtactatattaaacaacttggtctggtttatatcattttaacaagttttttggaaatgtaaaagaaaaaagtaaagctccatttttgtgaattgcattgtttctaaaggaagtattttgagtattttcatctgtttgtattgtttcgactatgatatcagatatccagtgtgtccattctggcagtggttttgagttacttcatggaacttggacatacaccaccaggtcctttatgtgttgttctcctgggagacttctttttttaaatgccagggctacttctgctttacctcagtggtatcagcacattgtaaattacgttaaaacacacaactcactgtgatctatgggagtgatatcaaatacaaacgatgttgtgttccttctctcgaacaaaacagcaaagggaatgccagctaacttctttgattagaaggtaatgtcatggaatagaatgctgtcaccagaaaatgctctcccactgctagataaatgcagaggcaaagtgtagacatctgtaggaactaaatatcaaggaaatcaagacatttattttcaaagcgagaattctatctacattctattctgcggatgttatttctgttatacatctgaattttaaaatgtttactgatagataatggatttaaagggcggctaattgattgtctgccattgttgataaactgttctaattggtttgtgaaagaactctgagaattagctaaatggaggctagtgtatttatttttagaggtacatgttttaagtaaatgtatttaaaacaaattttcatggtctgaattgtatatgtaaatgcatatctgtgtaagtatatgcaagtgtatattcttctactgattcagtcagacacgaaatccaactgaattacccggtagactgaatatctgacgggatttctatatggacatagcacagatgaaccaaaaatgtatttatattcacctgagttttaatgtttttaaacaaagttttctcctgcagtgcttttctatatgaaatagttgagtcaagcttgggcttttttcttcgttgttcccaagtcatgtaatgtatagtgaatttatccaaaacgccattgtaacgttttttactagagtgtttttgcacatttgggcgctaaagggattaaaacaactgatgccacaatgactattgaaggagggaaaattctcaaggttccatagtatcttttacaaaatggattaaaaaaaaaatgcctatgcaacttcaaatagtctgatgcctgcttccccaggacgagtgactcttccacggtgtgctgctttccctccgagcctgtggaaaggcagagcccttttgcagatacgaaagcaagcttttgccaatgatctttaatggagttaaaatgtttatggtaattgtaacctttcaaatgagttacgtgaaaagagcatctcacttttaatacacccagatattttcttcaagtctttgtgcattttagcaggacttaattttcttaatttattctttcctttcaattatagtgacatagagtagttggccttataagtagatcccatttagcccctgaacataataccatctgcagtattataaaagtcatttagaaggtcagggggataatctagaggcaggattttggacattgtgaaggaaatgtgctccttctcagctcacttcaataactattttctgagactgaagttttttagacaagaataagaaaactttgctttcttcagttatcacatgtgaaagcttttgctttttgttaggaaaaggtgtggatgactctactgcgtggatggttacatttgctttccgtgaaatgctcagaaaatgtcaggacattccttttccaattgtgtgtcagtgcgtattgtaataaaactactgatttaaattagcataagtgtatctactttgttttactggtgatactcttgtgtcccttctattgctggcatcacatcctactgctgtcagccacacccagtgtaatccatctggctttgtagagattagcataaagacttggaaagcctctatttttctttctgagaaactgagaaatttgattgacacaggggggtgtagtttgaaccttttatttttgaagtggagaggaatgggagaaagcacatctttatatgatgtttatattatttctcttcatctaatcttagcagtctactgtatgagtagatattctgttacattatttttaatgcatttaaattttttagaatactcagcaatagcaataaatattctgaaatgatgaagtcgtgaactaccaaatttttttttgcattgcatttttatagtatggaatttgccatctttaaatgtttaaataataccaccattttgaactctgca

SEQ ID NO: 4717 - protein, 574 aa, Homo sapiens
MAHNKIPPRWLNCPRRGQPVAGRFLPLKTMLGPRYDSQVAEENRFHPSMLSNYLKSLKVKMGLLVDLTNTSRFYDRNDIEKEGIKYIKLQCKGHGECPTTENTETFIRLCERFNERNPPELIGVHCTHGFNRTGFLICAFLVEKMDWSIEAAVATFAQARPPGIYKGDYLKELFRRYGDIEEAPPPPLLPDWCFEDDEDEDEDEDGKKESEPGSSASFGKRRKERLKLGAIFLEGVTVKGVTQVTTQPKLGEVQQKCHQFCGWEGSGFPGAQPVSMDKQNIKLLDLKPYKVSWKADGTRYMMLIDGTNEVFMIDRDNSVFHVSNLEFPFRKDLRMHLSNTLLDGEMIIDRVNGQAVPRYLIYDIIKFNSQPVGDCDFNVRLQCIEREIISPRHEKMKTGLIDKTQEPFSVRNKPFFDICTSRKKYKPGRCDDILKWKPPSLNSVDFRLKITRMGGEGLLPQNVGLLYVGGYERPFAQIKVTKELKQYDNKIIECKFENNSWVFMRQRTDKSFPNAYNTAMAVCNSISNPVTKEMLFEFIDRCTAASQGQKRKHHLDPDTELMPPPPPKRPRPLT

SEQ ID NO: 4718 - DNA, 4937 bp, Homo sapiens
gaagttgcggtgcattgtgggttctcctggagctgtggagttgatcctgaatgaaagtggcgcgccgcccctgacgttacccggatcggagaggttggaattcagattacggctgcgattcgggtgtctcggaccccggtgtgcaccggaccacggggaggcggctccaaaggcgcggtgaacgttggtgagggagggcagctctgcgcagccccaagacatggctcacaacaagatcccgccgcggtggctgaactgtccccggcgcggccagccggtggcaggaagattcttacctctgaagacaatgttaggaccaagatatgatagtcaagttgctgaagaaaatcggttccatcccagcatgctctcaaattacctaaagagcctaaaggttaaaatgggcttgttggtggacctgacaaatacttcaaggttctatgaccgaaatgacatagaaaaagaaggaatcaaatatataaaacttcagtgtaaaggacatggtgagtgccctaccactgagaatactgagacctttattcgtctgtgtgagcggtttaatgaaagaaatccacctgaacttataggtgttcattgtactcatggcttcaatcgcactggtttcctcatatgtgcctttttggtggagaaaatggattggagtatcgaagcagcagttgctacttttgcccaagccagaccaccaggaatctacaagggtgattatttgaaggaactttttcgtcggtatggtgacatagaggaagcaccacccccacctctattgccagattggtgttttgaggatgatgaagacgaagatgaggatgaggatggaaagaaggaatcagaacccgggtcaagtgcttcttttggcaaaaggagaaaagaacggttaaaactgggcgctattttcttggaaggtgttactgttaaaggtgtaactcaagtaacaacacaaccaaagttaggagaggtacagcagaagtgtcatcaattctgtggctgggaagggtctggattccctggagcacagcctgtttccatggacaagcaaaatattaaacttttagacctgaagccatacaaagtaagctggaaagcagatggtactcggtacatgatgttgattgatggcacaaatgaagtttttatgattgatagagacaattcagtatttcatgtttcaaatctggaatttccatttcgtaaagatcttcgtatgcatttatcaaatactctcttggatggcgagatgattattgacagagtaaatggacaggctgttcctagatatttgatatatgacataattaaattcaattcacagcccgttggagattgtgattttaatgttcgtctgcagtgtatagaacgagaaattataagtcctcgacacgaaaaaatgaagactgggctcattgacaaaacacaggaaccatttagcgtcagaaataagccgttttttgacatctgtacttcaagaaagctacttgaaggaaattttgccaaagaagtgagccatgaaatggatggacttatttttcagcctactggaaaatacaaacctggtcgatgtgatgatattttgaaatggaagcctcccagtctgaattctgtggattttcgtctaaaaataacaagaatgggaggagaagggttacttcctcagaatgttggcctcctgtatgttggaggttatgaaagaccctttgcacaaatcaaggtgacaaaagagctgaaacagtatgacaacaaaattatagaatgcaaatttgagaacaacagctgggtcttcatgagacagagaacagacaaaagttttcctaatgcctacaacactgccatggctgtgtgtaacagcatctcaaaccctgtcaccaaggagatgctgtttgagttcatcgacagatgtactgcagcttctcaaggacagaagcgaaaacatcatctggaccctgacacggagctcatgccaccaccacctcccaaaagaccacgccctttaacctaagacctgcctgtgacttgagggttaagaagaaagaggaatgaggaaaaaacgctgttgcccatttttgtagccagagaaattgaaaaacgactgtggcttgatgttgatacacatttgaattttttttaaaaaaagaaagttatcgtagccagcctgtaaatacttgatgcattcgtttcctcagtgctgcaatacatcgtggacttaaacatcttatttatctgataaactcagccttaccttgtggaatctgaagattgaaatatccaaaggtttaaacaagatggaaatcaatgaaaaagaggccttgtttatatatgggtagcttcacatttaatttataaagttaacaatctggaaactgtgagcccataaaacagtattttttagaagttgtgttacaactgtagcaaattttccttttaaaaaatccaggcaatggcattaaacattcttgctatcatttaccatggatttcctacatttctgagatccctgtattcaaaaacaaatgacagggttgttaagttgtactatattaaacaacttggtctggtttatatcattttaacaagttttttggaaatgtaaaagaaaaaagtaaagctccatttttgtgaattgcattgtttctaaaggaagtattttgagtattttcatctgtttgtattgtttcgactatgatatcagatatccagtgtgtccattctggcagtggttttgagttacttcatggaacttggacatacaccaccaggtcctttatgtgttgttctcctgggagacttctttttttaaatgccagggctacttctgctttacctcagtggtatcagcacattgtaaattacgttaaaacacacaactcactgtgatctatgggagtgatatcaaatacaaacgatgttgtgttccttctctcgaacaaaacagcaaagggaatgccagctaacttctttgattagaaggtaatgtcatggaatagaatgctgtcaccagaaaatgctctcccactgctagataaatgcagaggcaaagtgtagacatctgtaggaactaaatatcaaggaaatcaagacatttattttcaaagcgagaattctatctacattctattctgcggatgttatttctgttatacatctgaattttaaaatgtttactgatagataatggatttaaagggcggctaattgattgtctgccattgttgataaactgttctaattggtttgtgaaagaactctgagaattagctaaatggaggctagtgtatttatttttagaggtacatgttttaagtaaatgtatttaaaacaaattttcatggtctgaattgtatatgtaaatgcatatctgtgtaagtatatgcaagtgtatattcttctactgattcagtcagacacgaaatccaactgaattacccggtagactgaatatctgacgggatttctatatggacatagcacagatgaaccaaaaatgtatttatattcacctgagttttaatgtttttaaacaaagttttctcctgcagtgcttttctatatgaaatagttgagtcaagcttgggcttttttcttcgttgttcccaagtcatgtaatgtatagtgaatttatccaaaacgccattgtaacgttttttactagagtgtttttgcacatttgggcgctaaagggattaaaacaactgatgccacaatgactattgaaggagggaaaattctcaaggttccatagtatcttttacaaaatggattaaaaaaaaaatgcctatgcaacttcaaatagtctgatgcctgcttccccaggacgagtgactcttccacggtgtgctgctttccctccgagcctgtggaaaggcagagcccttttgcagatacgaaagcaagcttttgccaatgatctttaatggagttaaaatgtttatggtaattgtaacctttcaaatgagttacgtgaaaagagcatctcacttttaatacacccagatattttcttcaagtctttgtgcattttagcaggacttaattttcttaatttattctttcctttcaattatagtgacatagagtagttggccttataagtagatcccatttagcccctgaacataataccatctgcagtattataaaagtcatttagaaggtcagggggataatctagaggcaggattttggacattgtgaaggaaatgtgctccttctcagctcacttcaataactattttctgagactgaagttttttagacaagaataagaaaactttgctttcttcagttatcacatgtgaaagcttttgctttttgttaggaaaaggtgtggatgactctactgcgtggatggttacatttgctttccgtgaaatgctcagaaaatgtcaggacattccttttccaattgtgtgtcagtgcgtattgtaataaaactactgatttaaattagcataagtgtatctactttgttttactggtgatactcttgtgtcccttctattgctggcatcacatcctactgctgtcagccacacccagtgtaatccatctggctttgtagagattagcataaagacttggaaagcctctatttttctttctgagaaactgagaaatttgattgacacaggggggtgtagtttgaaccttttatttttgaagtggagaggaatgggagaaagcacatctttatatgatgtttatattatttctcttcatctaatcttagcagtctactgtatgagtagatattctgttacattatttttaatgcatttaaattttttagaatactcagcaatagcaataaatattctgaaatgatgaagtcgtgaactaccaaatttttttttgcattgcatttttatagtatggaatttgccatctttaaatgtttaaataataccaccattttgaactctgca

SEQ ID NO: 4719 - protein, 597 aa, Homo sapiens
MAHNKIPPRWLNCPRRGQPVAGRFLPLKTMLGPRYDSQVAEENRFHPSMLSNYLKSLKVKMGLLVDLTNTSRFYDRNDIEKEGIKYIKLQCKGHGECPTTENTETFIRLCERFNERNPPELIGVHCTHGFNRTGFLICAFLVEKMDWSIEAAVATFAQARPPGIYKGDYLKELFRRYGDIEEAPPPPLLPDWCFEDDEDEDEDEDGKKESEPGSSASFGKRRKERLKLGAIFLEGVTVKGVTQVTTQPKLGEVQQKCHQFCGWEGSGFPGAQPVSMDKQNIKLLDLKPYKVSWKADGTRYMMLIDGTNEVFMIDRDNSVFHVSNLEFPFRKDLRMHLSNTLLDGEMIIDRVNGQAVPRYLIYDIIKFNSQPVGDCDFNVRLQCIEREIISPRHEKMKTGLIDKTQEPFSVRNKPFFDICTSRKLLEGNFAKEVSHEMDGLIFQPTGKYKPGRCDDILKWKPPSLNSVDFRLKITRMGGEGLLPQNVGLLYVGGYERPFAQIKVTKELKQYDNKIIECKFENNSWVFMRQRTDKSFPNAYNTAMAVCNSISNPVTKEMLFEFIDRCTAASQGQKRKHHLDPDTELMPPPPPKRPRPLT

SEQ ID NO: 4720 - DNA, 5651 bp, Homo sapiens
agatgccagctttgttttcgtctaaactttaaagcataaaactgttctttctaaattttctttacaattaggtagaacattgaacttatcacaacaaagataccttctgtcttagagataatagatcatccataaaagctaattaatggatttcttagttaagagtagacttcagaaatgccatggtaataggtctttgtagtggcttttaatctcttaaaacatgaggcttgcatgggatgaggcatgaattaattttccagcttttgacggaattgaattctaaaaccatccacatacatatgacaatcacgtctaaaaagtaattagcttgctataaatacaagagatttcctgtgagaaaattgctcatactatctaaccaatagagaaatttggcagattagagaaaaactatatgttatctgaaagaatagaacccttcagttttttagtttgttttggctcttgtgcttttttgcttagattccattgtgagagaggtggcaggctggtttgacacaggtttatgtccaaaatcttcatggaaattttctaatgaatctattaaaatgcacaagggtgatttgtcatccaattgaaaagcagtctaatccttaggacaaactttagaactagaaaaacctggtggggttctcattcaactaagtagtagtgggtatgccttggctttttgtccataatgggaatggcaatatgcacttcttagaattactttttgaattgtatggagttgtgtggataaagcacctagcacaataccaggctcataaaagtcatttttaaaaatagtatttctttaccacaatcatccctctcccctaaagcagttacaaaccattgcagatggggccttattttatcatcttgggattcagatcattaggattctcagatgcactttctttttacgtgtttctttcccatgagaaattatgacatgacacgagaaaccgagcaagcaaataactaaaaccatagggtgttcctttgaatatttgtttcagggactctggctctctggaatttggtatacatttccagaaagcgtaggttgcatggggcactgctcaggagttacatctgtgacacagatatctaacttgagacattttgagatcaaagcgttctgtttcaaagccatgttttactttggttttagttcataagtaacctcatggaaaagccagccttttccaattcagtctgaactggaacaacagaatgaaaataaaccaaatagtttattatttttcttcatttactgccattaatagttttatgctaaagaatatattgaataagagtgaaccgaatggcatttatttcttcagtttagttctgttttcttgttgtttagttgaaggagagggaatggaagaaaattcttctgtttatgtgatatatcatcatacttttctacataaattgagtgcagaataactccaggaaataacaggaaagcaaactaaccaagttgagaccccccatgtctaccaaatggtttgtatgtgttaactcattcagtcccagcagccaccatctggcagattctgagcactgtgcttcaggttacattgcttaaaaattgaataacataaggattgtgaagtatggagcccagtgcacatttatcaaaagcatctgattcaagattttaatctagttccacctttttcaaagttctttatattctcttgtagtattctttcctaaattttctcagtaatgtagcaagatgaggaagatactagatagaattgtccttaaactgcctgctatatagttatctgtgaagaagcaaaagggaagcagtgtggtatgttgaaaggaactcaggattggaggtgagatttggggttcttgtctttgtcttaaaaaaaaaaagttgtgtttttgttttttataattaataatgtgttttttcattaaatcatgtccaggatcctttctagtttttttttttccccttaaaccaaaaccataataccatcattaataattatttgaccttaaagatctataaaagaaaggtgaaaatatttaaagccaaattaaattattgctttgagaatactattcagattatatggataagagctttggagtaagctttggagtaagaggaagtaagtttgaaaccttccatgactagctgcctgagttatacaaacactatctgtgacctcctggtaatatatatctgctcatttttataggtttgatctagtttactacaagggtgatatattagcaaaaataaattggaattactctaaaacagccttccttataccacagaattcagaataagttaaatctgcaggaggctataaccaaactggttttcctaaaggaactgcatcaaatccaaggtactcaacaaatgtatgtatcagagagagctttccaatgaagttccaggggtgggccttcctgctcattcaacagggaggtgctggagatattcttaatggtagaagaattgtagttggtttctttctgatataaatgcactcccaggtggtggtaagggaggttctgttgattcatcagaatatgactgcacagtagcaggagctgaagaaatacttgttgtataaatgacctatatctcttaaaaaggaggatatgctcccatttctgtaccaaagaagagaaggctgagaaccctccatgactagcaaacactatctgtgatctcatggtagcatatatctgctcatttttacaagtttgatctagtttatcataggagtgatatattaagtagcaaaaataaattggaattactctaaaacagccttccttataccacagaattcagaacaagttaaatccacaggagactacaaccaaactggcttccctaaaagaactgcatcaactccaaggtgacaaaagagctgaaacagtatgacaacaaaattatagaatgcaaatttgagaacaacagctgggtcttcatgagacagagaacagacaaaagttttcctaatgcctacaacactgccatggctgtgtgtaacagcatctcaaaccctgtcaccaaggagatgctgtttgagttcatcgacagatgtactgcagcttctcaaggacagaagcgaaaacatcatctggaccctgacacggagctcatgccaccaccacctcccaaaagaccacgccctttaacctaagacctgcctgtgacttgagggttaagaagaaagaggaatgaggaaaaaacgctgttgcccatttttgtagccagagaaattgaaaaacgactgtggcttgatgttgatacacatttgaattttttttaaaaaaagaaagttatcgtagccagcctgtaaatacttgatgcattcgtttcctcagtgctgcaatacatcgtggacttaaacatcttatttatctgataaactcagccttaccttgtggaatctgaagattgaaatatccaaaggtttaaacaagatggaaatcaatgaaaaagaggccttgtttatatatgggtagcttcacatttaatttataaagttaacaatctggaaactgtgagcccataaaacagtattttttagaagttgtgttacaactgtagcaaattttccttttaaaaaatccaggcaatggcattaaacattcttgctatcatttaccatggatttcctacatttctgagatccctgtattcaaaaacaaatgacagggttgttaagttgtactatattaaacaacttggtctggtttatatcattttaacaagttttttggaaatgtaaaagaaaaaagtaaagctccatttttgtgaattgcattgtttctaaaggaagtattttgagtattttcatctgtttgtattgtttcgactatgatatcagatatccagtgtgtccattctggcagtggttttgagttacttcatggaacttggacatacaccaccaggtcctttatgtgttgttctcctgggagacttctttttttaaatgccagggctacttctgctttacctcagtggtatcagcacattgtaaattacgttaaaacacacaactcactgtgatctatgggagtgatatcaaatacaaacgatgttgtgttccttctctcgaacaaaacagcaaagggaatgccagctaacttctttgattagaaggtaatgtcatggaatagaatgctgtcaccagaaaatgctctcccactgctagataaatgcagaggcaaagtgtagacatctgtaggaactaaatatcaaggaaatcaagacatttattttcaaagcgagaattctatctacattctattctgcggatgttatttctgttatacatctgaattttaaaatgtttactgatagataatggatttaaagggcggctaattgattgtctgccattgttgataaactgttctaattggtttgtgaaagaactctgagaattagctaaatggaggctagtgtatttatttttagaggtacatgttttaagtaaatgtatttaaaacaaattttcatggtctgaattgtatatgtaaatgcatatctgtgtaagtatatgcaagtgtatattcttctactgattcagtcagacacgaaatccaactgaattacccggtagactgaatatctgacgggatttctatatggacatagcacagatgaaccaaaaatgtatttatattcacctgagttttaatgtttttaaacaaagttttctcctgcagtgcttttctatatgaaatagttgagtcaagcttgggcttttttcttcgttgttcccaagtcatgtaatgtatagtgaatttatccaaaacgccattgtaacgttttttactagagtgtttttgcacatttgggcgctaaagggattaaaacaactgatgccacaatgactattgaaggagggaaaattctcaaggttccatagtatcttttacaaaatggattaaaaaaaaaatgcctatgcaacttcaaatagtctgatgcctgcttccccaggacgagtgactcttccacggtgtgctgctttccctccgagcctgtggaaaggcagagcccttttgcagatacgaaagcaagcttttgccaatgatctttaatggagttaaaatgtttatggtaattgtaacctttcaaatgagttacgtgaaaagagcatctcacttttaatacacccagatattttcttcaagtctttgtgcattttagcaggacttaattttcttaatttattctttcctttcaattatagtgacatagagtagttggccttataagtagatcccatttagcccctgaacataataccatctgcagtattataaaagtcatttagaaggtcagggggataatctagaggcaggattttggacattgtgaaggaaatgtgctccttctcagctcacttcaataactattttctgagactgaagttttttagacaagaataagaaaactttgctttcttcagttatcacatgtgaaagcttttgctttttgttaggaaaaggtgtggatgactctactgcgtggatggttacatttgctttccgtgaaatgctcagaaaatgtcaggacattccttttccaattgtgtgtcagtgcgtattgtaataaaactactgatttaaattag

SEQ ID NO: 4721 - protein, 71 aa, Homo sapiens; identical to SEQ ID NO: 4715

SEQ ID NO: 4722 - DNA, 3086 bp, Homo sapiens
caggctggagtgcagtggtgcaatctcagctcactgtaccgtccacctcccgggttcaagcgattctcctgcttcagcctccagagtagctgggattacaggtgcctgccaccatgctgggctgattttttataattttaataggggtggggtttcacagtgttggccaggctggtcgcaaactcctgacctcaagtgatccacgtgcctcggcctcccaaagtgctgggattacaggtgtgagccaacatgcctggccagaaggttctggtttgttaaccaggttacttcctcagaatgttggcctcctgtatgttggaggttatgaaagaccctttgcacaaatcaaggtgacaaaagagctgaaacagtatgacaacaaaattatagaatgcaaatttgagaacaacagctgggtcttcatgagacagagaacagacaaaagttttcctaatgcctacaacactgccatggctgtgtgtaacagcatctcaaaccctgtcaccaaggagatgctgtttgagttcatcgacagatgtactgcagcttctcaaggacagaagcgaaaacatcatctggaccctgacacggagctcatgccaccaccacctcccaaaagaccacgccctttaacctaagacctgcctgtgacttgagggttaagaagaaagaggaatgaggaaaaaacgctgttgcccatttttgtagccagagaaattgaaaaacgactgtggcttgatgttgatacacatttgaattttttttaaaaaaagaaagttatcgtagccagcctgtaaatacttgatgcattcgtttcctcagtgctgcaatacatcgtggacttaaacatcttatttatctgataaactcagccttaccttgtggaatctgaagattgaaatatccaaaggtttaaacaagatggaaatcaatgaaaaagaggccttgtttatatatgggtagcttcacatttaatttataaagttaacaatctggaaactgtgagcccataaaacagtattttttagaagttgtgttacaactgtagcaaattttccttttaaaaaatccaggcaatggcattaaacattcttgctatcatttaccatggatttcctacatttctgagatccctgtattcaaaaacaaatgacagggttgttaagttgtactatattaaacaacttggtctggtttatatcattttaacaagttttttggaaatgtaaaagaaaaaagtaaagctccatttttgtgaattgcattgtttctaaaggaagtattttgagtattttcatctgtttgtattgtttcgactatgatatcagatatccagtgtgtccattctggcagtggttttgagttacttcatggaacttggacatacaccaccaggtcctttatgtgttgttctcctgggagacttctttttttaaatgccagggctacttctgctttacctcagtggtatcagcacattgtaaattacgttaaaacacacaactcactgtgatctatgggagtgatatcaaatacaaacgatgttgtgttccttctctcgaacaaaacagcaaagggaatgccagctaacttctttgattagaaggtaatgtcatggaatagaatgctgtcaccagaaaatgctctcccactgctagataaatgcagaggcaaagtgtagacatctgtaggaactaaatatcaaggaaatcaagacatttattttcaaagcgagaattctatctacattctattctgcggatgttatttctgttatacatctgaattttaaaatgtttactgatagataatggatttaaagggcggctaattgattgtctgccattgttgataaactgttctaattggtttgtgaaagaactctgagaattagctaaatggaggctagtgtatttatttttagaggtacatgttttaagtaaatgtatttaaaacaaattttcatggtctgaattgtatatgtaaatgcatatctgtgtaagtatatgcaagtgtatattcttctactgattcagtcagacacgaaatccaactgaattacccggtagactgaatatctgacgggatttctatatggacatagcacagatgaaccaaaaatgtatttatattcacctgagttttaatgtttttaaacaaagttttctcctgcagtgcttttctatatgaaatagttgagtcaagcttgggcttttttcttcgttgttcccaagtcatgtaatgtatagtgaatttatccaaaacgccattgtaacgttttttactagagtgtttttgcacatttgggcgctaaagggattaaaacaactgatgccacaatgactattgaaggagggaaaattctcaaggttccatagtatcttttacaaaatggattaaaaaaaaaatgcctatgcaacttcaaatagtctgatgcctgcttccccaggacgagtgactcttccacggtgtgctgctttccctccgagcctgtggaaaggcagagcccttttgcagatacgaaagcaagcttttgccaatgatctttaatggagttaaaatgtttatggtaattgtaacctttcaaatgagttacgtgaaaagagcatctcacttttaatacacccagatattttcttcaagtctttgtgcattttagcaggacttaattttcttaatttattctttcctttcaattatagtgacatagagtagttggccttataagtagatcccatttagcccctgaacataataccatctgcagtattataaaagtcatttagaaggtcagggggataatctagaggcaggattttggacattgtgaaggaaatgtgctccttctcagctcacttcaataactattttctgagactgaagttttttagacaagaataagaaaactttgctttcttcagttatcacatgtgaaagcttttgctttttgttaggaaaaggtgtggatgactctactgcgtggatggttacatttgctttccgtgaaatgctcagaaaatgtcaggacattccttttccaattgtgtgtcagtgcgtattgtaataaaactactgatttaaattag

SEQ ID NO: 4723 - protein, 71 aa, Homo sapiens; identical to SEQ ID NO: 4715

SEQ ID NO: 4724 - DNA, 4393 bp, Homo sapiens
gaagttgcggtgcattgtgggttctcctggagctgtggagttgatcctgaatgaaagtggcgcgccgcccctgacgttacccggatcggagaggttggaattcagattacggctgcgattcgggtgtctcggaccccggtgtgcaccggaccacggggaggcggctccaaaggcgcggtgaacgttggtgagggagggcagctctgcgcagccccaagacatggctcacaacaagatcccgccgcggtggctgaactgtccccggcgcggccagccggtggcaggaagattcttacctctgaagacaatgttaggaccaagatatgatagtcaagttgctgaagaaaatcggttccatcccagcatgctctcaaattacctaaagagcctaaaggttaaaatgggcttgttggtggacctgacaaatacttcaaggttctatgaccgaaatgacatagaaaaagaaggaatcaaatatataaaacttcagtgtaaaggacatggtgagtgccctaccactgagaatactgagacctttattcgtctgtgtgagcggtttaatgaaagaaatccacctgaacttataggtgttcattgtactcatggcttcaatcgcactggtttcctcatatgtgcctttttggtggagaaaatggattggagtatcgaagcagcagttgctacttttgcccaagccagaccaccaggaatctacaagggtgattatttgaaggaactttttcgtcggtatggtgacatagaggaagcaccacccccacctctattgccagattggtgttttgaggatgatgaagacgaagatgaggatgaggatggaaagaaggaatcagaacccgggtcaagtgcttcttttggcaaaaggagaaaagaacggttaaaactgggcgctattttcttggaaggtgttactgttaaaggtgtaactcaagtaacaacacaaccaaagttaggagaggtacagcagaagtgtcatcaattctgtggctgggaagggtctggattccctggagcacagcctgtttccatggacaagcaaaatattaaacttttagacctgaagccatacaaagtaagctggaaagcagatggtactcggtacatgatgttgattgatggcacaaatgaagtttttatgattgatagagacaattcagtatttcatgtttcaaatctggaatttccatttcgtaaagatcttcgtatgcatttatcaaatactctcttggatggcgagatgattattgacagagtaaatggacaggctgttcctagatatttgatatatgacataattaaattcaattcacagcccgttggagattgtgattttaatgttcgtctgcagtgtatagaacgagaaattataagtcctcgacacgaaaaaatgaagactgggctcattgacaaaacacaggaaccatttagcgtcagaaataagccgttttttgacatctgtacttcaagaaagaaatacaaacctggtcgatgtgatgatattttgaaatggaagcctcccagtctgaattctgtggattttcgtctaaaaataacaagaatgggaggagaagggttacttcctcagaatgttggcctcctgtatgttggaggttatgaaagaccctttgcacaaatcaaggtgacaaaagagctgaaacagtatgacaacaaaattatagaatgcaaatttgagaacaacagctgggtcttcatgagacagagaacagacaaaagttttcctaatgcctacaacactgccatggctgtgtgtaacagcatctcaaaccctgtcaccaaggagatgctgtttgagttcatcgacagatgtactgcagcttctcaaggacagaagcgaaaacatcatctggaccctgacacggagctcatgccaccaccacctcccaaaagaccacgccctttaacctaagacctgcctgtgacttgagggttaagaagaaagaggaatgaggaaaaaacgctgttgcccatttttgtagccagagaaattgaaaaacgactgtggcttgatgttgatacacatttgaattttttttaaaaaaagaaagttatcgtagccagcctgtaaatacttgatgcattcgtttcctcagtgctgcaatacatcgtggacttaaacatcttatttatctgataaactcagccttaccttgtggaatctgaagattgaaatatccaaaggtttaaacaagatggaaatcaatgaaaaagaggccttgtttatatatgggtagcttcacatttaatttataaagttaacaatctggaaactgtgagcccataaaacagtattttttagaagttgtgttacaactgtagcaaattttccttttaaaaaatccaggcaatggcattaaacattcttgctatcatttaccatggatttcctacatttctgagatccctgtattcaaaaacaaatgacagggttgttaagttgtactatattaaacaacttggtctggtttatatcattttaacaagttttttggaaatgtaaaagaaaaaagtaaagctccatttttgtgaattgcattgtttctaaaggaagtattttgagtattttcatctgtttgtattgtttcgactatgatatcagatatccagtgtgtccattctggcagtggttttgagttacttcatggaacttggacatacaccaccaggtcctttatgtgttgttctcctgggagacttctttttttaaatgccagggctacttctgctttacctcagtggtatcagcacattgtaaattacgttaaaacacacaactcactgtgatctatgggagtgatatcaaatacaaacgatgttgtgttccttctctcgaacaaaacagcaaagggaatgccagctaacttctttgattagaaggtaatgtcatggaatagaatgctgtcaccagaaaatgctctcccactgctagataaatgcagaggcaaagtgtagacatctgtaggaactaaatatcaaggaaatcaagacatttattttcaaagcgagaattctatctacattctattctgcggatgttatttctgttatacatctgaattttaaaatgtttactgatagataatggatttaaagggcggctaattgattgtctgccattgttgataaactgttctaattggtttgtgaaagaactctgagaattagctaaatggaggctagtgtatttatttttagaggtacatgttttaagtaaatgtatttaaaacaaattttcatggtctgaattgtatatgtaaatgcatatctgtgtaagtatatgcaagtgtatattcttctactgattcagtcagacacgaaatccaactgaattacccggtagactgaatatctgacgggatttctatatggacatagcacagatgaaccaaaaatgtatttatattcacctgagttttaatgtttttaaacaaagttttctcctgcagtgcttttctatatgaaatagttgagtcaagcttgggcttttttcttcgttgttcccaagtcatgtaatgtatagtgaatttatccaaaacgccattgtaacgttttttactagagtgtttttgcacatttgggcgctaaagggattaaaacaactgatgccacaatgactattgaaggagggaaaattctcaaggttccatagtatcttttacaaaatggattaaaaaaaaaatgcctatgcaacttcaaatagtctgatgcctgcttccccaggacgagtgactcttccacggtgtgctgctttccctccgagcctgtggaaaggcagagcccttttgcagatacgaaagcaagcttttgccaatgatctttaatggagttaaaatgtttatggtaattgtaacctttcaaatgagttacgtgaaaagagcatctcacttttaatacacccagatattttcttcaagtctttgtgcattttagcaggacttaattttcttaatttattctttcctttcaattatagtgacatagagtagttggccttataagtagatcccatttagcccctgaacataataccatctgcagtattataaaagtcatttagaaggtcagggggataatctagaggcaggattttggacattgtgaaggaaatgtgctccttctcagctcacttcaataactattttctgagactgaagttttttagacaagaataagaaaactttgctttcttcagttatcacatgtgaaagcttttgctttttgttaggaaaaggtgtggatgactctactgcgtggatggttacatttgctttccgtgaaatgctcagaaaatgtcaggacattccttttccaattgtgtgtcagtgcgtattgtaataaaactactgatttaaattag

SEQ ID NO: 4725 - protein, 574 aa, Homo sapiens; identical to SEQ ID NO: 4717

SEQ ID NO: 4726 - DNA, 4462 bp, Homo sapiens
gaagttgcggtgcattgtgggttctcctggagctgtggagttgatcctgaatgaaagtggcgcgccgcccctgacgttacccggatcggagaggttggaattcagattacggctgcgattcgggtgtctcggaccccggtgtgcaccggaccacggggaggcggctccaaaggcgcggtgaacgttggtgagggagggcagctctgcgcagccccaagacatggctcacaacaagatcccgccgcggtggctgaactgtccccggcgcggccagccggtggcaggaagattcttacctctgaagacaatgttaggaccaagatatgatagtcaagttgctgaagaaaatcggttccatcccagcatgctctcaaattacctaaagagcctaaaggttaaaatgggcttgttggtggacctgacaaatacttcaaggttctatgaccgaaatgacatagaaaaagaaggaatcaaatatataaaacttcagtgtaaaggacatggtgagtgccctaccactgagaatactgagacctttattcgtctgtgtgagcggtttaatgaaagaaatccacctgaacttataggtgttcattgtactcatggcttcaatcgcactggtttcctcatatgtgcctttttggtggagaaaatggattggagtatcgaagcagcagttgctacttttgcccaagccagaccaccaggaatctacaagggtgattatttgaaggaactttttcgtcggtatggtgacatagaggaagcaccacccccacctctattgccagattggtgttttgaggatgatgaagacgaagatgaggatgaggatggaaagaaggaatcagaacccgggtcaagtgcttcttttggcaaaaggagaaaagaacggttaaaactgggcgctattttcttggaaggtgttactgttaaaggtgtaactcaagtaacaacacaaccaaagttaggagaggtacagcagaagtgtcatcaattctgtggctgggaagggtctggattccctggagcacagcctgtttccatggacaagcaaaatattaaacttttagacctgaagccatacaaagtaagctggaaagcagatggtactcggtacatgatgttgattgatggcacaaatgaagtttttatgattgatagagacaattcagtatttcatgtttcaaatctggaatttccatttcgtaaagatcttcgtatgcatttatcaaatactctcttggatggcgagatgattattgacagagtaaatggacaggctgttcctagatatttgatatatgacataattaaattcaattcacagcccgttggagattgtgattttaatgttcgtctgcagtgtatagaacgagaaattataagtcctcgacacgaaaaaatgaagactgggctcattgacaaaacacaggaaccatttagcgtcagaaataagccgttttttgacatctgtacttcaagaaagctacttgaaggaaattttgccaaagaagtgagccatgaaatggatggacttatttttcagcctactggaaaatacaaacctggtcgatgtgatgatattttgaaatggaagcctcccagtctgaattctgtggattttcgtctaaaaataacaagaatgggaggagaagggttacttcctcagaatgttggcctcctgtatgttggaggttatgaaagaccctttgcacaaatcaaggtgacaaaagagctgaaacagtatgacaacaaaattatagaatgcaaatttgagaacaacagctgggtcttcatgagacagagaacagacaaaagttttcctaatgcctacaacactgccatggctgtgtgtaacagcatctcaaaccctgtcaccaaggagatgctgtttgagttcatcgacagatgtactgcagcttctcaaggacagaagcgaaaacatcatctggaccctgacacggagctcatgccaccaccacctcccaaaagaccacgccctttaacctaagacctgcctgtgacttgagggttaagaagaaagaggaatgaggaaaaaacgctgttgcccatttttgtagccagagaaattgaaaaacgactgtggcttgatgttgatacacatttgaattttttttaaaaaaagaaagttatcgtagccagcctgtaaatacttgatgcattcgtttcctcagtgctgcaatacatcgtggacttaaacatcttatttatctgataaactcagccttaccttgtggaatctgaagattgaaatatccaaaggtttaaacaagatggaaatcaatgaaaaagaggccttgtttatatatgggtagcttcacatttaatttataaagttaacaatctggaaactgtgagcccataaaacagtattttttagaagttgtgttacaactgtagcaaattttccttttaaaaaatccaggcaatggcattaaacattcttgctatcatttaccatggatttcctacatttctgagatccctgtattcaaaaacaaatgacagggttgttaagttgtactatattaaacaacttggtctggtttatatcattttaacaagttttttggaaatgtaaaagaaaaaagtaaagctccatttttgtgaattgcattgtttctaaaggaagtattttgagtattttcatctgtttgtattgtttcgactatgatatcagatatccagtgtgtccattctggcagtggttttgagttacttcatggaacttggacatacaccaccaggtcctttatgtgttgttctcctgggagacttctttttttaaatgccagggctacttctgctttacctcagtggtatcagcacattgtaaattacgttaaaacacacaactcactgtgatctatgggagtgatatcaaatacaaacgatgttgtgttccttctctcgaacaaaacagcaaagggaatgccagctaacttctttgattagaaggtaatgtcatggaatagaatgctgtcaccagaaaatgctctcccactgctagataaatgcagaggcaaagtgtagacatctgtaggaactaaatatcaaggaaatcaagacatttattttcaaagcgagaattctatctacattctattctgcggatgttatttctgttatacatctgaattttaaaatgtttactgatagataatggatttaaagggcggctaattgattgtctgccattgttgataaactgttctaattggtttgtgaaagaactctgagaattagctaaatggaggctagtgtatttatttttagaggtacatgttttaagtaaatgtatttaaaacaaattttcatggtctgaattgtatatgtaaatgcatatctgtgtaagtatatgcaagtgtatattcttctactgattcagtcagacacgaaatccaactgaattacccggtagactgaatatctgacgggatttctatatggacatagcacagatgaaccaaaaatgtatttatattcacctgagttttaatgtttttaaacaaagttttctcctgcagtgcttttctatatgaaatagttgagtcaagcttgggcttttttcttcgttgttcccaagtcatgtaatgtatagtgaatttatccaaaacgccattgtaacgttttttactagagtgtttttgcacatttgggcgctaaagggattaaaacaactgatgccacaatgactattgaaggagggaaaattctcaaggttccatagtatcttttacaaaatggattaaaaaaaaaatgcctatgcaacttcaaatagtctgatgcctgcttccccaggacgagtgactcttccacggtgtgctgctttccctccgagcctgtggaaaggcagagcccttttgcagatacgaaagcaagcttttgccaatgatctttaatggagttaaaatgtttatggtaattgtaacctttcaaatgagttacgtgaaaagagcatctcacttttaatacacccagatattttcttcaagtctttgtgcattttagcaggacttaattttcttaatttattctttcctttcaattatagtgacatagagtagttggccttataagtagatcccatttagcccctgaacataataccatctgcagtattataaaagtcatttagaaggtcagggggataatctagaggcaggattttggacattgtgaaggaaatgtgctccttctcagctcacttcaataactattttctgagactgaagttttttagacaagaataagaaaactttgctttcttcagttatcacatgtgaaagcttttgctttttgttaggaaaaggtgtggatgactctactgcgtggatggttacatttgctttccgtgaaatgctcagaaaatgtcaggacattccttttccaattgtgtgtcagtgcgtattgtaataaaactactgatttaaattag

SEQ ID NO: 4727 - protein, 597 aa, Homo sapiens; identical to SEQ ID NO: 4719

SEQ ID NO: 4728 - DNA, 3793 bp, Homo sapiens
gaagttgcggtgcattgtgggttctcctggagctgtggagttgatcctgaatgaaagtggcgcgccgcccctgacgttacccggatcggagaggttggaattcagattacggctgcgattcgggtgtctcggaccccggtgtgcaccggaccacggggaggcggctccaaaggcgcggtgaacgttggtgagggagggcagctctgcgcagccccaagacatggctcacaacaagatcccgccgcggtggctgaactgtccccggcgcggccagccggtggcaggaagattcttacctctgaagacaatgttaggaccaagatatgatagtcaagttgctgaagaaaatcggttccatcccagcatgctctcaaattacctaaagagcctaaaggttaaaatgggcttgttggtggacctgacaaatacttcaaggttctatgaccgaaatgacatagaaaaagaaggaatcaaatatataaaacttcagtgtaaaggacatggtgagtgccctaccactgagaatactgagacctttattcgtctgtgtgagcggtttaatgaaagaaatccacctgaacttataggtgttcattgtactcatggcttcaatcgcactggtttcctcatatgtgcctttttggtggagaaaatggattggagtatcgaagcagcagttgctacttttgcccaagccagaccaccaggaatctacaagggtgattatttgaaggaactttttcgtcggtatggtgacatagaggaagcaccacccccacctctattgccagattggtgttttgaggatgatgaagacgaagatgaggatgaggatggaaagaaggaatcagaacccgggtcaagtgcttcttttggcaaaaggagaaaagaacggttaaaactgggcgctattttcttggaaggtgttactgttaaaggtgtaactcaagtaacaacacaaccaaagttaggagaggtacagcagaagtgtcatcaattctgtggctgggaagggtctggattccctggagcacagcctgtttccatggacaagcaaaatattaaacttttagacctgaagccatacaaagtaagctggaaagcagatggtactcggtacatgatgttgattgatggcacaaatgaagtttttatgattgatagagacaattcagtatttcatgtttcaaatctggaatttccatttcgtaaagatcttcgtatgcatttatcaaatactctcttggatggcgagatgattattgacagagtaaatggacaggctgttcctagatatttgatatatgacataattaaattcaattcacagcccgttggagattgtgattttaatgttcgtctgcagtgtatagaacgagaaattataagtcctcgacacgaaaaaatgaagactgggctcattgacaaaacacaggaaccatttagcgtcagaaataagccgttttttgacatctgtacttcaagaaagctacttgaaggaaattttgccaaagaagtgagccatgaaatggatggacttatttttcagcctactggaaaatacaaacctggtcgatgtgatgatattttgaaatggaagcctcccagtctgaattctgtggattttcgtctaaaaataacaagaatgggaggagaagggttacttcctcagaatgttggcctcctgtatgttggaggttatgaaagaccctttgcacaaatcaaggtgacaaaagagctgaaacagtatgacaacaaaattatagaatgcaaatttgagaacaacagctgggtcttcatgagacagagaacagacaaaagttttcctaatgcctacaacactgccatggctgtgtgtaacagcatctcaaaccctgtcaccaaggagatgctgtttgagttcatcgacagatgtactgcagcttctcaaggacagaagcgaaaacatcatctggaccctgacacggagctcatgccaccaccacctcccaaaagaccacgccctttaacctaagacctgcctgtgacttgagggttaagaagaaagaggaatgaggaaaaaacgctgttgcccatttttgtagccagagaaattgaaaaacgactgtggcttgatgttgatacacatttgaattttttttaaaaaaagaaagttatcgtagccagcctgtaaatacttgatgcattcgtttcctcagtgctgcaatacatcgtggacttaaacatcttatttatctgataaactcagccttaccttgtggaatctgaagattgaaatatccaaaggtttaaacaagatggaaatcaatgaaaaagaggccttgtttatatatgggtagcttcacatttaatttataaagttaacaatctggaaactgtgagcccataaaacagtattttttagaagttgtgttacaactgtagcaaattttccttttaaaaaatccaggcaatggcattaaacattcttgctatcatttaccatggatttcctacatttctgagatccctgtattcaaaaacaaatgacagggttgttaagttgtactatattaaacaacttggtctggtttatatcattttaacaagttttttggaaatgtaaaagaaaaaagtaaagctccatttttgtgaattgcattgtttctaaaggaagtattttgagtattttcatctgtttgtattgtttcgactatgatatcagatatccagtgtgtccattctggcagtggttttgagttacttcatggaacttggacatacaccaccaggtcctttatgtgttgttctcctgggagacttctttttttaaatgccagggctacttctgctttacctcagtggtatcagcacattgtaaattacgttaaaacacacaactcactgtgatctatgggagtgatatcaaatacaaacgatgttgtgttccttctctcgaacaaaacagcaaagggaatgccagctaacttctttgattagaaggtaatgtcatggaatagaatgctgtcaccagaaaatgctctcccactgctagataaatgcagaggcaaagtgtagacatctgtaggaactaaatatcaaggaaatcaagacatttattttcaaagcgagaattctatctacattctattctgcggatgttatttctgttatacatctgaattttaaaatgtttactgatagataatggatttaaagggcggctaattgattgtctgccattgttgataaactgttctaattggtttgtgaaagaactctgagaattagctaaatggaggctagtgtatttatttttagaggtacatgttttaagtaaatgtatttaaaacaaattttcatggtctgaattgtatatgtaaatgcatatctgtgtaagtatatgcaagtgtatattcttctactgattcagtcagacacgaaatccaactgaattacccggtagactgaatatctgacgggatttctatatggacatagcacagatgaaccaaaaatgtatttatattcacctgagttttaatgtttttaaacaaagttttctcctgcagtgcttttctatatgaaatagttgagtcaagcttgggcttttttcttcgttgttcccaagtcatgtaatgtatagtgaatttatccaaaacgccattgtaacgttttttactagagtgtttttgcacatttgggcgctaaagggattaaaacaactgatgccacaatgactattgaaggagggaaaattctcaaggttccatagtatcttttacaaaatggattaaaaaaaaaatgcctatgc

SEQ ID NO: 4729 - protein, 597 aa, Homo sapiens; identical to SEQ ID NO: 4719

SEQ ID NO: 4730 - DNA, 2444 bp, Homo sapiens
gaagttgcggtgcattgtgggttctcctggagctgtggagttgatcctgaatgaaagtggcgcgccgcccctgacgttacccggatcggagaggttggaattcagattacggctgcgattcgggtgtctcggaccccggtgtgcaccggaccacggggaggcggctccaaaggcgcggtgaacgttggtgagggagggcagctctgcgcagccccaagacatggctcacaacaagatcccgccgcggtggctgaactgtccccggcgcggccagccggtggcaggaagattcttacctctgaagacaatgttaggaccaagatatgatagtcaagttgctgaagaaaatcggttccatcccagcatgctctcaaattacctaaagagcctaaaggttaaaatgggcttgttggtggacctgacaaatacttcaaggttctatgaccgaaatgacatagaaaaagaaggaatcaaatatataaaacttcagtgtaaaggacatggtgagtgccctaccactgagaatactgagacctttattcgtctgtgtgagcggtttaatgaaagaaatccacctgaacttataggtgttcattgtactcatggcttcaatcgcactggtttcctcatatgtgcctttttggtggagaaaatggattggagtatcgaagcagcagttgctacttttgcccaagccagaccaccaggaatctacaagggtgattatttgaaggaactttttcgtcggtatggtgacatagaggaagcaccacccccacctctattgccagattggtgttttgaggatgatgaagacgaagatgaggatgaggatggaaagaaggaatcagaacccgggtcaagtgcttcttttggcaaaaggagaaaagaacggttaaaactgggcgctattttcttggaaggtgttactgttaaaggtgtaactcaagtaacaacacaaccaaagttaggagaggtacagcagaagtgtcatcaattctgtggctgggaagggtctggattccctggagcacagcctgtttccatggacaagcaaaatattaaacttttagacctgaagccatacaaagtaagctggaaagcagatggtactcggtacatgatgttgattgatggcacaaatgaagtttttatgattgatagagacaattcagtatttcatgtttcaaatctggaatttccatttcgtaaagatcttcgtatgcatttatcaaatactctcttggatggcgagatgattattgacagagtaaatggacaggctgttcctagatatttgatatatgacataattaaattcaattcacagcccgttggagattgtgattttaatgttcgtctgcagtgtatagaacgagaaattataagtcctcgacacgaaaaaatgaagactgggctcattgacaaaacacaggaaccatttagcgtcagaaataagccgttttttgacatctgtacttcaagaaagctacttgaaggaaattttgccaaagaagtgagccatgaaatggatggacttatttttcagcctactggaaaatacaaacctggtcgatgtgatgatattttgaaatggaagcctcccagtctgaattctgtggattttcgtctaaaaataacaagaatgggaggagaagggttacttcctcagaatgttggcctcctgtatgttggaggttatgaaagaccctttgcacaaatcaaggtatgtttgttcattttcagtgtacttttcctggatgttctcttatctagaatccatcaaaaccttgctaataataatcaacatataaaaatatcgtgttccagcactttgggaggctaagacaggtggatcacttgagcccaggaggttgagaccatgctgggaaccctgtctctacaaaaagaaaaattttttgtcattagccaagttcagtggcatgtgcctatagtcccagctactctggaggctgaggtgggaagatcacttaagccccatgagtttgaggctgcagtgagccgtgatcacaccactgtactccagcctgggtgacagagtgagaccctgtctcaaaaaaaaaaaaaaaaaaaaaaaagtgaatgtgaggtgataatttcataagcttttgcatatttctgctgaagaaatctttcagcttttcaaaggaattgattattttaatattcttgccatagtaaaattgactttgaccgaaacagttcagtgattcatttagaagagtacatttagagattaatctttgagatcatcccttttgccattaaaaaaatgtttacaagtcgggtacggtggctcatgcctgcactaccagtgctttttgaggccgaggtgggagggtcagggctggaagattgcttgggcccagaagttcgagactagcctgggcaacatagtgaaacctcatctctacaaaatagta

SEQ ID NO: 4731 - protein, 541 aa, Homo sapiens
MAHNKIPPRWLNCPRRGQPVAGRFLPLKTMLGPRYDSQVAEENRFHPSMLSNYLKSLKVKMGLLVDLTNTSRFYDRNDIEKEGIKYIKLQCKGHGECPTTENTETFIRLCERFNERNPPELIGVHCTHGFNRTGFLICAFLVEKMDWSIEAAVATFAQARPPGIYKGDYLKELFRRYGDIEEAPPPPLLPDWCFEDDEDEDEDEDGKKESEPGSSASFGKRRKERLKLGAIFLEGVTVKGVTQVTTQPKLGEVQQKCHQFCGWEGSGFPGAQPVSMDKQNIKLLDLKPYKVSWKADGTRYMMLIDGTNEVFMIDRDNSVFHVSNLEFPFRKDLRMHLSNTLLDGEMIIDRVNGQAVPRYLIYDIIKFNSQPVGDCDFNVRLQCIEREIISPRHEKMKTGLIDKTQEPFSVRNKPFFDICTSRKLLEGNFAKEVSHEMDGLIFQPTGKYKPGRCDDILKWKPPSLNSVDFRLKITRMGGEGLLPQNVGLLYVGGYERPFAQIKVCLFIFSVLFLDVLLSRIHQNLANNNQHIKISCSSTLGG

SEQ ID NO: 4732 - DNA, 685 bp, Homo sapiens
tgggtttaataaagcatgtgggtattcgttttcaaacaacagggtatttaacattttatttgagtgctgggattacaggtgtgagccaccgcacctggcccaaaatgtaattttttacctatcacattggaaataataacattgtcccttttggttagaatgtgagcaaataggtactctcctaaactgtttggtaggaacagaagttggtacaactctttcaatgggcattaaggtagtatatgtcctgagaaaatatgctccaattttgtgaaaggagagatgttgtttgtcttctacatagttgtattcttagtacatagcatggtgacttgtttatagtaggcactccagaaatattcagtgatggaatgtatatacaaacaaataagaatatgtaaaagtatgtgtataataattttattgaagcatcattacaatagtgagaaactggaaatattcaatgtctttttcactgtaaaagtcttttgtaaaatatagttgtatacatgtgtcttcctgtatgtgtttccaggaaagttgctaatagtattctaaaaatctctaatagtatcttttagaaattggtctagtctgttgagatacaagatttcctagagctttgaggttgaactcagacctagcatctacatttgttgtttgattttacattcacacatagttg

SEQ ID NO: 4733 - protein, 44 aa, Homo sapiens
MECIYKQIRICKSMCIIILLKHHYNSEKLEIFNVFFTVKVFCKI

SEQ ID NO: 4734 - DNA, 4875 bp, Homo sapiens
ataccttaaatgccgcgagactgaagagcaaacgtcagggattattatgtcgattttccgaggaccagggttcgcagctggcagtagaagaaaaggctggctcctcaggggtcccactggcatttgataccctgaacgaccctcaggattgcccaaattcggtggatcgcccaaattcggtggatcagcaactttcctatactgcatcccgaattttcaaagaacatattttccgttcacccccgctggtcttttactgccatcaatacactgttcttggtgcaaatacttcagcctctttattcaaagtatgttttatgtttttgccaaatatgatctctaattgaaagtttatttttggttttggatgaatctgcggagcttaagttgtgagaagaaagggggaacaagacacaatgaaagaaaagtccaaaaatgctgcgcggactaggagggagaaggaaaacagtgaattttatgaactggctaaattactgcctttgccctcggctatcacctcgcagctggacaaagcatccataatcagactcacgaccagctatctcaaaatgagagtggtgttcccagaagggctcggcgaggcgtggggccactcaagtcggaccagccccctggacaacgttggccgagaactgggctcccatctgctccagaccctggatggcttcatcttcgtggtagccccagatgggaagatcatgtacatctcagagacagcctcagtccacttgggtctttctcaggtagagctgaccggaaacagcatttatgaatacattcacccggcagaccacgacgagatgacggcggtgctcaccgcccatcaaccctaccactctcacttcgtgcaggagtatgagatcgagcgctccttcttcctgaggatgaagtgcgtcttggccaagcgtaacgccggcctcacctgtggcggctacaaggtcatccactgcagcggctacttgaagatccgccagtacagcctggacatgtcccccttcgacggctgctaccaaaacgtgggcctggtggccgtgggccactcgctgcctcccagcgccgtcacggagatcaagctacacagcaatatgtttatgttccgcgccagcctggacatgaagctcatctttctggactccagggtggcggagctgacggggtacgaacctcaggacctgattgagaagactctgtaccaccatgtgcacggctgcgacaccttccacctgcgctgcgcgcaccatttgctgctggtgaagggacaggtgaccaccaagtactacaggttcctggcgaaacacggcggctgggtatgggtgcagagctacgcgaccatcgtgcacaacagtcgctcctccaggccacactgtatcgtcagcgtcaactatgtcctcacagacacagaatacaaagggctgcagctctccctggatcagatctcagcctccaaaccagccttctcctataccagcagctccacccccaccatgactgacaacagaaagggggccaaatcccggctctccagctcaaagtcaaaatccaggacttccccataccctcagtattcgggatttcacacagaaagatcggaatctgatcatgacagccagtggggcggaagtcccttgaccgacacggcctctccgcagcttctggaccccgccgataggcctggctcccagcacgacgcatcgtgcgcctacagacagttttcggaccgcagctctctctgctatggctttgcgcttgaccactcgaggctggtggaagagaggcatttccatacccaggcctgtgaaggaggccgatgtgaggcaggcaggtacttcctgggaacgccgcaggccgggagggagccctggtggggctctcgcgcagccttgcccctgacaaaggcctccccagaaagcagagaagcctatgaaaacagcatgcctcacatcgcttcagtccacaggatccatgggcgaggtcattgggatgaagatagtgtggtcagttctccagaccctgggtcggccagtgaatcaggtgaccgatatcgtactgagcagtatcaaagtagcccacatgaacccagcaaaattgaaactcttataagagccactcagcaaatgattaaagaagaagagaacagattacagctaaggaaagccccctcagaccaactggcttccattaatggggctgggaaaaaacactccctgtgttttgcaaactaccaacagcccccaccaacaggtgaagtctgccatggctctgctcttgccaacacttcaccatgtgaccatatccagcagagagagggaaaaatgttgagcccccatgaaaatgactatgacaacagtcccaccgcactatctcggataagtagtcccaattcggatcgcatttcaaaatccagtttgatcctagctaaagactatctgcattcggatatatctcctcatcagacagcaggagaccaccctactgtctctccaaactgctttggctctcaccggcagtattttgacaagcatgcttacacattaactggatatgccctggagcacttatatgacagcgaaaccattagaaactattccttgggctgtaatggctcacactttgatgtaacttcccatctgaggatgcaaccagacccagcacaaggacacaagggaacatctgttataataaccaacggaagctgatgttttgctgaaatattttgttctttaaggatctctgaaacatatttatagtttaataccccattaccagcatttactatgccacagattgttagagagtataacttaagttactgggtatttgatacgtgttcctataaaatcaaagaaaacatagcactagcattcagggttatacacagaaaagggagctaaattgaatacacaaatttcccctctaattatatgggaaccagaatagataaattttgacttgaaaaatattcatgtagatcaagtgtgcatatatactacatgagaggactgatgaatgacaacattgcattgtgactatccagtgatcctcaaacacacaaactattacttacaaactgcggtatacattttacatatggaaatataggctatgtaatgtaaatacatcaaaaatgggtaattttctttgactctgtcacactaaacttcttaacgaaatttccattcccaaaataactgagaaagagagagatacatcttataaactgacttctttgtggtttcaaatcagccagctcatttggttcaggcataaattagagaaatggttctggatatggtgcaaaaatgagttttcacctggtatccattataaacaatcaggaagaggtaatttttcaccttgcttttcagttagacaaggaccaggattgcactgacatggcgctgagggtttttctaagtaagaacactgagatattgggacacacatcaaaaacctggagtgctcaattggaagtagttctatgaatatggaaaggccagaggcagagtgaaataaaatgctatctcaaagtttaacacaatttaagggctcagcataagtaaacaacatatttggggtttgcttgtaaaaccaactaaataaaaaattcaaaccaattcacccagaaaaaagaccaataggtgcaaaaataaaaggaaaaccagtgaagtgccacatgacagcagtgttaagtgtttgaaaacgtttcaaagcacatatgtgccaatgtgacaacatgtggaaagcctcaggagagagtctaagataaaagcttaggctgatagacaagtagttaagagctaagagcagtactctgaaggaataggcaaaatgtttattttccttattgtttgtaaacaacaaacttggtcttacatctgtgtggtatagtagaaaggccagctgactagatctctggattctaattttggccctacctgtaacttaattttgtgaccacagttgtaccattcaccgtgcctgggctctagtttcctggtttgtaaggcagccccagcgttcatgttctgtgatagagcagaactgaacttattacctaattaactctctgctatgagttgtcaagactgatcattctgttttttctgtacacagaagtttagatgctttgtgacttaagcaggtgtgtgggctcctttaggcaggttacagttaactttctagatttagccaaaatgtagttggtagaaatttatgacagagaagaaaaatagcaagatttatttaatgctctattctctagtaattaaagcaaaatgatataagtgattagagagatttcatagataatatttcctaggagtcccgtgcccaaaactcttgccatatttaaggaagggaatgtactggcagaacttgacttacaattttggaaacagaacatgaaattgaatactcagggattagtagtatattttcatcatttaacacagttatttcacagtccataggtaggtgacaatctgaacgataatatgaaagatgagtactgggttgtttgtatatgaaaggagaggctacataaaattaaataatgttaacatttgtgctgtaaatgcaaaaaagtgcaagtaagtgagaaagttagtggttatatatattttcaaaaaattcaaagtgcagttgacccttgaataacatgggtttgaactgtgcagattcacttatgtgtggttttttttccaatcaaatgcagataaaaaacccagtatttggagaaatgtgaaacctgagtatacagagggcgatgttttgtataagtgagcgccacagggccaacaggcaggacttgagtatgtgagaatttgattatatgggggtaatcctggaaccaac

SEQ ID NO: 4735 - protein, 766 aa, Homo sapiens; identical to SEQ ID NO: 580

SEQ ID NO: 4736 - DNA, 456 bp, Homo sapiens
gttagcaggtgacacaaccaagattcagacccaggttcttcgtctaccctaacagtattgccaaagagagattccaaagttaccgcctggccactgggtaaacctccgcagcagagagacctactttatgtttcattttcaagctcctatggagcccagcagagagagctgacaaggaggaatactgcgaggggctcacagactaagacaatctgctgggaaattaggagtttgaaacatccaactaagaagcctaaggtttagactgcatcatattctaataacaacaggattataatatcaaatgagactctctgaccctgcaaatctggaaccagctgtatagggactttgaacctcccttttctccaatctgctggtgtttgtcatcctaatatatacctcatattttctttctgaaaataatttttaaaatatacccatcatacatacggc

SEQ ID NO: 4737 - protein, 83 aa, Homo sapiens
HNQDSDPGSSSTLTVLPKRDSKVTAWPLGKPPQQRDLLYVSFSSSYGAQQRELTRRNTARGSQTKTICWEIRSLKHPTKKPKV

SEQ ID NO: 4738 - DNA, 2003 bp, Homo sapiens
tgtttgatatagtactcatcatcttggggtccagagtctagtcttgattggctttgtgtttttgtttgtttgtttgttttcttaagcattcgtttttggtgaataaggttttggaagatttgattaacatggttatgtctcaatttgttcatctaccaatgtggtattaaagttaattgtaggaatagcatgagaatttgctaatttgatgtcaagatccagagttttttattctaactggccatatattctgatagttacaactacgaactagtgtctataatatgctctgagaatcttgaagtaagttaaataattgcatatcaaagacaccaaaccagaatggaagaaaatttaaaacatctcagatagatatgctgaactatgtagatgtatggccttcaagtaagacaacgtagccttaaccacaaccaagtggtataggaagtctagatatttttaatgttgtatctttttttctggtttacagggaaagccagagagctgtgcagttactcctcgatttcccaaatcaaaagacgaaggatggtttttgatattaggagaagtggataagagagaacttattgctttgaaaagagtaggatatattcgaaatcatcatgttgcttccctttctttttatacccctgaaatacctggaaggtatatctacacattatatttcatgagtgactgctaccttggcctggaccagcagtatgacatctatctcaacgttacacaagcgagtctttctgcacaggtcaacaccaaggtctctgattccctgactgacctggcattaaagtaacttgacctgaacaatccatttgaaaggagtggctaagaattctctctgttcagtcatctagacaaatcgaattacttgatgtttgccttgaaagaatcaacttctaacctcaaccatccaggaaattgacagtggctgcagtattgactccagtgacataaagttaaccacagtggccttttaacaaatgttgccttttataatgttatctttatgagtttcttgatatgtaagatgaaaaagcatttagaataatcttttaatttgtgtatatttgggatgatatttaggagctatcaatcaaattttacatctcacaatgtactgtttacatggatattggctgctttttttaaggaaaaccacattgagatgtgacaagtgttaggacttgtcacagatttctaactctgccgcataaactataaatctgtaaggtggtacacagcgtgtcttgttagcaaaatttatactttgatatgatcacatgtagaagtagcttcaagaatttcttgtagtcataaatgtttaataatatatgatgtaaaattatattatggagcctaatgatgataacaaagaaaacaatatactgatcttagaaaatgtagacatggttaactgggaaataaaatatagagtggcacttcaagacaagctgactcaatgttttcttctgcttcctttaaataatatccccttactcatctgttcttcttttctttcccttctacttcaaggctttatttctattatctttctgacatatttatttacagaagtagagaagtataatctaattcatgttgtagcacttacagatcatatagtacaattatttgtctttatgctctccaggaaaaatctgagacagaaaatttttcacccctatggataggttttcacctgtaataaagaaaatttctctatgtccaaacaaattccttcttgaaaaatactttttcaaactaaaaacttgttaaaattcaatgttcatataatatgcattctagtggaatgaaattctacctttgtgaaataatttcagttttcttagccctaaaatgaattattttaaaacattttccaatgtcattgttacaaatactagaatttaagtgtttctgaaattggaatgtattgcttgtatatatccttttccatgcttaaataaaaaagaagaagaaat

SEQ ID NO: 4739 - protein, 113 aa, Homo sapiens [sequence omitted]

SEQ ID NO: 4740 - DNA, 1469 bp, Homo sapiens
tgtttgatatagtactcatcatcttggggtccagagtctagtcttgattggctttgtgtttttgtttgtttgtttgttttcttaagcattcgtttttggtgaataaggttttggaagatttgattaacatggttatgtctcaatttgttcatctaccaatgtggtattaaagttaattgtaggaatagcatgagaatttgctaatttgatgtcaagatccagagttttttattctaactggccatatattctgatagttacaactacgaactagtgtctataatatgctctgagaatcttgaagtaagttaaataattgcatatcaaagacaccaaaccagaatggaagaaaatttaaaacatctcagatagatatgctgaactatgtagatgtatggccttcaagtaagacaacgtagccttaaccacaaccaagtggtataggaagtctagatatttttaatgttgtatctttttttctggtttacagggaaagccagagagctgtgcagttactcctcgatttcccaaatcaaaagacgaaggatggtttttgatattaggagaagtggataagagagaacttattgctttgaaaagagtaggatatattcgaaatcatcatgttgcttccctttctttttatacccctgaaatacctggaaggtatatctacacattatatttcatgagtgactgctaccttggcctggaccagcagtatgacatctatctcaacgttacacaagcgagtctttctgcacaggtcaacaccaaggtctctgattccctgactgacctggcattaaagtaacttgacctgaacaatccatttgaaaggagtggctaagaattctctctgttcagtcatctagacaaatcgaattacttgatgtttgccttgaaagaatcaacttctaacctcaaccatccaggaaattgacagtggctgcagtattgactccagtgacataaagttaaccacagtggccttttaacaaatgttgccttttataatgttatctttatgagtttcttgatatgtaagatgaaaaagcatttagaataatcttttaatttgtgtatatttgggatgatatttaggagctatcaatcaaattttacatctcacaatgtactgtttacatggatattggctgctttttttaaggaaaaccacattgagatgtgacaagtgttaggacttgtcacagatttctaactctgccgcataaactataaatctgtaaggtggtacacagcgtgtcttgttagcaaaatttatactttgatatgatcacatgtagaagtagcttcaagaatttcttgtagtcataaatgtttaataatatatgatgtaaaattatattatggagcctaatgatgataacaaagaaaacaatatactgatcttagaaaatgtagacatggttaactgggaaataaaatatagagtggcacttcaagac

SEQ ID NO: 4741 - protein, 41 aa, Homo sapiens [sequence omitted]

SEQ ID NO: 4742 - DNA, 7611 bp, Homo sapiens
gcagcggggcggtgacgtgtaggccggcgccagctccactctgtccctcctcgccgggtctgtgcgtctttgcgtctgtctgtctgactgatggtcctcacacgcggttccctgtgactgggcgcgaccccggcaagcgcggcttggagggcggacggggcgcggcgatacagctgcccgctcgcatctttggccctgcgctcagctcctcacccggcgtgggaagttaaagtaaaaccgaaagggaagaaggcgcggtggcaggagctgacagagtgatgggaaacgcgtgagccaggccgagagtttcaggtttcttgctgtatggatcactgattgaataatagatggctttacctcgtctcacaggagccttgcgttccttttcaaatgtcaccaagcaagataattataatgaagaagtggctgacttaaagataaagcgatctaaacttcatgaacaagttttagatttgggcctgacatggaagaagataataaaatttttgaatgaaaaactggagaagagtaaaatgcaaagtataaatgaagacttaaaagatatattacatgctgcaaagcagatagttggaactgataatgggagagaagcaattgaaagtggggctgcatttctcttcatgacatttcacttgaaggactctgttggtcacaaggaaacaaaggctatcaaacagatgtttggcccctttccttcatcatctgccactgcagcttgtaatgctactaatcgaattatttctcattttagtcaagatgatcttactgctcttgtgcagatgacagaaaaagaacatggcgatagggttttttttggtaaaaatttagcattttcatttgacatgcatgatttggaccactttgacgaactgccaataaatggtgaaactcagaaaactataagcctagattataagaagtttctgaatgaacatctccaggaggcttgcaccccagaactcaagcctgtggaaaaaacaaatggctcctttttgtggtgtgaagttgaaaagtacctaaattcaactttgaaggaaatgactgaagtgccaagagtagaagatctttgctgtactttatatgatatgcttgcttctattaaaagtggtgatgaacttcaggatgagctatttgaactgctgggacctgaaggacttgaacttattgagaaactcctccagaacagaattacaattgtggatagatttcttaattcttcaaatgatcataggtttcaggctcttcaagacaattgtaaaaaaattttaggagaaaatgctaaacccaattatggttgtcaagtcactattcagtctgaacaagaaaagcagttaatgaaacaatatcgacgtgaagaaaaaagaattgccagacgagaaaaaaaggctggagaagatttagaagtttcagaaggacttatgtgctttgatcctaaggaattgcggatacaaagagaacaggcacttctgaatgctagaagtgttccaattctgagcaggcagagagatgcagacgttgaaaaaatacattatccccatgtgtatgattcccaggctgaagccatgaaaacatcagcatttattgctggtgcaaagatgattttgccagaaggaatccaaagagagaataacaagctttatgaagaagtaaggattccctacagcgaaccaatgccactcagctttgaggaaaagccagtttatatccaagacttagatgagatcggacagctggcttttaaaggaatgaagagactcaatagaatccagtcaatagtgtttgagactgcctacaacaccaatgagaacatgctgatttgtgcccctacaggagctggaaaaaccaacattgcaatgctgacagtcttgcatgaaattcgccaacattttcaacaaggtgttatcaaaaagaatgaatttaagattgtatatgttgctccaatgaaagccttggcagctgaaatgacagattacttcagcagacgtctagagccactaggcatcattgtgaaagaattgactggtgacatgcagttgtccaaaagtgaaattttacgaactcagatgcttgtgaccacaccagaaaaatgggatgtagtgacaagaaagagtgttggggatgtagctctttcccagattgtaaggctccttattcttgatgaagttcatttgctgcatgaagatagaggaccagtattagaaagcatagttgcccgtactttacggcaggtggaatccacacagagtatgataaggattctcggactgtctgcaactttacctaactacctcgatgttgccacatttttacatgttaatccatacattggacttttcttctttgatggccgttttcgaccagtacctcttggacagacatttttggggattaaatgtgcaaataagatgcagcagttgaataacatggatgaagtatgttatgaaaatgttttgaagcaagtaaaggctggacaccaggtgatggtgtttgtacatgctcgaaatgccactgtaagaacagctatgtctctaatagaaagagcaaaaaattgtggccatattcccttcttttttcctacccaaggacatgactatgtacttgcagaaaaacaggtacaaaggtcgagaaataagcaagtacgagaattattcccagatggttttagtattcatcatgcaggaatgcttcggcaggacagaaatttagttgaaaacttgttttctaatgggcatatcaaagtcctagtgtgtacagctacgttagcctggggtgtcaatcttcccgcccatgctgttattattaagggaacacaaatatatgctgcaaaaagaggctcctttgttgaccttggaattttagatgtcatgcagatatttggtcgagctggacgaccacaatttgacaaatttggggaaggaataattataacaacgcatgataaactcagccattacctcactttgctcactcaacgaaacccaattgagagtcagtttctggaaagccttgcagataacctaaatgcagagattgctctgggaacagttactaatgtggaagaagcagtgaagtggataagttacacttatctttatgtacggatgagagcaaatccattagcatatggcatcagtcacaaggcttatcagattgacccaacattaagaaagcatcgagaacagttggtcattgaagttggacgaaaactagacaaagctcagatgattcgttttgaggagcgaactggatatttttcctcaactgatttgggtagaactgccagccattactatattaaatacaacaccattgagacctttaatgaactctttgatgctcacaaaacagaaggtgatatctttgccatagtctccaaagctgaagaatttgatcaaattaaggtcagagaagaggaaatagaggagttagataccttattaagcaatttttgtgaactctccactcctggaggtgtagagaatagttatgggaaaataaacatcttacttcaaacttatatcagccgaggagaaatggacagtttctcccttatatcagattctgcatatgttgcacagaatgcagctagaattgtccgtgctctttttgaaattgctctgaggaaacgttggcctaccatgacctacaggctcctgaatcttagtaaagtcattgacaagaggctttggggttgggctagccctttgagacaattttcaatcctaccaccacacatcctaacaagattagaagaaaaaaagcttactgtggataagctgaaagacatgaggaaagatgaaataggtcacattttacatcatgtgaatattggactgaaggtcaaacaatgtgttcatcagattccttctgttatgatggaagcatccattcagcctatcacaaggactgtcctccgagtgacactcagcatctatgctgatttcacttggaatgatcaggtacatgggacagtaggagaaccttggtggatttgggtagaagatcctacaaatgatcatatttatcattcagagtattttctagctctaaaaaaacaagtcattagtaaagaagcccaactactggtatttacaatccctatttttgagcctttgccttcccaatactacatccgagcagtgtctgatagatggttgggtgctgaggcagtatgtattatcaactttcaacatctaattctaccagagagacatcctcctcatacagaattactggatcttcagcctttaccaatcacagctttgggatgtaaagcatatgaagccctgtacaacttcagccactttaaccctgtacagacacaaatatttcatacattgtatcacacggattgtaatgtcctacttggagcacctactggatcgggaaagactgttgcagctgaattagccattttcagagtcttcaacaaataccctacttcaaaggcggtatatattgcacccctaaaagccctagtacgtgaaagaatggatgattggaaagttagaatagaagaaaaacttggtaaaaaagttattgaactaacaggggatgtgactcctgatatgaaatccattgccaaggctgaccttatcgtcactacgccagagaagtgggatggagtcagcagaagctggcaaaataggaactatgttcagcaagtcactattctcatcatagatgagatccatctgcttggggaggaaagaggccctgttctagaggtcattgtatctcgaacaaattttatctcatcacacacagaaaagcctgttagaatagttggactatctactgcattagctaatgccagagaccttgctgattggctcaatattaagcagatgggcttgtttaacttccgaccatcagtacgcccagttccactggaagttcacattcaaggctttccaggtcaacattactgtcctcgtatggctagtatgaacaagcctgcatttcaggcaattagaagccattctccagccaaacctgttttgatatttgtctcatcaagacgtcaaactcgtcttactgctttggaattgatcgccttcctggctactgaagaagatccaaagcagtggttaaacatggatgaaagagagatggagaacatcattgcaacagtaagagattccaacctcaagctgacccttgctttcgggataggaatgcatcatgctggactacatgagagggaccgaaaaacagtagaggaactatttgtaaactgtaaagttcaggttcttattgctacaagcacattagcctggggtgtaaactttccagctcatttagtaattattaagggaacagaatactatgatggaaaaacaagacgttatgtggattttcccattacagatgtcctccagatgatggggcgtgctgggaggccgcagttcgatgaccaaggcaaagctgtaattctagttcatgacataaagaaagacttttataaaaaatttctttatgaacctttcccagtagaatcaagtttattaggagtgctctctgaccacttaaatgcagagattgctggtggtacaattacatctaagcaagatgcattggattatatcacctggacttactttttccgacgtcttatcatgaatcccagctattacaatttgggtgatgtgagccatgattctgtgaacaagtttctgtcccatctgattgagaagtccctgattgaattggaactttcctactgtattgaaattggagaggataatcgcagcattgaacctctaacttatggccgaattgcctcctattactatttgaagcatcaaacagttaaaatgttcaaggaccgcttgaagcctgaatgcagtactgaagaactgctttcaattctaagtgatgcagaagaatatacagatttgccagtgagacacaatgaagatcatatgaatagtgaactggcaaaatgtcttcccattgaatcaaatcctcattcatttgacagccctcacaccaaagcacatctcctgctacaggcacatctcagccgagccatgctaccctgcccagattatgacactgataccaaaacagtcttggaccaagctctcagagtatgtcaggcaatgctggacgtggctgcaaaccagggctggctggtgactgtcctgaatatcaccaacctgattcagatggtgatccagggtcggtggttaaaggactcttctcttcttacactaccaaacatagaaaaccatcatcttcaccttttcaagaaatggaagccgattatgaagggcccacatgctaggggtcggacctccatcgagtcccttcctgaactgatccatgcctgtggagggaaagaccatgtatttagctccatggtagaaagtgagctacatgctgcaaaaacgaaacaggcatggaatttcttatctcacttgccagtgataaatgttggcataagtgttaaaggctcgtgggatgacttagttgaaggacataatgaactctctgtctcaactctgactgcagacaaacgagatgacaacaaatggatcaaattgcatgctgaccaagagtatgtgcttcaagtgagcttgcagagagtccactttgggttccacaagggaaagccagagagctgtgcagttactcctcgatttcccaaatcaaaagacgaaggatggtttttgatattaggagaagtggataagagagaacttattgctttgaaaagagtaggatatattcgaaatcatcatgttgcttccctttctttttatacccctgaaatacctggaaggtatatctacacattatatttcatgagtgactgctaccttggcctggaccagcagtatgacatctatctcaacgttacacaagcgagtctttctgcacaggtcaacaccaaggtctctgattccctgactgacctggcattaaagtaacttgacctgaacaatccatttgaaaggagtggctaagaattctctctgttcagtcatctagacaaatcgaattacttgatgtttgccttgaaagaatcaacttctaacctcaaccatccaggaaattgacagtggctgcagtattgactccagtgacataaagttaaccacagtggccttttaacaaatgttgccttttataatgttatctttatgagtttcttgatatgtaagatgaaaaagcatttagaataatcttttaatttgtgtatatttgggatgatatttaggagctatcaatcaaattttacatctcacaatgtactgtttacatggatattggctgctttttttaaggaaaaccacattgagatgtgacaagtgttaggacttgtcacagatttctaactctgccgcataaactataaatctgtaaggtggtacacagcgtgtcttgttagcaaaatttatactttgatatgatcacatgtagaagtagcttcaagaatttcttgtagtcataaatgtttaataatatatgatgtaaaattatattatggagcctaatgatgataacaaagaaaacaatatactgatcttagaaaatgtagacatggttaactgggaaataaaatatagagtggcacttcaagac

SEQ ID NO: 4743 - protein, 2202 aa, Homo sapiens; identical to SEQ ID NO: 582

SEQ ID NO: 4744 - DNA, 2827 bp, Homo sapiens
gcagcggggcggtgacgtgtaggccggcgccagctccactctgtccctcctcgccgggtctgtgcgtctttgcgtctgtctgtctgactgatggtcctcacacgcggttccctgtgactgggcgcgaccccggcaagcgcggcttggagggcggacggggcgcggcgatacagctgcccgctcgcatctttggccctgcgctcagctcctcacccggcgtgggaagttaaagtaaaaccgaaagggaagaaggcgcggtggcaggagctgacagagtgatgggaaacgcgtgagccaggccgagagtttcaggtttcttgctgtatggatcactgattgaataatagatggctttacctcgtctcacaggagccttgcgttccttttcaaatgtcaccaagcaagataattataatgaagaagtggctgacttaaagataaagcgatctaaacttcatgaacaagttttagatttgggcctgacatggaagaagataataaaatttttgaatgaaaaactggagaagagtaaaatgcaaagtataaatgaagacttaaaagatatattacatgctgcaaagcagatagttggaactgataatgggagagaagcaattgaaagtggggctgcatttctcttcatgacatttcacttgaaggactctgttggtcacaaggaaacaaaggctatcaaacagatgtttggcccctttccttcatcatctgccactgcagcttgtaatgctactaatcgaattatttctcattttagtcaagatgatcttactgctcttgtgcagatgacagaaaaagaacatggcgatagggttttttttggtaaaaatttagcattttcatttgacatgcatgatttggaccactttgacgaactgccaataaatggtgaaactcagaaaactataagcctagattataagaagtttctgaatgaacatctccaggaggcttgcaccccagaactcaagcctgtggaaaaaacaaatggctcctttttgtggtgtgaagttgaaaagtacctaaattcaactttgaaggaaatgactgaagtgccaagagtagaagatctttgctgtactttatatgatatgcttgcttctattaaaagtggtgatgaacttcaggatgagctatttgaactgctgggacctgaaggacttgaacttattgagaaactcctccagaacagaattacaattgtggatagatttcttaattcttcaaatgatcataggtttcaggctcttcaagacaattgtaaaaaaattttaggagaaaatgctaaacccaattatggttgtcaagtcactattcagtctgaacaagaaaagcagttaatgaaacaatatcgacgtgaagaaaaaagaattgccagacgagaaaaaaaggctggagaagatttagaagtttcagaaggacttatgtgctttgatcctaaggaattgcggatacaaagagaacaggcacttctgaatgctagaagtgttccaattctgagcaggcagagagatgcagacgttgaaaaaatacattatccccatgtgtatgattcccaggctgaagccatgaaaacatcagcatttattgctggtgcaaagatgattttgccagaaggaatccaaagagagaataacaagctttatgaagaagtaaggattccctacagcgaaccaatgccactcagctttgaggaaaagccagtttatatccaagacttagatgagatcggacagctggcttttaaaggaatgaagagactcaatagaatccagtcaatagtgtttgagactgcctacaacaccaatgagaacatgctgatttgtgcccctacaggagctggaaaaaccaacattgcaatgctgacagtcttgcatgaaattcgccaacattttcaacaaggtgttatcaaaaagaatgaatttaagattgtatatgttgctccaatgaaagccttggcagctgaaatgacagattacttcagcagacgtctagagccactaggcatcattgtgaaagaattgactggtgacatgcagttgtccaaaagtgaaattttacgaactcagatgcttgtgaccacaccagaaaaatgggatgtagtgacaagaaagagtgttggggatgtagctctttcccagattgtaaggctccttattcttgatgaagttcatttgctgcatgaagatagaggaccagtattagaaagcatagttgcccgtactttacggcaggtggaatccacacagagtatgataaggattctcggactgtctgcaactttacctaactacctcgatgttgccacatttttacatgttaatccatacattggacttttcttctttgatggccgttttcgaccagtacctcttggacagacatttttggggattaaatgtgcaaataagatgcagcagttgaataacatggatgaagtatgttatgaaaatgttttgaagcaagtaaaggctggacaccaggtacacttattttatctgcttttacacttatttatctgcttttagagagtgcttaatgataaaaattattaatatttacgctcttcagaagaaaatttttctttaattctgaggcaatgactcagaggttctaattcttaataactgctttagcccaatgggtaagtcataaaaatattcatagatattatcatcccagtattgataggtcgtgctattttgtttgccatttttaattttaaatattatattcttactgttttcatgaagcaatatcaattgaaatgtaatatatataataaagttctgtattgtttgatggtgtttag

SEQ ID NO: 4745 - protein, 731 aa, Homo sapiens
MALPRLTGALRSFSNVTKQDNYNEEVADLKIKRSKLHEQVLDLGLTWKKIIKFLNEKLEKSKMQSINEDLKDILHAAKQIVGTDNGREAIESGAAFLFMTFHLKDSVGHKETKAIKQMFGPFPSSSATAACNATNRIISHFSQDDLTALVQMTEKEHGDRVFFGKNLAFSFDMHDLDHFDELPINGETQKTISLDYKKFLNEHLQEACTPELKPVEKTNGSFLWCEVEKYLNSTLKEMTEVPRVEDLCCTLYDMLASIKSGDELQDELFELLGPEGLELIEKLLQNRITIVDRFLNSSNDHRFQALQDNCKKILGENAKPNYGCQVTIQSEQEKQLMKQYRREEKRIARREKKAGEDLEVSEGLMCFDPKELRIQREQALLNARSVPILSRQRDADVEKIHYPHVYDSQAEAMKTSAFIAGAKMILPEGIQRENNKLYEEVRIPYSEPMPLSFEEKPVYIQDLDEIGQLAFKGMKRLNRIQSIVFETAYNTNENMLICAPTGAGKTNIAMLTVLHEIRQHFQQGVIKKNEFKIVYVAPMKALAAEMTDYFSRRLEPLGIIVKELTGDMQLSKSEILRTQMLVTTPEKWDVVTRKSVGDVALSQIVRLLILDEVHLLHEDRGPVLESIVARTLRQVESTQSMIRILGLSATLPNYLDVATFLHVNPYIGLFFFDGRFRPVPLGQTFLGIKCANKMQQLNNMDEVCYENVLKQVKAGHQVHLFYLLLHLFICF

SEQ ID NO: 4746 - DNA, 4140 bp, Homo sapiens
gcagcggggcggtgacgtgtaggccggcgccagctccactctgtccctcctcgccgggtctgtgcgtctttgcgtctgtctgtctgactgatggtcctcacacgcggttccctgtgactgggcgcgaccccggcaagcgcggcttggagggcggacggggcgcggcgatacagctgcccgctcgcatctttggccctgcgctcagctcctcacccggcgtgggaagttaaagtaaaaccgaaagggaagaaggcgcggtggcaggagctgacagagtgatgggaaacgcgtgagccaggccgagagtttcaggtttcttgctgtatggatcactgattgaataatagatggctttacctcgtctcacaggagccttgcgttccttttcaaatgtcaccaagcaagataattataatgaagaagtggctgacttaaagataaagcgatctaaacttcatgaacaagttttagatttgggcctgacatggaagaagataataaaatttttgaatgaaaaactggagaagagtaaaatgcaaagtataaatgaagacttaaaagatatattacatgctgcaaagcagatagaagtgaattgtccattccagaagaggaggctggatggaaaagaggaggatgagaagatgagcagagcttctgacagattcagaggactaagatgacaaaaatgactaaaatggacaaaagaagaaatagaaaatctgaatatttgactattaaaggaatttaatctgtaattaaaaaccttaagtacaaagaaatctatatgctatgatggctttaatggagaatgtcataatgtcatttaaaaaggtatgagagtactattgtagattaaaagaggttaaaggcatataataatcaaaatgtaatgtatgatccttgattgactcttgaatcagaaaaaaattacgtatttttggggccgttggagaaatctgaatatgggctggacatcattaggtaatattagatctcaggtgtgataatgttgtggctatgtaagaggatatcctaaatctcaggagaagcatactgcagtatatatagtggtatctcatgaagattaaaatgtactgtcaaatgtgtcagcaaaagaaatacacatgatgtgtgtgtgtgatcaagtgtttataatgagtggattaataaatatgagaagatagggtgatttgttgtaaagtaataaaggtttaaaaattacatgattcagtagagaaaaagcattttatgaatatctaacattacttatgataaaaaatctcagcaaactaggaatagaaggggattttgttaatctgataagctgtagctataaaaaacttggagaaaacatacttaatgctacaaagttagaagcttccctgaggtacggaattagacacaaatgcctgttaccacttctgtttctcactgtattaaaaatccttgctaacataatatggcaagaaaaagtaagggcataaagactggaaaaaaaaacttttccatttttcacatgactgtacctgtagaaaatgaatttaacaaggttaatataaaaatcaattttatttctacttactagaagcacattaaaaattacacttatctttatgtaacgtaatacattttaccttaaattttaaaattttaatttattttacgtttacaaaagcatcataaacatcaaatacgtaggagtaaatttaacaaaaaataagcaagacttcatggaaaactaaaatattgagagaatttaaagaagatctaaataaacagagggatataccaagaattggaagactcactattataatgatatattttttacccaaattgatctgtagattcagtgctatcccaggcacagtcttatgtttgagggtgtgtgtgtgtgtgtgtgtgtatgtgtgcatgtgtgtgtgtggaaattgacaagggtaatatgaaagttatatggaaattcaaaggcaaagagcagcctggttaactttgaaaaataaaaagggagaacttactctagtagatcttaaaacttattataaagataagtatacagtgtggtgttggtccaagaataggcaaatggactagtatgacagaatatagcccagaaacaaacctacggatagaaatatacttgatttataatgaaggccaaacaatagtgagacaaggctattttttcagtatatggtgctgggtcaactgcatatacagatgaaaaaaagtacctattttacaaataattttaaacagcctacagaattaagcatgatacacaaaacaatacatcttctaaaagatgtaaaagagtgtcttcaggatctttgtatgtgcgaaaatttatcaaacagagaacaaaaagtacaaagggaatgattaagttggactgtagtaaaattaataccttctatttattaagagtaaaaaggcaaaacatggagtgggagaatatagcttcaagatatataaccaaaaagagagcttttatccaggttaaatacgagctcctacaaatcaataaggaaaggacagataatcctatatgaacatgagtaagagctttgaacaaggacttcacaagagatagttgaccagtaaacatgaaaagggcttcagcttcattggtagtcaaggatatgccactgcatgcccattagaatggttaaaatgtaaaagactgacatacctattgttaggatcaagaatgtgaactagaatttttgtctactgctgctagagtttacaattggtacaaccactttgagtaactgtttgacagtgtctactattacctactgtggttggacaagtgaaattttaaatcttaggacataaatatccaataaaaatgcttgtacatacatgtatatcaaaaataggtgcattcattgcaacattatttgtgatagccttaatgtagaaacaacccagttcattgttaaaaagcttaagttgtagtatgtagactgccttatagcagtaacggattacagctatgtataacattgtaagtgaatcttataatgttgacaaaagaagccatacaacacatattatgattccattaatatgaaactgaaaactaggcatgaccagtctctggttttagaagtcaggatagtggctgcttttgaggaaggaggtagtgactaggagtgaatatgagggaggtttctggggagctgataatgttctgattcttgaagtagttaaccagattacacaggtgtgttcgttttttgataattctttgaactgtatgtgtactgtatattttcttgttatattcaataaaaagaattactatgatttttatattacatagattaaataagaagtatttcagattgataagtaacacatgcttgtgtatttatttagcttaaggtttggctatcatggtgagaactcctatgtaccctgctcaggtcctggtaaacagtatcataagtataataaattggtgtttttcattctcatgcctatttttatatttgtgttacctatttatacatccataaatatatgtattaggaatacattcagctcaaatatcaaaacctattgtgataaagccaccaagtgggttaatttgtttcatctgacaagttccctatgtaggtcagcagcttgataatggtagggctcaagtctgtgctaatgatttggccttttcttcacatttgttgccttttattcaccagatatctgctccacatctaggcattatatctgtgtacttgatgcaactatatttcttgtactgtctttatttgcttttcagattcctaacttttttatagtttgggataatttcaaagtatcagttaatatatgtgggtacaaattcagttctgtcagttactagtgggtagctaattaatatcactaaacctcttttctcttctataatatggttataacagttctcaccctctgtagttgttgtgatgttaagtagtagtataaagtgcctagggttaaactgataagtggctgtcaattaataattttattataacttagatgtgctaataaccattagtaaacaaatagttgcttctatgggttaaatgttatgacagatgtaatgtgtccagtgatgtactggttcaaagagcaggaaactgc

SEQ ID NO: 4747 - protein, 111 aa, Homo sapiens; identical to SEQ ID NO: 584

SEQ ID NO: 4748 - DNA, 3487 bp, Homo sapiens
gcagcggggcggtgacgtgtaggccggcgccagctccactctgtccctcctcgccgggtctgtgcgtctttgcgtctgtctgtctgactgatggtcctcacacgcggttccctgtgactgggcgcgaccccggcaagcgcggcttggagggcggacggggcgcggcgatacagctgcccgctcgcatctttggccctgcgctcagctcctcacccggcgtgggaagttaaagtaaaaccgaaagggaagaaggcgcggtggcaggagctgacagagtgatgggaaacgcgtgagccaggccgagagtttcaggtttcttgctgtatggatcactgattgaataatagatggctttacctcgtctcacaggagccttgcgttccttttcaaatgtcaccaagcaagataattataatgaagaagtggctgacttaaagataaagcgatctaaacttcatgaacaagttttagatttgggcctgacatggaagaagataataaaatttttgaatgaaaaactggagaagagtaaaatgcaaagtataaatgaagacttaaaagatatattacatgctgcaaagcagatagaagtgaattgtccattccagaagaggaggctggatggaaaagaggaggatgagaagatgagcagagcttctgacagattcagaggactaagatgacaaaaatgactaaaatggacaaaagaagaaatagaaaatctgaatatttgactattaaaggaatttaatctgtaattaaaaaccttaagtacaaagaaatctatatgctatgatggctttaatggagaatgtcataatgtcatttaaaaaggtatgagagtactattgtagattaaaagaggttaaaggcatataataatcaaaatgtaatgtatgatccttgattgactcttgaatcagaaaaaaattacgtatttttggggccgttggagaaatctgaatatgggctggacatcattaggtaatattagatctcaggtgtgataatgttgtggctatgtaagaggatatcctaaatctcaggagaagcatactgcagtatatatagtggtatctcatgaagattaaaatgtactgtcaaatgtgtcagcaaaagaaatacacatgatgtgtgtgtgtgatcaagtgtttataatgagtggattaataaatatgagaagatagggtgatttgttgtaaagtaataaaggtttaaaaattacatgattcagtagagaaaaagcattttatgaatatctaacattacttatgataaaaaatctcagcaaactaggaatagaaggggattttgttaatctgataagctgtagctataaaaaacttggagaaaacatacttaatgctacaaagttagaagcttccctgaggtacggaattagacacaaatgcctgttaccacttctgtttctcactgtattaaaaatccttgctaacataatatggcaagaaaaagtaagggcataaagactggaaaaaaaaacttttccatttttcacatgactgtacctgtagaaaatgaatttaacaaggttaatataaaaatcaattttatttctacttactagaagcacattaaaaattacacttatctttatgtaacgtaatacattttaccttaaattttaaaattttaatttattttacgtttacaaaagcatcataaacatcaaatacgtaggagtaaatttaacaaaaaataagcaagacttcatggaaaactaaaatattgagagaatttaaagaagatctaaataaacagagggatataccaagaattggaagactcactattataatgatatattttttacccaaattgatctgtagattcagtgctatcccaggcacagtcttatgtttgagggtgtgtgtgtgtgtgtgtgtgtatgtgtgcatgtgtgtgtgtggaaattgacaagggtaatatgaaagttatatggaaattcaaaggcaaagagcagcctggttaactttgaaaaataaaaagggagaacttactctagtagatcttaaaacttattataaagataagtatacagtgtggtgttggtccaagaataggcaaatggactagtatgacagaatatagcccagaaacaaacctacggatagaaatatacttgatttataatgaaggccaaacaatagtgagacaaggctattttttcagtatatggtgctgggtcaactgcatatacagatgaaaaaaagtacctattttacaaataattttaaacagcctacagaattaagcatgatacacaaaacaatacatcttctaaaagatgtaaaagagtgtcttcaggatctttgtatgtgcgaaaatttatcaaacagagaacaaaaagtacaaagggaatgattaagttggactgtagtaaaattaataccttctatttattaagagtaaaaaggcaaaacatggagtgggagaatatagcttcaagatatataaccaaaaagagagcttttatccaggttaaatacgagctcctacaaatcaataaggaaaggacagataatcctatatgaacatgagtaagagctttgaacaaggacttcacaagagatagttgaccagtaaacatgaaaagggcttcagcttcattggtagtcaaggatatgccactgcatgcccattagaatggttaaaatgtaaaagactgacatacctattgttaggatcaagaatgtgaactagaatttttgtctactgctgctagagtttacaattggtacaaccactttgagtaactgtttgacagtgtctactattacctactgtggttggacaagtgaaattttaaatcttaggacataaatatccaataaaaatgcttgtacatacatgtatatcaaaaataggtgcattcattgcaacattatttgtgatagccttaatgtagaaacaacccagttcattgttaaaaagcttaagttgtagtatgtagactgccttatagcagtaacggattacagctatgtataacattgtaagtgaatcttataatgttgacaaaagaagccatacaacacatattatgattccattaatatgaaactgaaaactaggcatgaccagtctctggttttagaagtcaggatagtggctgcttttgaggaaggaggtagtgactaggagtgaatatgagggaggtttctggggagctgataatgttctgattcttgaagtagttaaccagattacacaggtgtgttcgttttttgataattctttgaactgtatgtgtactgtatattttcttgttatattcaataaaaagaattactatgatttttatattacatagattaaataagaagtatttcagattgataagtaacacatgcttgtgtatttatttagcttaaggtttggctatcatggtgagaactcctatgtaccctgctcaggtcctggtaaacagtatcataagtataataaattggtgtttttcattctc

SEQ ID NO: 4749 - protein, 111 aa, Homo sapiens; identical to SEQ ID NO: 584

SEQ ID NO: 4750 - DNA, 779 bp, Homo sapiens
gcagcggggcggtgacgtgtaggccggcgccagctccactctgtccctcctcgccgggtctgtgcgtctttgcgtctgtctgtctgactgatggtcctcacacgcggttccctgtgactgggcgcgaccccggcaagcgcggcttggagggcggacggggcgcggcgatacagctgcccgctcgcatctttggccctgcgctcagctcctcacccggcgtgggaagttaaagtaaaaccgaaagggaagaaggcgcggtggcaggagctgacagagtgatgggaaacgcgtgagccaggccgagagtttcaggtttcttgctgtatggatcactgattgaataatagatggctttacctcgtctcacaggagccttgcgttccttttcaaatgtcaccaagcaagataattataatgaagaagtggctgacttaaagataaagcgatctaaacttcatgaacaagttttagatttgggcctgacatggaagaagataataaaatttttgaatgaaaaactggagaagagtaaaatgcaaagtataaatgaagacttaaaagatatattacatgctgcaaagcagatagaagtgaattgtccattccagaagaggaggctggatggaaaagaggaggatgagaagatgagcagagcttctgacagattcagaggactaagatgacaaaaatgactaaaatggacaaaagaagaaatagaaaatctgaatatttgactattaaaggaatttaatctgtaattaaaaaccttaagtacaaag

SEQ ID NO: 4751 - protein, 111 aa, Homo sapiens; identical to SEQ ID NO: 584

SEQ ID NO: 4752 - DNA, 2194 bp, Homo sapiens
gatttagctagtaatttaatgaaattcatcagttgattgtaagaagtccgcttacatacaccagtcattctctcagcaaatactcatggaaaataaaagcaatgttctccccataaataaatcctacttctttcttgcaactcaaggcgggctgtcagatcggttgcataatagatattggggagctcactggccgggagccttaagaggagagcagctatctcagtctttctcacttaatcttggcttcacgtcagaagctgtgcagcagtgcagtagaatagggcctggcaaaacctttgctagcaaagcgccttttgtgccgggctgtggctcgctatcgacatctcgtccgttaccaaggctgggtttcctactgatttccctcctcctctgctttcacaggctcgcgcggccggacattgtgggtgtgcgtgctggatttctcccggatgctctccgactaacatggatgtcccaccattccttgcagtggaaggttgttccttggcgcagtgagtgaagaacatgcagcgattgctaatgggtttgggaagcggagactccttcctctctctatgaccatgccgtgatcgtgtctgcggtcaccactcgacgcatcctcatttctacccgaacccaggagccgaacgctagatcggggaagtgggtgccgtgcgtgtgggcacagaaacaccatgaagattattttcccgattctaagtaatccagtcttcaggcgcaccgttaaactcctgctctgtttactgtggattggatattctcaaggaaccacacatgtattaagatttggtggtatttttgaatatgtggaatctggcccaatgggagctgaggaacttgcattcagatttgctgtgaacacaattaacagaaacagaacattgctacccaatactacccttacctatgatacccagaagataaacctttatgatagttttgaagcatccaagaaagcctgtgatcagctgtctcttggggtggctgccatcttcgggccttcacacagctcatcagcaaacgcagtgcagtccatctgcaatgctctgggagttccccacatacagacccgctggaagcaccaggtgtcagacaacaaagattccttctatgtcagtctctacccagacttctcttcactcagccgtgccattttagacctggtgcagtttttcaagtggaaaaccgtcacggttgtgtatgatgacagcactggtctcattcgtttgcaagagctcatcaaagctccatcaaggtataatcttcgactcaaaattcgtcagttacctgctgatacaaaggatgcaaaacccttactaaaagaaatgaaaagaggcaaggagtttcatgtaatctttgattgtagccatgaaatggcagcaggcattttaaaacaggcattagctatgggaatgatgacagaatactatcattatatctttaccactctggacctctttgctcttgatgttgagccctaccgatacagtggtgttaacatgacagggttcagaatattaaatacagaaaatacccaagtctcctccatcattgaaaagtggtcgatggaacgattgcaggcacctccgaaacccgattcaggtttgctggatggatttatgacgatggagtttcactcttgttgcccaggctggagtgcaatggcacgatctcagctcactgcaacctctgcctcctgggttcaagcgattcttctgcctcagcctcccgagtagctgagattacaggcacacaccactatgcctggctaatttttttgtatttttagtagagatggggtttctctatgttggtcaggatggtctcgaactcctgacctcaggtaatccgcccaccttggcctcccaaagtgctgggattacaggcaagagccactgcacctggcccacagtttcttaatccatttgttgattgatgggcatatgggctggttccatatgtttgcaactgcaaattgtgagcactgtttaattctaagcttccttgtaggtaaggcaaaaagcaagcaaagtattttaggcaattcccataactaaagggaaattatttattatatttgtccatttgaaaagatattttttcatgttgtaaaaaatttattaaatgaatgctaacataaggattaataaacaacatgatcttaacattc

SEQ ID NO: 4753 - protein, 353 aa, Homo sapiens
MKIIFPILSNPVFRRTVKLLLCLLWIGYSQGTTHVLRFGGIFEYVESGPMGAEELAFRFAVNTINRNRTLLPNTTLTYDTQKINLYDSFEASKKACDQLSLGVAAIFGPSHSSSANAVQSICNALGVPHIQTRWKHQVSDNKDSFYVSLYPDFSSLSRAILDLVQFFKWKTVTVVYDDSTGLIRLQELIKAPSRYNLRLKIRQLPADTKDAKPLLKEMKRGKEFHVIFDCSHEMAAGILKQALAMGMMTEYYHYIFTTLDLFALDVEPYRYSGVNMTGFRILNTENTQVSSIIEKWSMERLQAPPKPDSGLLDGFMTMEFHSCCPGWSAMARSQLTATSASWVQAILLPQPPE

SEQ ID NO: 4754 - DNA, 2713 bp, Homo sapiens
gatttagctagtaatttaatgaaattcatcagttgattgtaagaagtccgcttacatacaccagtcattctctcagcaaatactcatggaaaataaaagcaatgttctccccataaataaatcctacttctttcttgcaactcaaggcgggctgtcagatcggttgcataatagatattggggagctcactggccgggagccttaagaggagagcagctatctcagtctttctcacttaatcttggcttcacgtcagaagctgtgcagcagtgcagtagaatagggcctggcaaaacctttgctagcaaagcgccttttgtgccgggctgtggctcgctatcgacatctcgtccgttaccaaggctgggtttcctactgatttccctcctcctctgctttcacaggctcgcgcggccggacattgtgggtgtgcgtgctggatttctcccggatgctctccgactaacatggatgtcccaccattccttgcagtggaaggttgttccttggcgcagtgagtgaagaacatgcagcgattgctaatgggtttgggaagcggagactccttcctctctctatgaccatgccgtgatcgtgtctgcggtcaccactcgacgcatcctcatttctacccgaacccaggagccgaacgctagatcggggaagtgggtgccgtgcgtgtgggcacagaaacaccatgaagattattttcccgattctaagtaatccagtcttcaggcgcaccgttaaactcctgctctgtttactgtggattggatattctcaaggaaccacacatgtattaagatttggtggtatttttgaatatgtggaatctggcccaatgggagctgaggaacttgcattcagatttgctgtgaacacaattaacagaaacagaacattgctacccaatactacccttacctatgatacccagaagataaacctttatgatagttttgaagcatccaagaaagcctgtgatcagctgtctcttggggtggctgccatcttcgggccttcacacagctcatcagcaaacgcagtgcagtccatctgcaatgctctgggagttccccacatacagacccgctggaagcaccaggtgtcagacaacaaagattccttctatgtcagtctctacccagacttctcttcactcagccgtgccattttagacctggtgcagtttttcaagtggaaaaccgtcacggttgtgtatgatgacagcactggtctcattcgtttgcaagagctcatcaaagctccatcaaggtataatcttcgactcaaaattcgtcagttacctgctgatacaaaggatgcaaaacccttactaaaagaaatgaaaagaggcaaggagtttcatgtaatctttgattgtagccatgaaatggcagcaggcattttaaaacaggcattagctatgggaatgatgacagaatactatcattatatctttaccactctggacctctttgctcttgatgttgagccctaccgatacagtggtgttaacatgacagggttcagaatattaaatacagaaaatacccaagtctcctccatcattgaaaagtggtcgatggaacgattgcaggcacctccgaaacccgattcaggtttgctggatggatttatgacgactgatgctgctctaatgtatgatgctgtgcatgtggtgtctgtggccgttcaacagtttccccagatgacagtcagttccttgcagtgtaatcgacataaaccctggcgcttcgggacccgctttatgagtctaattaaagaggcacattgggaaggcctcacaggcagaataactttcaacaaaaccaatggcttgagaacagattttgatttggatgtgatcagtctgaaggaagaaggtctagaaaagattggaacgtgggatccagccagtggcctgaatatgacagaaagtcaaaagggaaagccagcgaacatcacagattccttatccaatcgttctttgattgttaccaccattttggaagagccttatgtcctttttaagaagtctgacaaacctctctatggtaatgatcgatttgaaggctattgcattgatctcctcagagagttatctacaatccttggctttacatatgaaattagacttgtggaagatgggaaatatggagcccaggatgatgccaatggacaatggaatggaatggttcgtgaactaattgatcataaagctgaccttgcagttgctccactggctattacctatgttcgagagaaggtcatcgacttttccaagccctttatgacacttggaataagtattttgtaccgcaagcccaatggtacaaacccaggcgtcttctccttcctgaatcctctctcccctgatatctggatgtatattctgctggcttacttgggtgtcagttgtgtgctctttgtcatagccaggtaacatgctcacttttgtgatttttttggcaattgttacctcctttatctaactaataattgtcaaaagtcacaatcaattttactttttctgttctttattttccatggggtgctgagaaataatgaaattttaagaatcacattcatttattaaaatgtactgtcctgtctttgtgggcagagagcatgctggttgtgtcagtaagctataagtgttatagggattactgttttcttaaccagaatataaaagctttttaaatc

SEQ ID NO: 4755 - protein, 583 aa, Homo sapiens
MKIIFPILSNPVFRRTVKLLLCLLWIGYSQGTTHVLRFGGIFEYVESGPMGAEELAFRFAVNTINRNRTLLPNTTLTYDTQKINLYDSFEASKKACDQLSLGVAAIFGPSHSSSANAVQSICNALGVPHIQTRWKHQVSDNKDSFYVSLYPDFSSLSRAILDLVQFFKWKTVTVVYDDSTGLIRLQELIKAPSRYNLRLKIRQLPADTKDAKPLLKEMKRGKEFHVIFDCSHEMAAGILKQALAMGMMTEYYHYIFTTLDLFALDVEPYRYSGVNMTGFRILNTENTQVSSIIEKWSMERLQAPPKPDSGLLDGFMTTDAALMYDAVHVVSVAVQQFPQMTVSSLQCNRHKPWRFGTRFMSLIKEAHWEGLTGRITFNKTNGLRTDFDLDVISLKEEGLEKIGTWDPASGLNMTESQKGKPANITDSLSNRSLIVTTILEEPYVLFKKSDKPLYGNDRFEGYCIDLLRELSTILGFTYEIRLVEDGKYGAQDDANGQWNGMVRELIDHKADLAVAPLAITYVREKVIDFSKPFMTLGISILYRKPNGTNPGVFSFLNPLSPDIWMYILLAYLGVSCVLFVIAR

SEQ ID NO: 4756 - DNA, 4997 bp, Homo sapiens
gatttagctagtaatttaatgaaattcatcagttgattgtaagaagtccgcttacatacaccagtcattctctcagcaaatactcatggaaaataaaagcaatgttctccccataaataaatcctacttctttcttgcaactcaaggcgggctgtcagatcggttgcataatagatattggggagctcactggccgggagccttaagaggagagcagctatctcagtctttctcacttaatcttggcttcacgtcagaagctgtgcagcagtgcagtagaatagggcctggcaaaacctttgctagcaaagcgccttttgtgccgggctgtggctcgctatcgacatctcgtccgttaccaaggctgggtttcctactgatttccctcctcctctgctttcacaggctcgcgcggccggacattgtgggtgtgcgtgctggatttctcccggatgctctccgactaacatggatgtcccaccattccttgcagtggaaggttgttccttggcgcagtgagtgaagaacatgcagcgattgctaatgggtttgggaagcggagactccttcctctctctatgaccatgccgtgatcgtgtctgcggtcaccactcgacgcatcctcatttctacccgaacccaggagccgaacgctagatcggggaagtgggtgccgtgcgtgtgggcacagaaacaccatgaagattattttcccgattctaagtaatccagtcttcaggcgcaccgttaaactcctgctctgtttactgtggattggatattctcaaggaaccacacatgtattaagatttggtggtatttttgaatatgtggaatctggcccaatgggagctgaggaacttgcattcagatttgctgtgaacacaattaacagaaacagaacattgctacccaatactacccttacctatgatacccagaagataaacctttatgatagttttgaagcatccaagaaagcctgtgatcagctgtctcttggggtggctgccatcttcgggccttcacacagctcatcagcaaacgcagtgcagtccatctgcaatgctctgggagttccccacatacagacccgctggaagcaccaggtgtcagacaacaaagattccttctatgtcagtctctacccagacttctcttcactcagccgtgccattttagacctggtgcagtttttcaagtggaaaaccgtcacggttgtgtatgatgacagcactggtctcattcgtttgcaagagctcatcaaagctccatcaaggtataatcttcgactcaaaattcgtcagttacctgctgatacaaaggatgcaaaacccttactaaaagaaatgaaaagaggcaaggagtttcatgtaatctttgattgtagccatgaaatggcagcaggcattttaaaacaggcattagctatgggaatgatgacagaatactatcattatatctttaccactctggacctctttgctcttgatgttgagccctaccgatacagtggtgttaacatgacagggttcagaatattaaatacagaaaatacccaagtctcctccatcattgaaaagtggtcgatggaacgattgcaggcacctccgaaacccgattcaggtttgctggatggatttatgacgactgatgctgctctaatgtatgatgctgtgcatgtggtgtctgtggccgttcaacagtttccccagatgacagtcagttccttgcagtgtaatcgacataaaccctggcgcttcgggacccgctttatgagtctaattaaagaggcacattgggaaggcctcacaggcagaataactttcaacaaaaccaatggcttgagaacagattttgatttggatgtgatcagtctgaaggaagaaggtctagaaaagattggaacgtgggatccagccagtggcctgaatatgacagaaagtcaaaagggaaagccagcgaacatcacagattccttatccaatcgttctttgattgttaccaccattttggaagagccttatgtcctttttaagaagtctgacaaacctctctatggtaatgatcgatttgaaggctattgcattgatctcctcagagagttatctacaatccttggctttacatatgaaattagacttgtggaagatgggaaatatggagcccaggatgatgccaatggacaatggaatggaatggttcgtgaactaattgatcataaagctgaccttgcagttgctccactggctattacctatgttcgagagaaggtcatcgacttttccaagccctttatgacacttggaataagtattttgtaccgcaagcccaatggtacaaacccaggcgtcttctccttcctgaatcctctctcccctgatatctggatgtatattctgctggcttacttgggtgtcagttgtgtgctctttgtcatagccaggtttagtccttatgagtggtataatccacacccttgcaaccctgactcagacgtggtggaaaacaattttaccttgctaaatagtttctggtttggagttggagctctcatgcagcaaggttctgagctcatgcccaaagcactgtccaccaggatagtgggaggcatttggtggtttttcacacttatcatcatttcttcgtatactgctaacttagccgcctttctgacagtggaacgcatggaatcccctattgactctgctgatgatttagctaaacaaaccaagatagaatatggagcagtagaggatggtgcaaccatgacttttttcaagaaatcaaaaatctccacgtatgacaaaatgtgggcctttatgagtagcagaaggcagtcagtgctggtcaaaagtaatgaagaaggaatccagcgagtcctcacctctgattatgctttcctaatggagtcaacaaccatcgagtttgttacccagcggaactgtaacctgacacagattggcggccttatagactctaaaggttatggcgttggcactcccatgggttctccatatcgagacaaaattaccatagcaattcttcagctgcaagaggaaggcaaactgcatatgatgaaggagaaatggtggaggggcaatggttgcccagaagaggagagcaaagaggccagtgccctgggggttcagaatattggtggcatcttcattgttctggcagccggcttggtgctttcagtttttgtggcagtgggagaatttttatacaaatccaaaaaaaacgctcaattggaaaagaggtccttctgtagtgccatggtagaagaattgaggatgtccctgaagtgccagcgtcggttaaaacataagccacaggccccagttattgtgaaaacagaagaagttatcaacatgcacacatttaacgacagaaggttgccaggtaaagaaaccatggcataaagctgggaggccaaacacccaagcacaaactgtcgtctttttccaaacaatttagccagaatgtttcctgtggaaatatgcaacctgtgcaaaataaaatgagttacctcatgccgctgtgtctatgaactagagactctgtgatctaagcagttgcaatgatcagacttgatttacaagcatcatggatcaaccaagttacacggggttacactgttaatcatgggttcctcccttcttctgagtgaatgttaacatgcgcattttgtggctgatttcaaatgcagtccagtgagaaattacaggttccttttgaagctcaactgttgccaggagatggaatatcaatgcccaacagggcaaccaataaaagtgtcactaagaatataaatatttggaatcagcaaaaactgtagtgttacaggaaacagtacagtcttctgaacacccagatcatagaggtgatgatgttactagcccccaactactcagtataattattgtctgaatgcaaagtatgtgtttataggatgtgaaaaaatgtaatgcaaaacaaatttgaatcccatggcagttggaatataaagcagatgttcatcacttattttccttttttcttttcttatttttttttttgacagtctgtgtcactgattgagatagaaatgccaattatcaaggaaataatgttttcttaagttccctaaggcagaagatttaacatgcaattctaccagatcccttcctattcccccaacaccttttctctaacccccatatcccaaataataataataataataataataataataataataataataaaagcagttggttcagtgattctgaattaaaaggataatgttttgcaatgttcaagttgtaaaaactggccgagtattggctgtgtggaagactaaagctttcattctaacattcagacatagcaatccaaacccttgttcctgctgtaaatgaacttgatggagcatgggcagatttcagtgatacgagaaaggggactggtcatctatagaaaaatctgtgagagaacttggaagtggactgcgtttatcaatacagtcacaatgttaaatgaacaaaattcttgaacagttttttttcaaaaaatgttcaggtttatttgtggaaatgcaagatttctatgaaaatagtttttgtatggaaatttttgtaatactttttatcaacaaaacaagaacatgtgttcctgtcaggggtgtgatgtcaagcatgaatggtagtgcgtgtgcaccaccaacgtttggtgaaaactatttttatcaagaaaaaaggaatcatagaagagaaatattttcaagttagataatataaaagctaggtgcactaccaccactgcttaccatgccacacccctggtttccacgaggctgacaacatactgtaatgaacaattgtgtgtaaaatggtaaaagacacagacctcttgacaacattgtgataacagttgagtgcacacagtttgctgtttgaatccaatgcacaaaattaaaaaaaatcattaaaactatgttcattttactttca

SEQ ID NO: 4757 - protein, 908 aa, Homo sapiens; identical to SEQ ID NO: 586

SEQ ID NO: 4758 - DNA, 5084 bp, Homo sapiens
gatttagctagtaatttaatgaaattcatcagttgattgtaagaagtccgcttacatacaccagtcattctctcagcaaatactcatggaaaataaaagcaatgttctccccataaataaatcctacttctttcttgcaactcaaggcgggctgtcagatcggttgcataatagatattggggagctcactggccgggagccttaagaggagagcagctatctcagtctttctcacttaatcttggcttcacgtcagaagctgtgcagcagtgcagtagaatagggcctggcaaaacctttgctagcaaagcgccttttgtgccgggctgtggctcgctatcgacatctcgtccgttaccaaggctgggtttcctactgatttccctcctcctctgctttcacaggctcgcgcggccggacattgtgggtgtgcgtgctggatttctcccggatgctctccgactaacatggatgtcccaccattccttgcagtggaaggttgttccttggcgcagtgagtgaagaacatgcagcgattgctaatgggtttgggaagcggagactccttcctctctctatgaccatgccgtgatcgtgtctgcggtcaccactcgacgcatcctcatttctacccgaacccaggagccgaacgctagatcggggaagtgggtgccgtgcgtgtgggcacagaaacaccatgaagattattttcccgattctaagtaatccagtcttcaggcgcaccgttaaactcctgctctgtttactgtggattggatattctcaaggaaccacacatgtattaagatttggtggtatttttgaatatgtggaatctggcccaatgggagctgaggaacttgcattcagatttgctgtgaacacaattaacagaaacagaacattgctacccaatactacccttacctatgatacccagaagataaacctttatgatagttttgaagcatccaagaaagcctgtgatcagctgtctcttggggtggctgccatcttcgggccttcacacagctcatcagcaaacgcagtgcagtccatctgcaatgctctgggagttccccacatacagacccgctggaagcaccaggtgtcagacaacaaagattccttctatgtcagtctctacccagacttctcttcactcagccgtgccattttagacctggtgcagtttttcaagtggaaaaccgtcacggttgtgtatgatgacagcactggtctcattcgtttgcaagagctcatcaaagctccatcaaggtataatcttcgactcaaaattcgtcagttacctgctgatacaaaggatgcaaaacccttactaaaagaaatgaaaagaggcaaggagtttcatgtaatctttgattgtagccatgaaatggcagcaggcattttaaaacaggcattagctatgggaatgatgacagaatactatcattatatctttaccactctggacctctttgctcttgatgttgagccctaccgatacagtggtgttaacatgacagggttcagaatattaaatacagaaaatacccaagtctcctccatcattgaaaagtggtcgatggaacgattgcaggcacctccgaaacccgattcaggtttgctggatggatttatgacgactgatgctgctctaatgtatgatgctgtgcatgtggtgtctgtggccgttcaacagtttccccagatgacagtcagttccttgcagtgtaatcgacataaaccctggcgcttcgggacccgctttatgagtctaattaaagaggcacattgggaaggcctcacaggcagaataactttcaacaaaaccaatggcttgagaacagattttgatttggatgtgatcagtctgaaggaagaaggtctagaaaagattggaacgtgggatccagccagtggcctgaatatgacagaaagtcaaaagggaaagccagcgaacatcacagattccttatccaatcgttctttgattgttaccaccattttggaagagccttatgtcctttttaagaagtctgacaaacctctctatggtaatgatcgatttgaaggctattgcattgatctcctcagagagttatctacaatccttggctttacatatgaaattagacttgtggaagatgggaaatatggagcccaggatgatgccaatggacaatggaatggaatggttcgtgaactaattgatcataaagctgaccttgcagttgctccactggctattacctatgttcgagagaaggtcatcgacttttccaagccctttatgacacttggaataagtattttgtaccgcaagcccaatggtacaaacccaggcgtcttctccttcctgaatcctctctcccctgatatctggatgtatattctgctggcttacttgggtgtcagttgtgtgctctttgtcatagccaggtttagtccttatgagtggtataatccacacccttgcaaccctgactcagacgtggtggaaaacaattttaccttgctaaatagtttctggtttggagttggagctctcatgcagcaaggttctgagctcatgcccaaagcactgtccaccaggatagtgggaggcatttggtggtttttcacacttatcatcatttcttcgtatactgctaacttagccgcctttctgacagtggaacgcatggaatcccctattgactctgctgatgatttagctaaacaaaccaagatagaatatggagcagtagaggatggtgcaaccatgacttttttcaagaaatcaaaaatctccacgtatgacaaaatgtgggcctttatgagtagcagaaggcagtcagtgctggtcaaaagtaatgaagaaggaatccagcgagtcctcacctctgattatgctttcctaatggagtcaacaaccatcgagtttgttacccagcggaactgtaacctgacacagattggcggccttatagactctaaaggttatggcgttggcactcccatgggttctccatatcgagacaaaattaccatagcaattcttcagctgcaagaggaaggcaaactgcatatgatgaaggagaaatggtggaggggcaatggttgcccagaagaggagagcaaagaggccagtgccctgggggttcagaatattggtggcatcttcattgttctggcagccggcttggtgctttcagtttttgtggcagtgggagaatttttatacaaatccaaaaaaaacgctcaattggaaaaggaatcttctatttggttagtgccaccataccatccagacactgtttagtaatcttttgaaacttactaaaagaggtttttaataatgaggtccttctgtagtgccatggtagaagaattgaggatgtccctgaagtgccagcgtcggttaaaacataagccacaggccccagttattgtgaaaacagaagaagttatcaacatgcacacatttaacgacagaaggttgccaggtaaagaaaccatggcataaagctgggaggccaaacacccaagcacaaactgtcgtctttttccaaacaatttagccagaatgtttcctgtggaaatatgcaacctgtgcaaaataaaatgagttacctcatgccgctgtgtctatgaactagagactctgtgatctaagcagttgcaatgatcagacttgatttacaagcatcatggatcaaccaagttacacggggttacactgttaatcatgggttcctcccttcttctgagtgaatgttaacatgcgcattttgtggctgatttcaaatgcagtccagtgagaaattacaggttccttttgaagctcaactgttgccaggagatggaatatcaatgcccaacagggcaaccaataaaagtgtcactaagaatataaatatttggaatcagcaaaaactgtagtgttacaggaaacagtacagtcttctgaacacccagatcatagaggtgatgatgttactagcccccaactactcagtataattattgtctgaatgcaaagtatgtgtttataggatgtgaaaaaatgtaatgcaaaacaaatttgaatcccatggcagttggaatataaagcagatgttcatcacttattttccttttttcttttcttatttttttttttgacagtctgtgtcactgattgagatagaaatgccaattatcaaggaaataatgttttcttaagttccctaaggcagaagatttaacatgcaattctaccagatcccttcctattcccccaacaccttttctctaacccccatatcccaaataataataataataataataataataataataataataataaaagcagttggttcagtgattctgaattaaaaggataatgttttgcaatgttcaagttgtaaaaactggccgagtattggctgtgtggaagactaaagctttcattctaacattcagacatagcaatccaaacccttgttcctgctgtaaatgaacttgatggagcatgggcagatttcagtgatacgagaaaggggactggtcatctatagaaaaatctgtgagagaacttggaagtggactgcgtttatcaatacagtcacaatgttaaatgaacaaaattcttgaacagttttttttcaaaaaatgttcaggtttatttgtggaaatgcaagatttctatgaaaatagtttttgtatggaaatttttgtaatactttttatcaacaaaacaagaacatgtgttcctgtcaggggtgtgatgtcaagcatgaatggtagtgcgtgtgcaccaccaacgtttggtgaaaactatttttatcaagaaaaaaggaatcatagaagagaaatattttcaagttagataatataaaagctaggtgcactaccaccactgcttaccatgccacacccctggtttccacgaggctgacaacatactgtaatgaacaattgtgtgtaaaatggtaaaagacacagacctcttgacaacattgtgataacagttgagtgcacacagtttgctgtttgaatccaatgcacaaaattaaaaaaaatcattaaaactatgttcattttactttca

SEQ ID NO: 4759 - protein, 869 aa, Homo sapiens; identical to SEQ ID NO: 588

SEQ ID NO: 4760 - DNA, 5129 bp, Homo sapiens
gatttagctagtaatttaatgaaattcatcagttgattgtaagaagtccgcttacatacaccagtcattctctcagcaaatactcatggaaaataaaagcaatgttctccccataaataaatcctacttctttcttgcaactcaaggcgggctgtcagatcggttgcataatagatattggggagctcactggccgggagccttaagaggagagcagctatctcagtctttctcacttaatcttggcttcacgtcagaagctgtgcagcagtgcagtagaatagggcctggcaaaacctttgctagcaaagcgccttttgtgccgggctgtggctcgctatcgacatctcgtccgttaccaaggctgggtttcctactgatttccctcctcctctgctttcacaggctcgcgcggccggacattgtgggtgtgcgtgctggatttctcccggatgctctccgactaacatggatgtcccaccattccttgcagtggaaggttgttccttggcgcagtgagtgaagaacatgcagcgattgctaatgggtttgggaagcggagactccttcctctctctatgaccatgccgtgatcgtgtctgcggtcaccactcgacgcatcctcatttctacccgaacccaggagccgaacgctagatcggggaagtgggtgccgtgcgtgtgggcacagaaacaccatgaagattattttcccgattctaagtaatccagtcttcaggcgcaccgttaaactcctgctctgtttactgtggattggatattctcaaggaaccacacatgtattaagatttggtggtatttttgaatatgtggaatctggcccaatgggagctgaggaacttgcattcagatttgctgtgaacacaattaacagaaacagaacattgctacccaatactacccttacctatgatacccagaagataaacctttatgatagttttgaagcatccaagaaagcctgtgatcagctgtctcttggggtggctgccatcttcgggccttcacacagctcatcagcaaacgcagtgcagtccatctgcaatgctctgggagttccccacatacagacccgctggaagcaccaggtgtcagacaacaaagattccttctatgtcagtctctacccagacttctcttcactcagccgtgccattttagacctggtgcagtttttcaagtggaaaaccgtcacggttgtgtatgatgacagcactggtctcattcgtttgcaagagctcatcaaagctccatcaaggtataatcttcgactcaaaattcgtcagttacctgctgatacaaaggatgcaaaacccttactaaaagaaatgaaaagaggcaaggagtttcatgtaatctttgattgtagccatgaaatggcagcaggcattttaaaacaggcattagctatgggaatgatgacagaatactatcattatatctttaccactctggacctctttgctcttgatgttgagccctaccgatacagtggtgttaacatgacagggttcagaatattaaatacagaaaatacccaagtctcctccatcattgaaaagtggtcgatggaacgattgcaggcacctccgaaacccgattcaggtttgctggatggatttatgacgactgatgctgctctaatgtatgatgctgtgcatgtggtgtctgtggccgttcaacagtttccccagatgacagtcagttccttgcagtgtaatcgacataaaccctggcgcttcgggacccgctttatgagtctaattaaagaggcacattgggaaggcctcacaggcagaataactttcaacaaaaccaatggcttgagaacagattttgatttggatgtgatcagtctgaaggaagaaggtctagaaaagattggaacgtgggatccagccagtggcctgaatatgacagaaagtcaaaagggaaagccagcgaacatcacagattccttatccaatcgttctttgattgttaccaccattttggaagagccttatgtcctttttaagaagtctgacaaacctctctatggtaatgatcgatttgaaggctattgcattgatctcctcagagagttatctacaatccttggctttacatatgaaattagacttgtggaagatgggaaatatggagcccaggatgatgccaatggacaatggaatggaatggttcgtgaactaattgatcataaagctgaccttgcagttgctccactggctattacctatgttcgagagaaggtcatcgacttttccaagccctttatgacacttggaataagtattttgtaccgcaagcccaatggtacaaacccaggcgtcttctccttcctgaatcctctctcccctgatatctggatgtatattctgctggcttacttgggtgtcagttgtgtgctctttgtcatagccaggtttagtccttatgagtggtataatccacacccttgcaaccctgactcagacgtggtggaaaacaattttaccttgctaaatagtttctggtttggagttggagctctcatgcagcaaggttctgagctcatgcccaaagcactgtccaccaggatagtgggaggcatttggtggtttttcacacttatcatcatttcttcgtatactgctaacttagccgcctttctgacagtggaacgcatggaatcccctattgactctgctgatgatttagctaaacaaaccaagatagaatatggagcagtagaggatggtgcaaccatgacttttttcaagaaatcaaaaatctccacgtatgacaaaatgtgggcctttatgagtagcagaaggcagtcagtgctggtcaaaagtaatgaagaaggaatccagcgagtcctcacctctgattatgctttcctaatggagtcaacaaccatcgagtttgttacccagcggaactgtaacctgacacagattggcggccttatagactctaaaggttatggcgttggcactcccatgggttctccatatcgagacaaaattaccatagcaattcttcagctgcaagaggaaggcaaactgcatatgatgaaggagaaatggtggaggggcaatggttgcccagaagaggagagcaaagaggccagtgccctgggggttcagaatattggtggcatcttcattgttctggcagccggcttggtgctttcagtttttgtggcagtgggagaatttttatacaaatccaaaaaaaacgctcaattggaaaagagagccaagactaagttacctcaagactatgtattcctccctattttggagtcagtttccatttctacagtgttgtcatcatcaccatcttcatcatcattatcatcatgttcttaataagtacatctaataaggtccttctgtagtgccatggtagaagaattgaggatgtccctgaagtgccagcgtcggttaaaacataagccacaggccccagttattgtgaaaacagaagaagttatcaacatgcacacatttaacgacagaaggttgccaggtaaagaaaccatggcataaagctgggaggccaaacacccaagcacaaactgtcgtctttttccaaacaatttagccagaatgtttcctgtggaaatatgcaacctgtgcaaaataaaatgagttacctcatgccgctgtgtctatgaactagagactctgtgatctaagcagttgcaatgatcagacttgatttacaagcatcatggatcaaccaagttacacggggttacactgttaatcatgggttcctcccttcttctgagtgaatgttaacatgcgcattttgtggctgatttcaaatgcagtccagtgagaaattacaggttccttttgaagctcaactgttgccaggagatggaatatcaatgcccaacagggcaaccaataaaagtgtcactaagaatataaatatttggaatcagcaaaaactgtagtgttacaggaaacagtacagtcttctgaacacccagatcatagaggtgatgatgttactagcccccaactactcagtataattattgtctgaatgcaaagtatgtgtttataggatgtgaaaaaatgtaatgcaaaacaaatttgaatcccatggcagttggaatataaagcagatgttcatcacttattttccttttttcttttcttatttttttttttgacagtctgtgtcactgattgagatagaaatgccaattatcaaggaaataatgttttcttaagttccctaaggcagaagatttaacatgcaattctaccagatcccttcctattcccccaacaccttttctctaacccccatatcccaaataataataataataataataataataataataataataataaaagcagttggttcagtgattctgaattaaaaggataatgttttgcaatgttcaagttgtaaaaactggccgagtattggctgtgtggaagactaaagctttcattctaacattcagacatagcaatccaaacccttgttcctgctgtaaatgaacttgatggagcatgggcagatttcagtgatacgagaaaggggactggtcatctatagaaaaatctgtgagagaacttggaagtggactgcgtttatcaatacagtcacaatgttaaatgaacaaaattcttgaacagttttttttcaaaaaatgttcaggtttatttgtggaaatgcaagatttctatgaaaatagtttttgtatggaaatttttgtaatactttttatcaacaaaacaagaacatgtgttcctgtcaggggtgtgatgtcaagcatgaatggtagtgcgtgtgcaccaccaacgtttggtgaaaactatttttatcaagaaaaaaggaatcatagaagagaaatattttcaagttagataatataaaagctaggtgcactaccaccactgcttaccatgccacacccctggtttccacgaggctgacaacatactgtaatgaacaattgtgtgtaaaatggtaaaagacacagacctcttgacaacattgtgataacagttgagtgcacacagtttgctgtttgaatccaatgcacaaaattaaaaaaaatcattaaaactatgttcattttactttca

SEQ ID NO: 4761 - protein, 892 aa, Homo sapiens
MKIIFPILSNPVFRRTVKLLLCLLWIGYSQGTTHVLRFGGIFEYVESGPMGAEELAFRFAVNTINRNRTLLPNTTLTYDTQKINLYDSFEASKKACDQLSLGVAAIFGPSHSSSANAVQSICNALGVPHIQTRWKHQVSDNKDSFYVSLYPDFSSLSRAILDLVQFFKWKTVTVVYDDSTGLIRLQELIKAPSRYNLRLKIRQLPADTKDAKPLLKEMKRGKEFHVIFDCSHEMAAGILKQALAMGMMTEYYHYIFTTLDLFALDVEPYRYSGVNMTGFRILNTENTQVSSIIEKWSMERLQAPPKPDSGLLDGFMTTDAALMYDAVHVVSVAVQQFPQMTVSSLQCNRHKPWRFGTRFMSLIKEAHWEGLTGRITFNKTNGLRTDFDLDVISLKEEGLEKIGTWDPASGLNMTESQKGKPANITDSLSNRSLIVTTILEEPYVLFKKSDKPLYGNDRFEGYCIDLLRELSTILGFTYEIRLVEDGKYGAQDDANGQWNGMVRELIDHKADLAVAPLAITYVREKVIDFSKPFMTLGISILYRKPNGTNPGVFSFLNPLSPDIWMYILLAYLGVSCVLFVIARFSPYEWYNPHPCNPDSDVVENNFTLLNSFWFGVGALMQQGSELMPKALSTRIVGGIWWFFTLIIISSYTANLAAFLTVERMESPIDSADDLAKQTKIEYGAVEDGATMTFFKKSKISTYDKMWAFMSSRRQSVLVKSNEEGIQRVLTSDYAFLMESTTIEFVTQRNCNLTQIGGLIDSKGYGVGTPMGSPYRDKITIAILQLQEEGKLHMMKEKWWRGNGCPEEESKEASALGVQNIGGIFIVLAAGLVLSVFVAVGEFLYKSKKNAQLEKRAKTKLPQDYVFLPILESVSISTVLSSSPSSSSLSSCS

SEQ ID NO: 4762 - DNA, 517 bp, Homo sapiens
cggaaagtaaaaagaacaaacttgttttatacaaaatcagatgctccaaatggtcagttgatgatgataccaatcaaagaaaactaaggaggaagaaaaagaaaacaggaaagagaggaggcaacaggaaaatcggccttcgtccttcagtctacgcttgaaattgccagggatggataaatctgaagatgaatgaaaaaaagaaactactgggaacggaacagaaacaaaaaaaaaggatgggaaatctgaagctgctatttcttattctgatcttaatagcaggatacagttgaataataacattatctattggagatcactgaaatgtagggagggaattccattttgaaaactttaatatgtagagagtcagtacatcattttcacaagcaatatccttagaagaaaggattttttttagaactatcatgctacagaaaactgcatttttatagtaactgaaagatgcaaagttactgaaaaaataaaactgccattttattgtattgccatt

SEQ ID NO: 4763 - protein, 35 aa, Homo sapiens
MNEKKKLLGTEQKQKKRMGNLKLLFLILILIAGYS

SEQ ID NO: 4764 - DNA, 2001 bp, Homo sapiens
ctttgtttttctcacgtatcaatacctataggtaagtctattgattgtactgttgcagagccttgttttctgcaaaacgttggcaatgtgttatttgaaaccagatgttttcttaagaaataaacctgctaaacttgtttcctgtggaaactggaaatttgttttattttatagtttaaaatgccataaatgcaagatcttccattggttgaatcaatatagccttctaaatgtgatttctggttctaaatgtgtgcctgttctaaatggttctaaatgctgacacccgaaaacctttttgcatatattcacatacgactatgactatttctgcagtaattattattgagacttactataataatgataaggctgtatataaattataccttactaaaaatttaaaatctaggaatttactgagagagcataaagtatggttgtaatagagaaaacaaatgattgaaatggcgtaaatgcaagcctttaatattaattttgagtattttaatgcaaataaaaccaattatgacagtgtgctcaaattggtaaacaaccaatctgtgactttatgaaaatatatttatgacagtcatacttgccttactcttaagtgtagtatttgtccttaagttgggagcaccataaattaattttaaagcaaaacatatgaccctcatccaatgttttaaatgaattgcttcctactaggaaaacaaaacatctcaggacatcaaatacttctagtaatcaagatgttttgtttaaatttgctaatgtaaacttcaactctatttggttgcactttaaaaaagcatactagaaaatggggaatatttgaaacatgcatttttaaaagctaggtgttatcttactcagaagatgttaaaagcttctttatacattttatttgaaagtaatttccaaaaaagggatgcttggtgggtatatgaaaaggtgttcagtatcactaatcatcagggaaatacatatcaaaaccataatggaatattacctcacagctgttaggatggcttttatcaaaaagacaaaaaataacaagtattagtgagactgtggaagagaaggaaccctcacacaccactgataggaatgtatatcagtataggcattattaaaaacattatggagattcttcaaaaatgtaaaactaagaatactatataatcaaacaatcccacttctgggtatatatccaaaggaaatgagatccatgtataaaagagatatgtactctcccatatccattgcagatttactcacaacagtgaagatactgaaacaatataaatgttcattgatggaaaagaatacagctggaggcatcatgctacctgacttcaaactacactacaaggctacagtaaccaaaacagcatggtactggtaccaaaacagacatatcgaccaatggagcagaacagagacctcagaaataaaacaacatgtctacaaccatttgatctttgacaaacctgacaaaaacaagaaatggggaaaggatctcctattcagtaaatggtgctgggaaaactggctagccatatgcagaaaactgaaactggaccccttccttacaccttatatgaaaattaactcaagatggattaaagacttaaatgtaaaactgaaaaccataaaaatcctggaagaaaacctaggcaataccattcaggacatagggatgggcaaagacttcatgatgaaaacaccaaaagcaattgcaacaaaagccaaaattgacaagtgggatttaattaaattaaagagcttcttcacagcaaaagaaataatcatcagagtgaacaggcaacctacagagtggaagaaaatttttgcaatctacccatctgacaaaggtctaatatccagaatttaaaaggaacttaaacatatttacaagaaaaaaaaaacaaccttatcaaaacataggcaaaggatatgaatggacacttctctaaagaagacatttacatggcc

SEQ ID NO: 4765 - protein, 224 aa, Homo sapiens
MRSMYKRDMYSPISIADLLTTVKILKQYKCSLMEKNTAGGIMLPDFKLHYKATVTKTAWYWYQNRHIDQWSRTETSEIKQHVYNHLIFDKPDKNKKWGKDLLFSKWCWENWLAICRKLKLDPFLTPYMKINSRWIKDLNVKLKTIKILEENLGNTIQDIGMGKDFMMKTPKAIATKAKIDKWDLIKLKSFFTAKEIIIRVNRQPTEWKKIFAIYPSDKGLISRI

SEQ ID NO: 4766 - DNA, 8192 bp, Homo sapiens
cagcgactcctctggctcccgagaagtggatccggtcgcggccactacgatgccgggagccgccggggtcctcctccttctgctgctctccggaggcctcgggggcgtacaggcgcagcggccgcagcagcagcggcagtcacaggcacatcagcaaagaggtttattccctgctgtcctgaatcttgcttctaatgctcttatcacgaccaatgcaacatgtggagaaaaaggacctgaaatgtactgcaaattggtagaacatgtccctgggcagcctgtgaggaacccgcagtgtcgaatctgcaatcaaaacagcagcaatccaaaccagagacacccgattacaaatgctattgatggaaagaacacttggtggcagagtcccagtattaagaatggaatcgaataccattatgtgacaattaccctggatttacagcaggtgttccagatcgcgtatgtgattgtgaaggcagctaactccccccggcctggaaactggattttggaacgctctcttgatgatgttgaatacaagccctggcagtatcatgctgtgacagacacggagtgcctaacgctttacaatatttatccccgcactgggccaccgtcatatgccaaagatgatgaggtcatctgcacttcattttactccaagatacaccccttagaaaatggagagattcacatctctttaatcaatgggagaccaagtgccgatgatccttctccagaactgctagaatttacctccgctcgctatattcgcctgagatttcagaggatccgcacactgaatgctgacttgatgatgtttgctcacaaagacccaagagaaattgaccccattgtcaccagaagatattactactcggtcaaggatatttcagttggagggatgtgcatctgctatggtcatgccagggcttgtccacttgatccagcgacaaataaatctcgctgtgagtgtgagcataacacatgtggcgatagctgtgatcagtgctgtccaggattccatcagaaaccctggagagctggaacttttctaactaaaactgaatgtgaagcatgcaattgtcatggaaaagctgaagaatgctattatgatgaaaatgttgccagaagaaatctgagtttgaatatacgtggaaagtacattggagggggtgtctgcattaattgtacccaaaacactgctggtataaactgcgagacatgtactgatggcttcttcagacccaaaggggtatctccaaattatccaaggccatgccagccatgtcattgcgatccaattggttccttaaatgaagtctgtgtcaaggatgagaaacatgctcgacgaggtttggcacctggatcctgtcattgcaaaactggttttggaggtgtgagctgtgatcggtgtgccaggggctacactggctacccggactgcaaagcctgtaactgcagtgggttagggagcaaaaatgaggatccttgttttggcccctgtatctgcaaggaaaatgttgaaggaggagactgtagtcgttgcaaatccggcttcttcaatttgcaagaggataattggaaaggctgcgatgagtgtttctgttcaggggtttcaaacagatgtcagagttcctactggacctatggcaaaatacaagatatgagtggctggtatctgactgaccttcctggccgcattcgagtggctccccagcaggacgacttggactcacctcagcagatcagcatcagtaacgcggaggcccggcaagccctgccgcacagctactactggagcgcgccggctccctatctgggaaacaaactcccagcagtaggaggacagttgacatttaccatatcatatgaccttgaagaagaggaagaagatacagaacgtgttctccagcttatgattatcttagagggtaatgacttgagcatcagcacagcccaagatgaggtgtacctgcacccatctgaagaacatactaatgtattgttacttaaagaagaatcatttaccatacatggcacacattttccagtccgtagaaaggaatttatgacagtgcttgcgaatttgaagagagtcctcctacaaatcacatacagctttgggatggatgccatcttcaggttgagctctgttaaccttgaatccgctgtctcctatcctactgatggaagcattgcagcagctgtagaagtgtgtcagtgcccaccagggtatactggctcctcttgtgaatcttgttggcctaggcacaggcgagttaacggcactatttttggtggcatctgtgagccatgtcagtgctttggtcatgcggagtcctgtgatgacgtcactggagaatgcctgaactgtaaggatcacacaggtggcccatattgtgataaatgtcttcctggtttctatggcgagcctactaaaggaacctctgaagactgtcaaccctgtgcctgtccactcaatatcccatccaataactttagcccaacgtgccatttagaccggagtcttggattgatctgtgatggatgccctgtcgggtacacaggaccacgctgtgagaggtgtgcagaaggctattttggacaaccctctgtacctggaggatcatgtcagccatgccaatgcaatgacaaccttgacttctccatccctggcagctgtgacagcttgtctggctcctgtctgatatgtaaaccaggtacaacaggccggtactgtgagctctgtgctgatggatattttggagatgcagttgatgcgaagaactgtcagccctgtcgctgtaatgccggtggctctttctctgaggtttgccacagtcaaactggacagtgtgagtgcagagccaacgttcagggtcagagatgtgacaaatgcaaggctgggacctttggcctacaatcagcaaggggctgtgttccctgcaactgcaattcttttgggtctaagtcattcgactgtgaagagagtggacaatgttggtgccaacctggagtcacagggaagaaatgtgaccgctgtgcccacggctatttcaacttccaagaaggaggctgcacagcttgtgaatgttctcatctgggtaataattgtgacccaaagactgggcgatgcatttgccctcccaataccattggagagaaatgttctaaatgtgcacccaatacctggggccacagcattaccactggttgtaaggcttgtaactgcagcacagtgggatccttggatttccaatgcaatgtaaatacaggccaatgcaactgtcatccaaaattctctggtgcaaaatgtacagagtgcagtcgaggtcactggaactaccctcgctgcaatctctgtgactgcttcctccctgggacagatgccacaacctgtgattcagagactaaaaaatgctcctgtagtgatcaaactgggcagtgcacttgtaaggtgaatgtggaaggcatccactgtgacagatgccggcctggcaaattcggactcgatgccaagaatccacttggctgcagcagctgctattgcttcggcactactacccagtgctctgaagcaaaaggactgatccggacgtgggtgactctgaaggctgagcagaccattctacccctggtagatgaggctctgcagcacacgaccaccaagggcattgtttttcaacatccagagattgttgcccacatggacctgatgagagaagatctccatttggaacctttttattggaaacttccagaacaatttgaaggaaagaagttgatggcctatgggggcaaactcaagtatgcaatctatttcgaggctcgggaagaaacaggtttctctacatataatcctcaagtgatcattcgaggtgggacacctactcatgctagaattatcgtcaggcatatggctgctcctctgattggccaattgacaaggcatgaaattgaaatgacagagaaagaatggaaatattatggggatgatcctcgagtccatagaactgtgacccgagaagacttcttggatatactatatgatattcattacattcttatcaaagctacttatggaaatttcatgcgacaaagcaggatttctgaaatctcaatggaggtagctgaacaaggacgtggaacaacaatgactcctccagctgacttgattgaaaaatgtgattgtcccctgggctattctggcctgtcctgtgaggcatgcttgccgggattttatcgactgcgttctcaaccaggtggccgcacccctggaccaaccctgggcacctgtgttccatgtcaatgtaatggacacagcagcctgtgtgaccctgaaacatcgatatgccagaattgtcaacatcacactgctggtgacttctgtgaacgatgtgctcttggatactatggaattgtcaagggattgccaaatgactgtcagcaatgtgcctgccctctgatttcttccagtaacaatttcagcccctcttgtgtcgcagaaggacttgacgactaccgctgcacggcttgtccacggggatatgaaggccagtactgtgaaaggtgtgcccctggctatactggcagtccaggcaaccctggaggctcctgccaagaatgtgagtgtgatccctatggctcactgcctgtgccctgtgaccctgtcacaggattctgcacgtgccgacctggagccacgggaaggaagtgtgacggctgcaagcactggcatgcacgcgagggctgggagtgtgttttttgtggagatgagtgcactggccttcttctcggtgacttggctcgcctggagcagatggtcatgagcatcaacctcactggtccgctgcctgcgccatataaaatgctgtatggtcttgaaaatatgactcaggagctaaagcacttgctgtcacctcagcgggccccagagaggcttattcagctggcagagggcaatctgaatacactcgtgaccgaaatgaacgagctgctgaccagggctaccaaagtgacagcagatggcgagcagaccggacaggatgctgagaggaccaacacaagagcaaagtccctgggagaattcattaaggagcttgcccgggatgcagaagctgtaaatgaaaaagctataaaactaaatgaaactctaggaactcgagacgaggcctttgagagaaatttggaagggcttcagaaagagattgaccagatgattaaagaactgaggaggaaaaatctagagacacaaaaggaaattgctgaagatgagttggtagctgcagaagcccttctgaaaaaagtgaagaagctgtttggagagtcccggggggaaaatgaagaaatggagaaggatctccgggaaaaactggctgactacaaaaacaaagttgatgatgcttgggaccttttgagagaagccacagataaaatcagagaagctaatcgcctatttgcagtaaatcagaaaaacatgactgcattggagaaaaagaaggaggctgttgaaagcggcaaacgacaaattgagaacactttaaaagagggcaatgacatactcgatgaagccaaccgtcttgcagatgaaatcaactccatcatagactatgttgaagacatccaaactaaattgccacctatgtctgaggagcttaatgataaaatagatgacctctcccaagaaataaaggacaggaagcttgctgagaaggtgtcccaggctgagagccacgcagctcagttgaatgactcatctgctgtccttgatggaatccttgatgaggctaaaaacatctccttcaatgccactgcagccttcaaagcttacagcaatattaaggactatattgatgaagctgagaaagttgccaaagaagccaaagatcttgcacatgaagctacaaaactggcaacaggtcctcggggtttattaaaggaagatgccaaaggctgtcttcagaaaagcttcaggattcttaacgaagccaagaagttagcaaatgatgtaaaagaaaatgaagaccatctaaatggcttaaaaaccaggatagaaaatgctgatgctagaaatggggatctcttgagaactttgaatgacactttgggaaagttatcagctattccaaatgatacagctgctaaactgcaagctgttaaggacaaagccagacaagccaacgacacagctaaagatgtactggcacagattacagagctccaccagaacctcgatggcctgaagaagaattacaataaactagcagacagcgtcgccaaaacgaatgctgtggttaaagatccttccaagaacattctatgcagttgccgatgcagatgccactgtcaaaaatttagaacaggaagctgaccggctaatagataaactcaaacccatcaaggaacttgaggataacctaaagaaaaacatctctgagataaaggaattgataaaccaagctcggaaacaagccaattctatcaaagtatctgtgtcttcaggaggtgactgcattcgaacatacaaaccagaaatcaagaaaggaagttacaataatattgttgtcaacgtaaagacagctgttgctgataacctcctcttttatcttggaagtgccaaatttattgactttctggctatagaaatgcgtaaaggcaaagtcagcttcctctgggatgttggatctggagttggacgtgtagagtacccagatttgactattgatgactcatattggtaccgtatcgtagcatcaagaactgggagaaatggaactatttctgtgagagccctggatggacccaaagccagcattgtgcccagcacacaccattcgacgtctcctccagggtacacgattctagatgtggatgcaaatgcaatgctgtttgttggtggcctgactgggaaattaaagaaggctgatgctgtacgtgtgattacattcactggctgcatgggagaaacatactttgacaacaaacctataggtttgtggaatttccgagaaaaagaaggtgactgcaaaggatgcactgtcagtcctcaggtggaagatagtgaggggactattcaatttgatggagaaggttatgcattggtcagccgtcccattcgctggtaccccaacatctccactgtcatgttcaagttcagaacattttcttcgagtgctcttctgatgtatcttgccacacgagacctgagagatttcatgagtgtggagctcactgatgggcacataaaagtcagttacgatctgggctcaggaatggcttccgttgtcagcaatcaaaaccataatgatgggaaatggaaatcattcactctgtcaagaattcaaaaacaagccaatatatcaattgtagatatagatactaatcaggaggagaatatagcaacttcgtcttctggaaacaactttggtcttgacttgaaagcagatgacaaaatatattttggtggcctgccaacgctgagaaacttgaggccagaagtaaatctgaagaaatattccggctgcctcaaagatattgaaatttcaagaactccgtacaatatactcagtagtcccgattatgttggtgttaccaaaggatgttccctggagaatgtttacacagttagctttcctaagcctggttttgtggagctctcccctgtgccaattgatgtaggaacagaaatcaacctgtcattcagcaccaagaatgagtccggcatcattcttttgggaagtggagggacaccagcaccacctaggagaaaacgaaggcagactggacaggcctattatgcaatactcctcaacaggggccgtctggaagtgcatctctccacaggggcacgaacaatgaggaaaattgtgatcagaccagagccgaatctgtttcatgatggaagagaacattccgttcatgtagagcgaactagaggcatctttacagttcaagtggatgaaaacagaagatacatgcaaaacctgacagttgaacagcctatcgaagttaaaaagcttttcgttgggggtgctccacctgaatttcaaccttccccactcagaaatattcctccttttgaaggctgcatatggaatcttgttattaactctgtccccatggactttgcaaggcctgtgtccttcaaaaatgctgacattggtcgctgtgcccatcagaaactccgtgaa

SEQ ID NO: 4767 - protein, 2107 aa, Homo sapiens [sequence omitted]

SEQ ID NO: 4768 - DNA, 892 bp, Homo sapiens
agcagtcccactggggctccacagttagtgcctatctggaagctcctggatctgagttctctactccaattctcctgagagcagaagcaaacttatatatgaatcatataccttaatcctctacactaaactttctggaatttcctgatgtcgcacctgcaaagccacaagaggacggtcattgattcacaactaacttttcaggaaagggaagaaatcattaaatcctgcaattccaggagtcattttattctccatggagctccagcattgctgtcagagcagttcctcctcatggccgattggggagttcagagcctgtgcattaagctgtcaggttgggagagcattgaggagtcatcttcatgccaaatcatcttatttagccaaataccattgaaacatttgagttctttcctggacctggacctggccaaatacctaaagccattaacagatcttctccctcaaagaaggcatgtaaatgttttacattattgtcaaactgtaaacaataatgaaccagctctttaggtaaaagaagttaaacaatactactactaataataatttgcctctataaagggactttttccaaactctcgaggaaccagctgtagctgggtagcatccttccctcaggagtctgagaacacattctgaggggcccctgttctgtgcttctaggttctgataattcaaccactacttctttccccaatctagggaggtagatgcctcctacagttactattagtagtaacctcatcagggtttttttggtttattttttgtttgtttacaaatgctttttgctctttaagttttcaaatgtattttaaactaattttctaaattaacttctttctgttgaaataaaaattttccattc

SEQ ID NO: 4769 - protein, 128 aa, Homo sapiens
MSHLQSHKRTVIDSQLTFQEREEIIKSCNSRSHFILHGAPALLSEQFLLMADWGVQSLCIKLSGWESIEESSSCQIILFSQIPLKHLSSFLDLDLAKYLKPLTDLLPQRRHVNVLHYCQTVNNNEPAL

SEQ ID NO: 4770 - DNA, 982 bp, Homo sapiens
ccctatatgcctgaaatgcctcccccaggtccctcgctgtaactggctgacatctactcaactgaaaaggctcatcttgaggattactctccaggaagcattctgttatcccctcaggccaggagctgaaatttactggaatcattttaagaagagaagaaacagtgactcatcctcctggaaagaaatttcaagggataaagcaccatggatctaacttatattcccgaagacctatccagttgtccaaaatttgtaaataaatcctgtcctcccaccaaccgctcttttcatgtccaggtgataatgtattcggttatgactggagccatgattatcactattcggaaacttggttataatggtttccatatcgcatttcaaacagcttcactctcccacaaactttctgatcctctccatggcaaccacggactttctgctgggttttgtcattatgccatacagcataatgcgatcagtggagagttgctggtactttggggatggcttttgtaaattccacacaagctttgacatgatgctcagactgacctccattttccacctctgttccattgctattgaccgattttatgccgtgtgttaccctttacattacacaaccaaaatgacgaactccaccataaagcaactgctggcattttgctggtcagttcctgctcttttttcttttggtttagttctatctgaggccgatgtttccggtatgcagagctataagatacttgttgcttgcttcaatttctgtgcccttactttcaacaaattctgggggacaatattgttcactacatgtttctttacccctggctccatcatggttggtatttatggcaaaatctttatcgtttccaaacagcatgctcgagtcatcagccatgtgcctgaaaacacaaagggggcagtgaaaaaacacctatccaagaaaaaggacaggaaagcagcgaagacactgggt

SEQ ID NO: 4771 - protein, 206 aa, Homo sapiens
MVSISHFKQLHSPTNFLILSMATTDFLLGFVIMPYSIMRSVESCWYFGDGFCKFHTSFDMMLRLTSIFHLCSIAIDRFYAVCYPLHYTTKMTNSTIKQLLAFCWSVPALFSFGLVLSEADVSGMQSYKILVACFNFCALTFNKFWGTILFTTCFFTPGSIMVGIYGKIFIVSKQHARVISHVPENTKGAVKKHLSKKKDRKAAKTL

SEQ ID NO: 4772 - DNA, 944 bp, Homo sapiens
gatctctgggtgtccgagtggctatgtattcatttatggcaggatccatattcatcacaatatttggcaatcttgccatgataatttccatttcctacttcaagcagcttcacacaccaaccaacttcctcatcctctccatggccatcactgatttcctcctgggattcaccatcatgccatatagtatgatcagatcggtggagaactgctggtattttgggcttacattttgcaagatttattatagttttgacctgatgcttagcataacatccatttttcatctttgctcagtggccattgatagattttatgctatatgttacccattactttattccaccaaaataactattccagtcattaaaagattgctacttctatgttggtcggtccctggagcatttgccttcggggtggtcttctcagaggcctatgcagatggaatagagggctatgacatcttggttgcttgttccagttcctgcccagtgatgttcaacaagctatgggggaccaccttgtttatggcaggtttcttcactcctgggtctatgatggtggggatttatggcaaaatttttgcagtatccagaaaacatgctcatgccatcaataacttgcgagaaaatcaaaataatcaagtgaagaaagacaaaaaagctgccaaaactttaggaatagtgataggagttttcttattatgttggtttccttgtttcttcacaattttattggatccctttttgaacttctctactcctgtagttttgtttgatgccttgacatggtttggctattttaactccacatgtaatccgttaatatatggtttcttctatccctggtttcgcagagcactgaagtacattttgctaggtaaaattttcagctcatgtttccataatactattttgtgtatgcaaaaagaaagtgagtag

SEQ ID NO: 4773 - protein, 306 aa, Homo sapiens
MYSFMAGSIFITIFGNLAMIISISYFKQLHTPTNFLILSMAITDFLLGFTIMPYSMIRSVENCWYFGLTFCKIYYSFDLMLSITSIFHLCSVAIDRFYAICYPLLYSTKITIPVIKRLLLLCWSVPGAFAFGVVFSEAYADGIEGYDILVACSSSCPVMFNKLWGTTLFMAGFFTPGSMMVGIYGKIFAVSRKHAHAINNLRENQNNQVKKDKKAAKTLGIVIGVFLLCWFPCFFTILLDPFLNFSTPVVLFDALTWFGYFNSTCNPLIYGFFYPWFRRALKYILLGKIFSSCFHNTILCMQKESE

SEQ ID NO: 4774 - DNA, 1313 bp, Homo sapiens
atgatgcccttttgccacaatataattaatatttcctgtgtgaaaaacaactggtcaaatgatgtccgtgcttccctgtacagtttaatggtgctcataattctgaccacactcgttggcaatctgatagttattgtttctatatcacacttcaaacaacttcataccccaacaaattggctcattcattccatggccactgtggactttcttctggggtgtctggtcatgccttacagtatggtgagatctgctgagcactgttggtattttggagaagtcttctgtaaaattcacacaagcaccgacattatgctgagctcagcctccattttccatttgtctttcatctccattgaccgctactatgctgtgtgtgatccactgagatataaagccaagatgaatatcttggttatttgtgtgatgatcttcattagttggagtgtccctgctgtttttgcatttggaatgatctttctggagctaaacttcaaaggcgctgaagagatatattacaaacatgttcactgcagaggaggttgctctgtcttctttagcaaaatatctggggtactgacctttatgacttctttttatatacctggatctattatgttatgtgtctattacagaatatatcttatcgctaaagaacaggcaagattaattagtgatgccaatcagaagctccaaattggattggaaatgaaaaatggaatttcacaaagcaaagaaaggaaagctgtgaagacattggggattgtgatgggagttttcctaatatgctggtgccctttctttatctgtacagtcatggacccttttcttcactacattattccacctactttgaatgatgtattgatttggtttggctacttgaactctacatttaatccaatggtttatgcatttttctatccttggtttagaaaagcactgaagatgatgctgtttggtaaaattttccaaaaagattcatccaggtgtaaattatttttggaattgagttcatagaattattatattttactgttttgcaaatcggttgatgatcatatttatgaacacaacataacgaaccacatgcaccaaccacatggatttttttttaaatcagttacttgagtcaaagtatgtatggtgagttaaattatgatgcttataggtaatttcctatttgggacatagtaggtatacgcttttccattcttaccacacataatggaactttgcaaatccagtatttaaaggcctacattttatataacttttcctgcccttagaagaactgccatgagtttactgtg

SEQ ID NO: 4775 - protein, 339 aa, Homo sapiens; identical to SEQ ID NO: 596

SEQ ID NO: 4776 - DNA, 3563 bp, Homo sapiens
gttaacagtttccggaaagagagtgatcgggatgcaagatttttgagactcactggtctgaaactgcctttcctcttaaatttagttaagtatttccctgggcatggaattcaaaggtggttatgacttttcttcaggattgtgaatgtatttatatcctcccatcttacgttgctattgagaattctgaagttcttctgattcctgattctttgtatgtgtattcctcattccacaccttccccagaatgcatgcagaatttcttcctttctattttcttttctctttttctgaaactcttattattgggatcttctgcctcttggattagggctctaattttccgacattttctctgctattttttactactttatttttctcctctactttctgagagatttcctcctcttgatcttccaaatcttgtactgaatcttttatttttgttaacatgttcttaatttccaagaactcttttttcttgtcttcggagtttcaacacttattgttgttttgtgcatgtattattttttcttctctctctgaggctatttaggaaattttttattgaagctcctcccccctgcttccttcaagttgcttttatctgcttttttatttgctttttcatgcaataagtttttctcacatgtctggtaactcttggggattaccaaaaactcatagaaaattctgaccatgtgagtaacacttgccaattttgagcttcatgatagaatgatctagctggaccttttgctgcggggaaatcggagtgattactttccacctgcaaagtggaaacaataagaccagttagcggctgctgctttagtcaagcaagagatgaaggtgacttggaatatgctgtacagatggcattaaatgaatatggatctccttttggaaacttttcatctgcatgatttgtaccctgttgaaatgtaaaacgactaatttaaacacttgcggtgactcagctgaaacagcttctaccaggtttgaaatgttctccctcagtggcactttcggaacccagtatgtctttcctgaggtgttgctgagtgaaaatcagcttgcacctggagaatttcaggtgtcaactgacggacgcttgtttagtctgaagccaacatccggacctgtcttaacagtaactctgtttgggaggttgtatgagaaggactgggcatcaaatgcttcatcaggcctcacagcacaagcaagaataataatgctaatagttatagcacctattgtatgctcattaagttggtagaatattgactttttctcttttttatttgggataatttaaaaaatgatggatgagaaaagaaagattggtccgggttaatattatcctctagtataagtgaattactagtttctctttatttagacaaacacacacacaccagataatataaacttaataaattatctgttaatgtagattttatttaaaaaactatatttgaacattggtctttcttggacgtgagctaattatatcaaataagtatcacaaatcttttacgcagaagaaataaaaactacgggtagaaaacataagaactatcataaaatttacttacaaggaggctgctcttgttaccacttttattatattacgtatcacttattcagctctgctgaaaatttccaatgactttgtttgtttgctctttttgttttttacctaaacaatacattttgattctcttgtgggttgataatgtctccccaaaatttacatgttgaagcacctcagaatgtgactgtatttggagacagggtctttaaagaggtaaaataaggtcattaggatagaccctaattcaatatgactgatgatcataaaagaagaggcgagtagggcacaacaggcacaaagggagaccataaggagacacagaggaaggacaactctttacaagctaagaagagagggcctcagaagaaaccaaccctgccaacaccttgatcttggacttccagcctccaaaactatgagaaataaatttctattgtttaagtcacccagtccatggtactttgttaggcagccctggcaaatgaatcaaagacccattcctgttcctctccccaccactactgttttctactgtaatctgaagcttcaacaaaaggcttacctggtaagaatattcagctggtctgggtcctcaagactccaatagacactcttagagaaggattgctgatggattgatagtgaaaccattagatcattgaattcctctggaattagaaaaccagagagtcccattttaagaaattagatatttaatatagcattgtgtgttctattttagtaacagcagaatctcttgacattacacaactcagtgaaacaacatcatttaagccaaaatatctcccaactgactgatagactctgagcactaatatcatagtgctgtgatgatggacaattacatagtaccgataacagccatgcactgtgcaaagcatgcccttctgcacaggagagcaaggcacttgcagtagtgatctatgccagcaaaacatcattttgagacaaacatttttgtggcagatgtttttcctaaaaagtactatatcatccaagaaatatttgagtaaaatcccttgttcttttgggtgacattaactgacatttgctttttttcaagacctaatagaaaataagaaagcccataatgtatttagaaacaggaatcctcagagcaattctctgtattctcatataatttcaatgtaaaacagaaaacatattgatgtgttggtgataggcttgaattattaaaaacttcaaaaacatcctaagtgtttcttttttgctcaacgttgtcaactatagtaggtctcccttgtggtgtaatgaattgcccccaaactattatcttaaaacaacaaacatttattatcttatagcatttctgagggtcaggatctgggactggcttagtggagttgttctggatcagggcctttggaaagttgtagttaacttgtccccagggctgccatcatctcaaggctcgggtggggctggagaaaatctgcttctcagctcactcacggcggttgccaggcctccattctttaggatgctagaaaaactttcataaaatgtcatctggcttctcctagagcaatgatactgagagagaaagcacatgagagaaagagcgagggaacttggatgtaagccacagtctttgaaaacctaatcacagaagtgacatctcttcttccacatgatgttggtcacatggaccaacaatggcacaacgtggacagaatcaaacagagttgagaatatcaggaggtggggcttcatgggggccattttggatgctatcatagtgaatatatgtatttatatttatatctgtatatattgcaatgtaatttaaaaaataggattgttttccttttctttttgctatatgtgatatgtatttcaaaatacactcccaatagttacgtctgaaaagcactacactaaaaaactttctatacattgaataattaaattaaataatct

SEQ ID NO: 4777 - protein, 118 aa, Homo sapiens [sequence omitted]

SEQ ID NO: 4778 - DNA, 3842 bp, Homo sapiens
agcactcattggacttcagcatgactactcagttgccagcttacgtggcaattttgcttttctatgtctcaagagccagctgccaggacactttcactgcagctgtttatgagcatgcagcgatattgcccaatgccaccctaacaccagtgtctcgtgaggaggctttggcattaatgaatcggaatctggacattttggaaggagcgatcacatcagcagcagatcagggtgcgcatattattgtgactccagaagatgctatttatggctggaacttcaacagggactctctctacccatatttggaggacatcccagaccctgaagtaaactggatcccctgtaataatcgtaacagatttggccagaccccagtacaagaaagactcagctgcctggccaagaacaactctatctatgttgtggcaaatattggggacaagaagccatgcgataccagtgatcctcagtgtccccctgatggccgttaccaatacaacactgatgtggtatttgattctcaaggaaaactggtggcacgctaccataagcaaaaccttttcatgggtgaaaatcaattcaatgtacccaaggagcctgagattgtgactttcaataccacctttggaagttttggcattttcacatgctttgatatactcttccatgatcctgctgttaccttggtgaaagatttccacgtggacaccatagtattcccaacagcttggatgaatgttttgccacatttgtcagctgttgaattccactcagcttgggctatgggcatgagggtcaatttccttgcatccaacatacattacccctcaaagaaaatgacaggaagtggcatctatgcacccaattcttcaagagcatttcattatgatatgaagacagaagagggaaaactcctcctctcgcaactggattcccacccatcccattctgcagtggtgaactggacttcctatgccagcagtatagaagcgctctcatcaggaaacaaggaatttaaaggcactgtctttttcgatgaattcacttttgtgaagctcacaggagttgcaggaaattatacagtttgtcagaaagatctctgctgtcatttaagctacaaaatgtctgagaacataccaaatgaagtgtacgctctaggggcatttgacggactgcacactgtggaagggcgctattatctacagatttgtaccctgttgaaatgtaaaacgactaatttaaacacttgcggtgactcagctgaaacagcttctaccaggtttgaaatgttctccctcagtggcactttcggaacccagtatgtctttcctgaggtgttgctgagtgaaaatcagcttgcacctggagaatttcaggtgtcaactgacggacgcttgtttagtctgaagccaacatccggacctgtcttaacagtaactctgtttgggaggttgtatgagaaggactgggcatcaaatgcttcatcaggcctcacagcacaagcaagaataataatgctaatagttatagcacctattgtatgctcattaagttggtagaatattgactttttctcttttttatttgggataatttaaaaaatgatggatgagaaaagaaagattggtccgggttaatattatcctctagtataagtgaattactagtttctctttatttagacaaacacacacacaccagataatataaacttaataaattatctgttaatgtagattttatttaaaaaactatatttgaacattggtctttcttggacgtgagctaattatatcaaataagtatcacaaatcttttacgcagaagaaataaaaactacgggtagaaaacataagaactatcataaaatttacttacaaggaggctgctcttgttaccacttttattatattacgtatcacttattcagctctgctgaaaatttccaatgactttgtttgtttgctctttttgttttttacctaaacaatacattttgattctcttgtgggttgataatgtctccccaaaatttacatgttgaagcacctcagaatgtgactgtatttggagacagggtctttaaagaggtaaaataaggtcattaggatagaccctaattcaatatgactgatgatcataaaagaagaggcgagtagggcacaacaggcacaaagggagaccataaggagacacagaggaaggacaactctttacaagctaagaagagagggcctcagaagaaaccaaccctgccaacaccttgatcttggacttccagcctccaaaactatgagaaataaatttctattgtttaagtcacccagtccatggtactttgttaggcagccctggcaaatgaatcaaagacccattcctgttcctctccccaccactactgttttctactgtaatctgaagcttcaacaaaaggcttacctggtaagaatattcagctggtctgggtcctcaagactccaatagacactcttagagaaggattgctgatggattgatagtgaaaccattagatcattgaattcctctggaattagaaaaccagagagtcccattttaagaaattagatatttaatatagcattgtgtgttctattttagtaacagcagaatctcttgacattacacaactcagtgaaacaacatcatttaagccaaaatatctcccaactgactgatagactctgagcactaatatcatagtgctgtgatgatggacaattacatagtaccgataacagccatgcactgtgcaaagcatgcccttctgcacaggagagcaaggcacttgcagtagtgatctatgccagcaaaacatcattttgagacaaacatttttgtggcagatgtttttcctaaaaagtactatatcatccaagaaatatttgagtaaaatcccttgttcttttgggtgacattaactgacatttgctttttttcaagacctaatagaaaataagaaagcccataatgtatttagaaacaggaatcctcagagcaattctctgtattctcatataatttcaatgtaaaacagaaaacatattgatgtgttggtgataggcttgaattattaaaaacttcaaaaacatcctaagtgtttcttttttgctcaacgttgtcaactatagtaggtctcccttgtggtgtaatgaattgcccccaaactattatcttaaaacaacaaacatttattatcttatagcatttctgagggtcaggatctgggactggcttagtggagttgttctggatcagggcctttggaaagttgtagttaacttgtccccagggctgccatcatctcaaggctcgggtggggctggagaaaatctgcttctcagctcactcacggcggttgccaggcctccattctttaggatgctagaaaaactttcataaaatgtcatctggcttctcctagagcaatgatactgagagagaaagcacatgagagaaagagcgagggaacttggatgtaagccacagtctttgaaaacctaatcacagaagtgacatctcttcttccacatgatgttggtcacatggaccaacaatggcacaacgtggacagaatcaaacagagttgagaatatcaggaggtggggcttcatgggggccattttggatgctatcatagtgaatatatgtatttatatttatatctgtatatattgcaatgtaatttaaaaaataggattgttttccttttctttttgctatatgtgatatgtatttcaaaatacactcccaatagttacgtctgaaaagcactacactaaaaaactttctatacattgaataattaaattaaataatct

SEQ ID NO: 4779 - protein, 513 aa, Homo sapiens
MTTQLPAYVAILLFYVSRASCQDTFTAAVYEHAAILPNATLTPVSREEALALMNRNLDILEGAITSAADQGAHIIVTPEDAIYGWNFNRDSLYPYLEDIPDPEVNWIPCNNRNRFGQTPVQERLSCLAKNNSIYVVANIGDKKPCDTSDPQCPPDGRYQYNTDVVFDSQGKLVARYHKQNLFMGENQFNVPKEPEIVTFNTTFGSFGIFTCFDILFHDPAVTLVKDFHVDTIVFPTAWMNVLPHLSAVEFHSAWAMGMRVNFLASNIHYPSKKMTGSGIYAPNSSRAFHYDMKTEEGKLLLSQLDSHPSHSAVVNWTSYASSIEALSSGNKEFKGTVFFDEFTFVKLTGVAGNYTVCQKDLCCHLSYKMSENIPNEVYALGAFDGLHTVEGRYYLQICTLLKCKTTNLNTCGDSAETASTRFEMFSLSGTFGTQYVFPEVLLSENQLAPGEFQVSTDGRLFSLKPTSGPVLTVTLFGRLYEKDWASNASSGLTAQARIIMLIVIAPIVCSLSW

SEQ ID NO: 4780 - DNA, 677 bp, Homo sapiens
agtggaaacaataagaccagttagcggctgctgctttagtcaagcaagagatgaaggtgacttggaatatgctgtacagatggcattaaatgaatatggatctccttttggaaacttttcatctgcatgatttgtaccctgttgaaatgtaaaacgactaatttaaacacttgcggtgactcagctgaaacagcttctaccaggtttgaaatgttctccctcagtggcactttcggaacccagtatgtctttcctgaggtgttgctgagtgaaaatcagcttgcacctggagaatttcaggtgtcaactgacggacgcttgtttagtctgaagccaacatccggacctgtcttaacagtaactctgtttgggaggttgtatgagaaggactgggcatcaaatgcttcatcaggcctcacagcacaagcaagaataataatgctaatagttatagcacctattgtatgctcattaagttggtagaatattgactttttctcttttttatttgggataatttaaaaaatgatggatgagaaaagaaagattggtccgggttaatattatcctctagtataagtgaattactagtttctctttatttagacaaacacacacacaccagataatataaacttaataaattatctgttaatgtagattttatttaaaaaact

SEQ ID NO: 4781 - protein, 118 aa, Homo sapiens [sequence omitted]

SEQ ID NO: 4782 - DNA, 1715 bp, Homo sapiens
aatgtaaagtttttccagtgaaacaaaacgtaagaatctgagtttgtttttcaaagatcactaaattttagttatgattatatcacattttccaaaatgtgtggcagtttttgccctccttgctctgagtgttggtgcactggacacttttattgctgcagtatatgagcatgcggtgatattaccaaacagaacagaaacacctgtttcaaaagaagaagctttgctcctgatgaacaagaacatagatgttttggagaaagcagttaagctggcagcgaagcagggtgcacatatcattgtgaccccagaagatggaatctatggttggatcttcaccagggagagcatttacccctatctagaggatataccagaccctggagtgaactggattccatgtagagacccctggagattcggcaacacaccagtgcaacaaagactcagctgcctggccaaggacaactctatctatgtcgtggctaatattggggacaagaagccatgcaatgccagtgactctcagtgtccccctgatggccgttaccaatacaacactgatgtggtgtttgattctcagggaaaactgttggcacgctaccataagtacaatctttttgcacctgaaattcagtttgatttccccaaggattcagaacttgtgacttttgacactccctttgggaagtttggcatttttacttgctttgacattttttctcatgacccagctgtggtggtggtggatgagtttcaattgacagcattctctaccccacagcatggtacaacacgctgcccctcctctcggctgttcccttccattcagcatgggccaaggccatgggagtcaatctacttgctgcaaatacccacaacaccagcatgcacatgacagggagtggaatctacgccccagaagcagtcaaggtgtaccactatgacatggaaacagagagtggtcagctgttgctatcagaactgaagtctcggccccgccgtgagcccacctaccctgcagctgttgactggcatgcgtatgccagcagtgtcaagccattttcctctgaacagtcagattttctggggatgatttattttgatgagtttaccttcaccaagcttaagagaaatacaggaaattacacagcttgccagaaagatctgtgttgtcacttaacttacaagatgtctgagaagcgaacagacgagatctatgccctaggtgcttttgatggactgcacacagtagaaggccaatattacttacagatatgtgcattactgaagtgtcaaaccactgacctggaaacgtgtggagaacctgtggggtcagcttttaccaagtttgaagacttctccctcagtggcacatttggaacgcgttatgttttcccacagatcattctaagtgggagtcagcttgcccctgaaagacattatgagatttcaagagatggacgcttgaggagccgaagtggagcccctttgcctgtcttagttatggccctgtatggaagagtgtttgagaaggaccctccacgcttagggcagggatctgggaaattccagtgatctcctttagcagagcccttttaggattagcctggctaagaaaggaagaaaaaaaagagatccgttagtgtctgtttagaaaagatgttataaacttacagaaacaaatataataaactgaagcagatttgaaaagc

SEQ ID NO: 4783 - protein, 274 aa, Homo sapiens; identical to SEQ ID NO: 602

SEQ ID NO: 4784 - DNA, 1761 bp, Homo sapiens
aatgtaaagtttttccagtgaaacaaaacgtaagaatctgagtttgtttttcaaagatcactaaattttagttatgattatatcacattttccaaaatgtgtggcagtttttgccctccttgctctgagtgttggtgcactggacacttttattgctgcagtatatgagcatgcggtgatattaccaaacagaacagaaacacctgtttcaaaagaagaagctttgctcctgatgaacaagaacatagatgttttggagaaagcagttaagctggcagcgaagcagggtgcacatatcattgtgaccccagaagatggaatctatggttggatcttcaccagggagagcatttacccctatctagaggatataccagaccctggagtgaactggattccatgtagagacccctggagaaatcactaaaatatagtaagtttgaggaaatgtctattgaattagattcggcaacacaccagtgcaacaaagactcagctgcctggccaaggacaactctatctatgtcgtggctaatattggggacaagaagccatgcaatgccagtgactctcagtgtccccctgatggccgttaccaatacaacactgatgtggtgtttgattctcagggaaaactgttggcacgctaccataagtacaatctttttgcacctgaaattcagtttgatttccccaaggattcagaacttgtgacttttgacactccctttgggaagtttggcatttttacttgctttgacattttttctcatgacccagctgtggtggtggtggatgagtttcaattgacagcattctctaccccacagcatggtacaacacgctgcccctcctctcggctgttcccttccattcagcatgggccaaggccatgggagtcaatctacttgctgcaaatacccacaacaccagcatgcacatgacagggagtggaatctacgccccagaagcagtcaaggtgtaccactatgacatggaaacagagagtggtcagctgttgctatcagaactgaagtctcggccccgccgtgagcccacctaccctgcagctgttgactggcatgcgtatgccagcagtgtcaagccattttcctctgaacagtcagattttctggggatgatttattttgatgagtttaccttcaccaagcttaagagaaatacaggaaattacacagcttgccagaaagatctgtgttgtcacttaacttacaagatgtctgagaagcgaacagacgagatctatgccctaggtgcttttgatggactgcacacagtagaaggccaatattacttacagatatgtgcattactgaagtgtcaaaccactgacctggaaacgtgtggagaacctgtggggtcagcttttaccaagtttgaagacttctccctcagtggcacatttggaacgcgttatgttttcccacagatcattctaagtgggagtcagcttgcccctgaaagacattatgagatttcaagagatggacgcttgaggagccgaagtggagcccctttgcctgtcttagttatggccctgtatggaagagtgtttgagaaggaccctccacgcttagggcagggatctgggaaattccagtgatctcctttagcagagcccttttaggattagcctggctaagaaaggaagaaaaaaaagagatccgttagtgtctgtttagaaaagatgttataaacttacagaaacaaatataataaactgaagcagatttgaaaagc

SEQ ID NO: 4785 - protein, 243 aa, Homo sapiens
MGVNLLAANTHNTSMHMTGSGIYAPEAVKVYHYDMETESGQLLLSELKSRPRREPTYPAAVDWHAYASSVKPFSSEQSDFLGMIYFDEFTFTKLKRNTGNYTACQKDLCCHLTYKMSEKRTDEIYALGAFDGLHTVEGQYYLQICALLKCQTTDLETCGEPVGSAFTKFEDFSLSGTFGTRYVFPQIILSGSQLAPERHYEISRDGRLRSRSGAPLPVLVMALYGRVFEKDPPRLGQGSGKFQ

SEQ ID NO: 4786 - DNA, 809 bp, Homo sapiens
aatgtaaagtttttccagtgaaacaaaacgtaagaatctgagtttgtttttcaaagatcactaaattttagttatgattatatcacattttccaaaatgtgtggcagtttttgccctccttgctctgagtgttggtgcactggacacttttattgctgcagtatatgagcatgcggtgatattaccaaacagaacagaaacacctgtttcaaaagaagaagctttgctcctgatgaacaagaacatagatgttttggagaaagcagttaagctggcagcgaagcagggtgcacatatcattgtgaccccagaagatggaatctatggttggatcttcaccagggagagcatttacccctatctagaggatataccagaccctggagtgaactggattccatgtagagacccctggaggaagagtaaaaagatgaatgagcctgtttccaaagagctttgctatcactgtcattcagaatgcaatcaatatggccaatggaaattgtataggacttgaaaaaggaagccctacttctgggaccacattttacgaccacctagctgagtgataaatcactaaaatatagtaagtttgaggaaatgtctattgaattagattcggcaacacaccagtgcaacaaagactcagctgcctggccaaggacaactctatctatgtcgtggctaatattggggacaagaagccatgcaatgccagtgactctcagtgtccccctgatggccgttaccaatacaacactgatgtggtgtttgattctcagggaaaactgttggcacgctaccataag

SEQ ID NO: 4787 - protein, 147 aa, Homo sapiens; identical to SEQ ID NO: 604

SEQ ID NO: 4788 - DNA, 941 bp, Homo sapiens
aatgtaaagtttttccagtgaaacaaaacgtaagaatctgagtttgtttttcaaagatcactaaattttagttatgattatatcacattttccaaaatgtgtggcagtttttgccctccttgctctgagtgttggtgcactggacacttttattgctgcagtatatgagcatgcggtgatattaccaaacagaacagaaacacctgtttcaaaagaagaagctttgctcctgatgaacaagaacatagatgttttggagaaagcagttaagctggcagcgaagcagggtgcacatatcattgtgaccccagaagatggaatctatggttggatcttcaccagggagagcatttacccctatctagaggatataccagaccctggagtgaactggattccatgtagagacccctggaggtaatatcatatcattaatttctaaacaaaaagttgtgatttggtaaaacaccaacagtaaactcactgaatttgactggtaattgtgttgataaatagtcaatctgtggcataggatgtagatgcttttttttccctgtaatttcaacttttagcttagattgagggagtacatgtgcaggtttgttacatgggcaaattgcatgacgctgaggattggggtacaatgattgcaccacccagcatagtatacaacaggaaggttttcagcccttgccttcctctctctctctcccctctattagttcccagtgtctattgctgtcatctttatggccatgagttcccaatgcttagctcccacttataagtgagaacatgcagtatttggttttctgttcctgtgttaacttgctgaggataatgtcctttggtgctgcaaaagacatgattttgttccttcttgtgggcacctaggttaattccatatctttgctgttgtgaaaagtgctgcgatgaacata

SEQ ID NO: 4789 - protein, 115 aa, Homo sapiens [sequence omitted]

SEQ ID NO: 4790 - DNA, 2014 bp, Homo sapiens
agaaatcactaaaccttggccatggtcacttcctcttttccaatctctgtggcagtttttgccctaataaccctgcaggttggtactcaggacagttttatagctgcagtgtatgaacatgctgtcattttgccaaataaaacagaaacaccagtttctcaggaggatgccttgaatctcatgaacgagaatatagacattctggagacagcgatcaagcaggcagctgagcagggtgctcgaatcattgtgactccagaagatgcactttatggatggaaatttaccagggaaactgttttcccttatctggaggatatcccagaccctcaggtgaactggattccgtgtcaagacccccacagatttggtcacacaccagtacaagcaagactcagctgcctggccaaggacaactctatctatgtcttggcaaatttgggggacaaaaagccatgtaattcccgtgactccacatgtcctcctaatggctactttcaatacaataccaatgtggtgtataatacagaaggaaaactcgtggcacgttaccataagtaccacctgtactctgagcctcagtttaatgtccctgaaaagccggagttggtgactttcaacaccgcatttggaaggtttggcattttcacgtgctttgatatattcttctatgatcctggtgttaccctggtgaaagatttccatgtggacaccatactgtttcccacagcttggatgaacgttttgccccttttgacagctattgaattccattcagcttgggcaatgggaatgggagttaatcttcttgtggccaacacacatcatgtcagcctaaatatgacaggaagtggtatttatgcaccaaatggtcccaaagtgtatcattatgacatgaagacagagttgggaaaacttctcctttcagaggtggattcacatcccctatcctcgcttgcctacccaacagctgttaattggaatgcctacgccaccaccatcaaaccatttccagtacagaaaaacactttcaggggatttatttccagggatgggttcaacttcacagaactttttgaaaatgcaggaaaccttacagtctgtcaaaaggagctttgctgtcatttaagctacagaatgttacaaaaagaagagaatgaagtatacgttctaggagcttttacaggattacatggccgaaggagaagagagtactggcaggtctgcacactgctgaagtgcaaaactactaatttgacaacttgtggacggccagtagaaactgcttctacaagatttgaaatgttctccctcagtggcacatttggaacagagtatgtttttcctgaagtgctacttaccgaaattcatctgtcacctggaaaatttgaggtgctgaaagatgggcgtttggtaaacaagaatggatcatctgggcctatactaacagtgtcactctttgggaggtggtacacaaaggactcactttacagctcatgtgggaccagcaattcagcaataacttacctgctaatattcatattattaatgatcatagctttgcaaaatattgtaatgttatagggcgtctctttatcactcagcttctgcatcatatgcttggctgaatgtgtttatcggcttcccaagtttactaagaaactttgaagggctatttcagtagtatagaccagtgagtcctaaatattttttctcatcaataattattttttaagtattatgataatgttgtccatttttttggctactctgaaatgttgcagtgtggaacaatggaaagagcctgggtgtttgggtcagataaatgaagatcaaactccagctccagcctcatttgcttgagactttgtgtgtatgggggacttgtatgtatgggagtgaggagtttcagggccattgcaaacatagctgtgcccttgaagagaatagtaatgatgggaatttagaggtttatgactgaattccctttgacattaaagactatttgaattca

SEQ ID NO: 4791 - protein, 520 aa, Homo sapiens
MVTSSFPISVAVFALITLQVGTQDSFIAAVYEHAVILPNKTETPVSQEDALNLMNENIDILETAIKQAAEQGARIIVTPEDALYGWKFTRETVFPYLEDIPDPQVNWIPCQDPHRFGHTPVQARLSCLAKDNSIYVLANLGDKKPCNSRDSTCPPNGYFQYNTNVVYNTEGKLVARYHKYHLYSEPQFNVPEKPELVTFNTAFGRFGIFTCFDIFFYDPGVTLVKDFHVDTILFPTAWMNVLPLLTAIEFHSAWAMGMGVNLLVANTHHVSLNMTGSGIYAPNGPKVYHYDMKTELGKLLLSEVDSHPLSSLAYPTAVNWNAYATTIKPFPVQKNTFRGFISRDGFNFTELFENAGNLTVCQKELCCHLSYRMLQKEENEVYVLGAFTGLHGRRRREYWQVCTLLKCKTTNLTTCGRPVETASTRFEMFSLSGTFGTEYVFPEVLLTEIHLSPGKFEVLKDGRLVNKNGSSGPILTVSLFGRWYTKDSLYSSCGTSNSAITYLLIFILLMIIALQNIVML

SEQ ID NO: 4792 - DNA, 1946 bp, Homo sapiens
gactggaggagcacaggccttggaaaggaaagcagctgagatccagaggagtggaaggctcccccttgactaaagctaaacaccagtttctcaggaggatgccttgaatctcatgaacgagaatatagacattctggagacagcgatcaagcaggcagctgagcagggtgctcgaatcattgtgactccagaagatgcactttatggatggaaatttaccagggaaactgttttcccttatctggaggatatcccagaccctcaggtgaactggattccgtgtcaagacccccacagatttggtcacacaccagtacaagcaagactcagctgcctggccaaggacaactctatctatgtcttggcaaatttgggggacaaaaagccatgtaattcccgtgactccacatgtcctcctaatggctactttcaatacaataccaatgtggtgtataatacagaaggaaaactcgtggcacgttaccataagtaccacctgtactctgagcctcagtttaatgtccctgaaaagccggagttggtgactttcaacaccgcatttggaaggtttggcattttcacgtgctttgatatattcttctatgatcctggtgttaccctggtgaaagatttccatgtggacaccatactgtttcccacagcttggatgaacgttttgccccttttgacagctattgaattccattcagcttgggcaatgggaatgggagttaatcttcttgtggccaacacacatcatgtcagcctaaatatgacaggaagtggtatttatgcaccaaatggtcccaaagtgtatcattatgacatgaagacagagttgggaaaacttctcctttcagaggtggattcacatcccctatcctcgcttgcctacccaacagctgttaattggaatgcctacgccaccaccatcaaaccatttccagtacagaaaaacactttcaggggatttatttccagggatgggttcaacttcacagaactttttgaaaatgcaggaaaccttacagtctgtcaaaaggagctttgctgtcatttaagctacagaatgttacaaaaagaagagaatgaagtatacgttctaggagcttttacaggattacatggccgaaggagaagagagtactggcaggtctgcacactgctgaagtgcaaaactactaatttgacaacttgtggacggccagtagaaactgcttctacaagatttgaaatgttctccctcagtggcacatttggaacagagtatgtttttcctgaagtgctacttaccgaaattcatctgtcacctggaaaatttgaggtgctgaaagatgggcgtttggtaaacaagaatggatcatctgggcctatactaacagtgtcactctttgggaggtggtacacaaaggactcactttacagctcatgtgggaccagcaattcagcaataacttacctgctaatattcatattattaatgatcatagctttgcaaaatattgtaatgttatagggcgtctctttatcactcagcttctgcatcatatgcttggctgaatgtgtttatcggcttcccaagtttactaagaaactttgaagggctatttcagtagtatagaccagtgagtcctaaatattttttctcatcaataattattttttaagtattatgataatgttgtccatttttttggctactctgaaatgttgcagtgtggaacaatggaaagagcctgggtgtttgggtcagataaatgaagatcaaactccagctccagcctcatttgcttgagactttgtgtgtatgggggacttgtatgtatgggagtgaggagtttcagggccattgcaaacatagctgtgcccttgaagagaatagtaatgatgggaatttagaggtttatgactgaattccctttgacattaaagactatttgaattca

SEQ ID NO: 4793 - protein, 467 aa, Homo sapiens
MNENIDILETAIKQAAEQGARIIVTPEDALYGWKFTRETVFPYLEDIPDPQVNWIPCQDPHRFGHTPVQARLSCLAKDNSIYVLANLGDKKPCNSRDSTCPPNGYFQYNTNVVYNTEGKLVARYHKYHLYSEPQFNVPEKPELVTFNTAFGRFGIFTCFDIFFYDPGVTLVKDFHVDTILFPTAWMNVLPLLTAIEFHSAWAMGMGVNLLVANTHHVSLNMTGSGIYAPNGPKVYHYDMKTELGKLLLSEVDSHPLSSLAYPTAVNWNAYATTIKPFPVQKNTFRGFISRDGFNFTELFENAGNLTVCQKELCCHLSYRMLQKEENEVYVLGAFTGLHGRRRREYWQVCTLLKCKTTNLTTCGRPVETASTRFEMFSLSGTFGTEYVFPEVLLTEIHLSPGKFEVLKDGRLVNKNGSSGPILTVSLFGRWYTKDSLYSSCGTSNSAITYLLIFILLMIIALQNIVML

SEQ ID NO: 4794 - DNA, 758 bp, Homo sapiens
aagaagattaactcccattcccattgcccaagctgaatggaattcaatagctgtcaaaaggggcaaaacgttcatccaagctgtgggaaacagtatggtgtccacatggaaatctttcaccagggtaacaccaggatcatagaagaatatatcaaagcacgtgaaaatgccaaaccttccaaatgcggtgttgaaagtcaccaactccggcttttcagggacattaaactgaggctcagagtacaggtggtactacaacaaatggataggagaaaaccagtaaaaccttatttgttgaagaaatgactcataaaaaccctctaagttggtaacagatttggctatggtcaactgcagggaatctcctaggaagcggataaatctggcaattggaagtaaatttctaaggaaaatgtggaggaatatgtaacatacgtccatagcatctctcatctcctctctctcccttctctctctttccctctctctcagttaagagccaaatacccccccataaaccccaaagtccgtaagctttttttaaatttaatttaattttatttttctgagacggagcctcgctctatcacccaggctggagtgcagtggcatgatttcggctcactgcaatctccacctcctgagttcaagcgagaggctgaggcaggagaatgggttgaacctgggagtcagaggttgcagtgagctgagatcgtgccattgcactccagccgggatgacagagccagactctgcct

SEQ ID NO: 4795 - protein, 48 aa, Homo sapiens
MISAHCNLHLLSSSERLRQENGLNLGVRGCSELRSCHCTPAGMTEPDS

SEQ ID NO: 4796 - DNA, 680 bp, Homo sapiens
agaaatcactaaaccttggccatggtcacttcctcttttccaatctctgtggcagtttttgccctaataaccctgcaggttggtactcaggacagttttatagctgcagtgtatgaacatgctgtcattttgccaaataaaacagaaacaccagtttctcaggaggatgccttgaatctcatgaacgagaatatagacattctggagacagcgatcaagcaggcagctgagcagggtgctcgaatcattgtgactccagaagatgcactttatggatggaaatttaccagggaaactgttttcccttatctggaggatatcccagaccctcaggtgaactggattccgtgtcaagacccccacagatttggtcacacaccagtacaagcaagactcagctgcctggccaaggacaactctatctatgtcttggcaaatttgggggacaaaaagccatgtaattcccgtgactccacatgtcctcctaatggctactttcaatacaataccaatgtggtgtataatacagaaggaaaactcgtggcacgttaccataaggcagagtctggctctgtcatcccggctggagtgcaatggcacgatctcagctcactgcaacctctgactcccaggttcaacccattctcctgcctcagcctcctgagtagctgggattacag

SEQ ID NO: 4797 - protein, 218 aa, Homo sapiens
MVTSSFPISVAVFALITLQVGTQDSFIAAVYEHAVILPNKTETPVSQEDALNLMNENIDILETAIKQAAEQGARIIVTPEDALYGWKFTRETVFPYLEDIPDPQVNWIPCQDPHRFGHTPVQARLSCLAKDNSIYVLANLGDKKPCNSRDSTCPPNGYFQYNTNVVYNTEGKLVARYHKAESGSVIPAGVQWHDLSSLQPLTPRFNPFSCLSLLSSWD

SEQ ID NO: 4798 - DNA, 1390 bp, Homo sapiens
tatttctagaaaaccatggagtaaatgtaactatgaaaattcttttaaataagatttgctttttatcttagaagcagagtattcttgctgttggtttttttccagattatccttggtttatcttaattgatctatcatacaattttttctttcacacaggttttccttttaataatggatacactcatgtctctttttgcagtgaaaatgggtttgaagagggattaagtacattgggacttgtatcaggtctttttagtgcaatgtggtcaattggtgcttttatgggaccaacgctgggtggatttctgtatgagaaaattggttttgaatgggcagcagctatacaaggtctatgggctctgataagtggattagccatgggcttgttttatctactggagtattcaaggagaaaaaggtctaaatctcaaaacatcctcagcacagaggaggaacgaactactctcttgcctaatgaaacctagtccgatggatcctggattgatacaaggttgagaaatgaatgctcctggccttaaacatcaccgtaggaagggtttttaaaattttacgcgcaaaactccgtggaccccgtgccagtgtcttggaagtgtcaacgtgtttttggatgatcctgtattgggctgtacttactgtgatactgaaaagctgtcctgctgaagcagctatatttgaaatattaagtatgaaaggagtaattaaaaacaagcaaaacaaaacaagacttagtttttaaatgaccaaacttgtccttaaagatgttgttattaactcgagttagttcttatttcctctgtttattttttattctaagtacactgattctgtgaatgtaccttttttattaacagggaaagaaatgaattaatttgatatgctctaaatacataaaggtgcttcaaaatatgtagaaacattactatgaaatcagtttttaaaagatatactttctctttgtcctgaggtttttcggtcttgttcaaaaggaagaattcttgcctgccatacagaaactctctagcactccctgaccttaagcttttctaaaaattctgtttgtgtgaaaagtacaagaataacaatacttacaacttccatttttgtaacctacgttcacttatgatctggatttataaacattacttggtataacgtttttcatttcctttaatgtctctgttttttggctctaccatctgttttgtttttgtttttatctatatcttggtagatgtatttcatccctagagcaggtcagcctccttcccctaatgcgaatgcttgttttgttagggaagggcttcctccaacttcgtgtgaaattgtgatgttgaagtgaataaatgtctattgtgtaactctcatg

SEQ ID NO: 4799 - protein, 74 aa, Homo sapiens [sequence omitted]

SEQ ID NO: 4800 - DNA, 1486 bp, Homo sapiens
ggaaactgatcgctttacccaaagttggccttatagccttcgtcatcaactcactcagctcgtgttttggcttcctcgatcctactctgtctctctttgttttggagaagcctctaaggaaatggcttctggtgtttggcaacttaatcacagccgggtgctacatgctcttagggcctgtcccaatcttgcatattaaaagtcagctctggctgctggtgctgatattagttgtaagtggcctctctgctggaatgagtataattccaactttcccggaaattctcagttgtgcacatgaaaatgggtttgaagagggattaagtacattgggacttgtatcaggtctttttagtgcaatgtggtcaattggtgcttttatgggaccaacgctgggtggatttctgtatgagaaaattggttttgaatgggcagcagctatacaaggtctatgggctctgataagtggattagccatgggcttgttttatctactggagtattcaaggagaaaaaggtctaaatctcaaaacatcctcagcacagaggaggaacgaactactctcttgcctaatgaaacctagtccgatggatcctggattgatacaaggttgagaaatgaatgctcctggccttaaacatcaccgtaggaagggtttttaaaattttacgcgcaaaactccgtggaccccgtgccagtgtcttggaagtgtcaacgtgtttttggatgatcctgtattgggctgtacttactgtgatactgaaaagctgtcctgctgaagcagctatatttgaaatattaagtatgaaaggagtaattaaaaacaagcaaaacaaaacaagacttagtttttaaatgaccaaacttgtccttaaagatgttgttattaactcgagttagttcttatttcctctgtttattttttattctaagtacactgattctgtgaatgtaccttttttattaacagggaaagaaatgaattaatttgatatgctctaaatacataaaggtgcttcaaaatatgtagaaacattactatgaaatcagtttttaaaagatatactttctctttgtcctgaggtttttcggtcttgttcaaaaggaagaattcttgcctgccatacagaaactctctagcactccctgaccttaagcttttctaaaaattctgtttgtgtgaaaagtacaagaataacaatacttacaacttccatttttgtaacctacgttcacttatgatctggatttataaacattacttggtataacgtttttcatttcctttaatgtctctgttttttggctctaccatctgttttgtttttgtttttatctatatcttggtagatgtatttcatccctagagcaggtcagcctccttcccctaatgcgaatgcttgttttgttagggaagggcttcctccaacttcgtgtgaaattgtgatgttgaagtgaataaatgtctattgtgtaactctcatg

SEQ ID NO: 4801 - protein, 139 aa, Homo sapiens
MLLGPVPILHIKSQLWLLVLILVVSGLSAGMSIIPTFPEILSCAHENGFEEGLSTLGLVSGLFSAMWSIGAFMGPTLGGFLYEKIGFEWAAAIQGLWALISGLAMGLFYLLEYSRRKRSKSQNILSTEEERTTLLPNET

SEQ ID NO: 4802 - DNA, 2425 bp, Homo sapiens
ggccgggcggatcgctgcctgcagggagtcggggatgccaggttccagctgagcagcggccgcccgccagagtgccagtggctccttggaggtcgagtccaaggacgtggcttgaagccgggagctggggcgccggagtccacgcaccggggatggaggcgctgggtgacctggagggaccacgcgcaccaggaggtgatgatcctgcaggaagtgcaggagagacccccgggtggctttcgagagaacaggtttttgtactgatatcggcagcttcggtgaacttaggttccatgatgtgctattctatacttggaccgtttttccccaaagaggctgaaaagaagggagccagcaatacaattatcggtatgatctttggatgttttgctttgttcgagttgctggcatccttggtatttggaaactatcttgtacatattggagcaaaatttatgtttgtagcaggaatgtttgtctcaggaggagttacaattctctttggtgtattggaccgagttccagatgggccagtatttattgctatgtgttttctagtgagagtaatggatgcagttagctttgctgcagcaatgactgcatcttcttctatcctggcaaaggcttttccaaataacgtggctacggtattgggaagtcttgagactttttctggactggggctaatactaggtcctcctgtaggtggctttttgtatcaatcctttggctatgaagtgccttttattgttctgggatgcgtcgttttgctgatggtaccactcaatatgtatattttacccaattacgagtctgatccaggtgaacactcattctggaaactgatcgctttacccaaagttggccttatagccttcgtcatcaactcactcagctcgtgttttggcttcctcgatcctactctgtctctctttgttttggagaagttcaatttaccagctggatatgtgggactagtattcctgggtatggcactgtcctatgccatctcttcaccactatttggtctcctaagtgataaaaggccacctctaaggaaatggcttctggtgtttggcaacttaatcacagccgggtgctacatgctcttagggcctgtcccaatcttgcatattaaaagtcagctctggctgctggtgctgatattagttgtaagtggcctctctgctggaatgagtataattccaactttcccggaaattctcagttgtgcacatgaaaatgggtttgaagagggattaagtacattgggacttgtatcaggtctttttagtgcaatgtggtcaattggtgcttttatgggaccaacgctgggtggatttctgtatgagaaaattggttttgaatgggcagcagctatacaaggtctatgggctctgataagtggattagccatgggcttgttttatctactggagtattcaaggagaaaaaggtctaaatctcaaaacatcctcagcacagaggaggaacgaactactctcttgcctaatgaaacctagtccgatggatcctggattgatacaaggttgagaaatgaatgctcctggccttaaacatcaccgtaggaagggtttttaaaattttacgcgcaaaactccgtggaccccgtgccagtgtcttggaagtgtcaacgtgtttttggatgatcctgtattgggctgtacttactgtgatactgaaaagctgtcctgctgaagcagctatatttgaaatattaagtatgaaaggagtaattaaaaacaagcaaaacaaaacaagacttagtttttaaatgaccaaacttgtccttaaagatgttgttattaactcgagttagttcttatttcctctgtttattttttattctaagtacactgattctgtgaatgtaccttttttattaacagggaaagaaatgaattaatttgatatgctctaaatacataaaggtgcttcaaaatatgtagaaacattactatgaaatcagtttttaaaagatatactttctctttgtcctgaggtttttcggtcttgttcaaaaggaagaattcttgcctgccatacagaaactctctagcactccctgaccttaagcttttctaaaaattctgtttgtgtgaaaagtacaagaataacaatacttacaacttccatttttgtaacctacgttcacttatgatctggatttataaacattacttggtataacgtttttcatttcctttaatgtctctgttttttggctctaccatctgttttgtttttgtttttatctatatcttggtagatgtatttcatccctagagcaggtcagcctccttcccctaatgcgaatgcttgttttgttagggaagggcttcctccaacttcgtgtgaaattgtgatgttgaagtgaataaatgtctattgtgtaactctcatg

SEQ ID NO: 4803 - protein, 456 aa, Homo sapiens; identical to SEQ ID NO: 610

SEQ ID NO: 4804 - DNA, 638 bp, Homo sapiens
gcctcaatccggaaacagaaactccccaggcccggcactgcgggagccacctctttcgagggtgggagtgcacatgcgcacaggggacctgaaaaacccttaaataccggcatgcgtgcggatgaggcctctttccctgccgccgccgagtcgcgcggaggcggaggcttgggtgcgttcaagattcaacttcacccgtaacccaccgccatggccgaggaaggcattgctgctggaggtgtaatggacgttaatactgctttacaagaggttctgaagactgccctcatccacgatggcctagcacgtggaattcgcgaagctgccaaagccttagacaagcgccaagcccatctttgtgtgcttgcatccaactgtgatgagcctatgtatgtcaagttggtggaggccctttgtgctgaacaccaaatcaacctaattaaggttgatgacaacaagaaactaggagaatgggtaggcctttgtaaaattgacagagaggggaaaccccgtaaagtggttggttgcagttgtgtagtagttaaggactatggcaaggagtctcaggccaaggatgtcattgaagagtatttcaaatgcaagaaatgaagaaataaatctttggctcacattcctca

SEQ ID NO: 4805 - protein, 132 aa, Homo sapiens [sequence omitted]

SEQ ID NO: 4806 - DNA, 646 bp, Homo sapiens
ggcctctttccctgccgccgccgagtcgcgcggaggcggaggcttgggtgcgttcaagattcaacttcacccgtaacccaccgccatggccgaggaaggcattgctgctggaggtgtaatggacgttaatactgctttacaagaggttctgaagactgccctcatccacgatggcctagcacgtggaattcgcgaagctgccaaagccttagacaagtacgtgtatcagtctcaatactgtgggttcttgcaaccggaacaaaactgccacccaagggaagaaggcatggagttcatggtgttagcgcaaaagttctgaatggcatccgtcctaccggaaacctaggaaaaggcgccaagcccatctttgtgtgcttgcatccaactgtgatgagcctatgtatgtcaagttggtggaggccctttgtgctgaacaccaaatcaacctaattaaggttgatgacaacaagaaactaggagaatgggtaggcctttgtaaaattgacagagaggggaaaccccgtaaagtggttggttgcagttgtgtagtagttaaggactatggcaaggagtctcaggccaaggatgtcattgaagagtatttcaaatgcaagaaatgaagaaataaatctttggctcacattcc

SEQ ID NO: 4807 - protein, 77 aa, Homo sapiens
MAEEGIAAGGVMDVNTALQEVLKTALIHDGLARGIREAAKALDKYVYQSQYCGFLQPEQNCHPREEGMEFMVLAQKF

SEQ ID NO: 4808 - DNA, 472 bp, Homo sapiens
ctctttccctgccgccgccgagtcgcgcggaggcggaggcttgggtgcgttcaagattcaacttcacccgtaacccaccgccatggccgaggaagggttctgaagactgccctcatccacgatggcctagcacgtggaattcgcgaagctgccaaagccttagacaagtacgtgtatcagtctcaatactgtgggttcttgcaaccggaacaaaactgccacccaagggaagaaggcatggagttcatggtgttagcgcaaaagttctgaatggcatccgtcctaccggaaacctaggaaaaggtatcagaactcagatctataaagcccacttaaaatgtgtgggttgctgtttggaatggggataagcactcaaaactacagtgtttgaatgatgactttaattgtcggataccccttcactccttttatgagtgaaacataagagtctgacaaacctgtaggttgtgga

SEQ ID NO: 4809 - protein, 121 aa, Homo sapiens
LSLPPPSRAEAEAWVRSRFNFTRNPPPWPRKGSEDCPHPRWPSTWNSRSCQSLRQVRVSVSILWVLATGTKLPPKGRRHGVHGVSAKVLNGIRPTGNLGKGIRTQIYKAHLKCVGCCLEWG

SEQ ID NO: 4810 - DNA, 385 bp, Homo sapiens
ctctttccctgccgccgccgagtcgcgcggaggcggaggcttgggtgcgttcaagattcaacttcacccgtaacccaccgccatggccgaggaagggcgccaagcccatctttgtgtgcttgcatccaactgtgatgagcctatgtatgtcaagttggtggaggccctttgtgctgaacaccaaatcaacctaattaaggttgatgacaacaagaaactaggagaatgggtaggcctttgtaaaattgacagagaggggaaaccccgtaaagtggttggttgcagttgtgtagtagttaaggactatggcaaggagtctcaggccaaggatgtcattgaagagtatttcaaatgcaagaaatgaagaaataaatctttggctcac

SEQ ID NO: 4811 - protein, 93 aa, Homo sapiens
MAEEGRQAHLCVLASNCDEPMYVKLVEALCAEHQINLIKVDDNKKLGEWVGLCKIDREGKPRKVVGCSCVVVKDYGKESQAKDVIEEYFKCKK

SEQ ID NO: 4812 - DNA, 617 bp, Homo sapiens
aggccctttgtgctgaacaccaaatcaacctaattaaggtaaggctgctaaggattgtgttgggactaatgttcagtgatgcttgtatatgggggtaaattctgtgaagtctcaagctgttcattttgtgcaggtgtaaacattacgtgcacctgatactgtcggccattttaaagatgattgtaggtagaagcattttatacctgcagaattgaatcctaattttgacgttggtatacaacaaagattagtagcaggcttgtaggtgatcttagtgctgtacatgatgacaactggctccctctactgaactgccatgaggaaactgccatgtcacccttctgattacagccaccttttgggtttcatttaattttggtagtgttaatgtctattaatgtgattttttttttttttaacctttctcccaataggttgatgacaacaagaaactaggagaatgggtaggcctttgtaaaattgacagagaggggaaaccccgtaaagtggttggttgcagttgtgtagtagttaaggactatggcaaggagtctcaggccaaggatgtcattgaagagtatttcaaatgcaagaaatgaagaaataaatctttggct

SEQ ID NO: 4813 - protein, 54 aa, Homo sapiens
VDDNKKLGEWVGLCKIDREGKPRKVVGCSCVVVKDYGKESQAKDVIEEYFKCKK

SEQ ID NO: 4814 - DNA, 651 bp, Homo sapiens
gcaggcaggaaatcttgtagtaggtgatcgtggccttccttgggatccctgtttcccccttttattcccttttcacccagtaaaaccctgctttgctcactctttaaagcatctgtgagcgtaaatttttgtggccatgggatggacaagaaccacatgtttacctgaagtcctgtgacattttggtgtgcagcatgggagctccaaaagtgacattctttcagatgccagaggatgctatagaaaaatgcgtgccctcttgtaatactttgttcaagttctgatcagaaggatgaatgatggagcccaagaagccagagtctcattgtgttgctcaggctggaatccagtggcatgatctcggctcagtgcaacctccgcctcctgggttcaagcagttctcctagatcagcatcagcgtcccgagtagctgggattacaggcacccgccaccatgcctggctaatgttggtcaggctggctcgaactcctgacctcaagagatccacctgctttggcctcccaaagtgctcggattacaggcatgagctgccacacccagcctccaaatactttttttttaaatcaaaataatgatttcaatgactgagatctgttatgtatttcaacataatcatgtttcataaagat

SEQ ID NO: 4815 - protein, 36 aa, Homo sapiens
MMEPKKPESHCVAQAGIQWHDLGSVQPPPPGFKQFS

SEQ ID NO: 4816 - DNA, 741 bp, Homo sapiens
gtaggtgatcgtggccttccttgggatccctgtttcccccttttattcccttttcacccagtaaaaccctgctttgctcactctttaaagcatctgtgagcgtaaatttttgtggccatgggatggacaagaaccacatgtttacctgaagtcctgtgacattttggtgtgcagcatgggagctccaaaagtgagtcaagtgaacttattttgaatggtttatggcctttaataattacataagttatatactcctgtgatcaaaatttggagcatgtttgtttctctctgcctggttcctccagaatttagaacctatctacattctttcagatgccagaggatgctatagaaaaatgcgtgccctcttgtaatactttgttcaagttctgatcagaaggatgaatgatggagcccaagaagccagagtctcattgtgttgctcaggctggaatccagtggcatgatctcggctcagtgcaacctccgcctcctgggttcaagcagttctcctagatcagcatcagcgtcccgagtagctgggattacaggcacccgccaccatgcctggctaatgttggtcaggctggctcgaactcctgacctcaagagatccacctgctttggcctcccaaagtgctcggattacaggcatgagctgccacacccagcctccaaatactttttttttaaatcaaaataatgatttcaatgactgagatctgttatgtatttcaacat

SEQ ID NO: 4817 - protein, 36 aa, Homo sapiens; identical to SEQ ID NO: 4815

SEQ ID NO: 4818 - DNA, 564 bp, Homo sapiens
ctgtgtggaagctgggattccaatggcaggcaggaaatcttgtacatctgtgagcgtaaatttttgtggccatgggatggacaagaaccacatgtttacctgaagtcctgtgacattttggtgtgcagcatgggagctccaaaagtgacattctttcagatgccagaggatgctatagaaaaatgcgtgccctcttgtaatactttgttcaagttctgatcagaaggatgaatgatggagcccaagaagccagagtctcattgtgttgctcaggctggaatccagtggcatgatctcggctcagtgcaacctccgcctcctgggttcaagcagttctcctagatcagcatcagcgtcccgagtagctgggattacaggcacccgccaccatgcctggctaatgttggtcaggctggctcgaactcctgacctcaagagatccacctgctttggcctcccaaagtgctcggattacaggcatgagctgccacacccagcctccaaatactttttttttaaatcaaaataatgatttcaatgactgagatctgttatgtatttcaa

SEQ ID NO: 4819 - protein, 36 aa, Homo sapiens; identical to SEQ ID NO: 4815

SEQ ID NO: 4820 - DNA, 2086 bp, Homo sapiens
ctcttctcttgaagcagatgcgaaggctccccgaatgagaaagaatactcggaatcagcggtgaattgcagtgatctttcagagaaagcgcctgttcaactttgtcctctctcagagactcagagccttggggcactgagggatgccagttctgcctgttcatctggaacctggatctaaggagggaagaggcgttgcccctgctggcatagtcaggtaccagcccagccaggtattgaacgggctgagcttttcatgatggttcctgctgacctggaaacatcttaaatggaaggttagcttctatgagtcactgatactctttttattgctatttctaaatttccttggcttgaaaattacttctgctttgcagaaattatctgcttgcagctgtggataatttataacaatctctggtgaaacctcagaaaagagatatgcttttgtcttagatggatgtcagcagctgctgcagaacccggtgaaaacaccccccgggtagcacgaggctctgcgagccgtaactccgacaaacgcagaacttcttgaggctttcttcttctaaggagtatgacacagttaaaaaggaaaaaagaaccacaagcaaaacagttgccagtgaaataggagagggagctctttaaacaaggctggctgcagctggcctccgccgctcatctgcagggcgtgagcgcttggtccatgcagtgaagctcttccaacctgggtcaacgaaaacggagaagaaatggcccaagaaatagatctgagtgctctcaaggagttagaacgcgaggccattctccaggtcctgtaccgagaccaggcggttcaaaacacagaggaggagaggacacggaaactgaaaacacacctgcagcatctccggtggaaaggagcgaagaacacggactgggagcacaaagagaagtgctgtgcgcgctgccagcaggtgctggggttcctgctgcaccggggcgccgtgtgccggggctgcagccaccgcgtgtgtgcccagtgccgagtgttcctgagggggacccatgcctggaagtgcacggtgtgcttcgaggacaggaatgtcaaaataaaaactggagaatggttctatgaggaacgagccaagaaatttccaactggaggcaaacatgagacagttggagggcagctcttgcaatcttatcagaagctgagcaaaatttctgtggttcctcctactccacctcctgtcagcgagagccagtgcagccgcagtcctggcaggttacaggaatttggtcagtttagaggatttaataagtccgtggaaaatttgtttctgtctcttgctacccacgtgaaaaagctctccaaatcccagaatgatatgacttctgagaagcatcttctcgccacgggccccaggcagtgtgtgggacagacagagagacggagccagtctgacactgcggtcaacgtcaccaccaggaaggtcagtgcaccagatattctgaaacctctcaatcaagaggatcccaaatgctctactaaccctattttgaagcaacagaatctcccatccagtccggcacccagtaccatattctctggaggttttagacacggaagtttaattagcattgacagcacctgtacagagatgggcaattttgacaatgctaatgtcactggagaaatagaatttgccattcattattgcttcaaaacccattctttagaaatatgcatcaaggcctgtaagaaccttgcctatggagaagaaaagaagaaaaagtgcaatccgtatgtgaagacctacctgttgcccgacagatcctcccagggcctcaaggttccaggttgcagcaggcgtgaggcactgtgcgtctgcagaggggctacgaaccaggtgcagggtcccagctggagacccctttgaccttgagcagtctccatctgcggccctgtcccatggcttaaccgcctattggtatctgtgtatatttacgttaaacacaattatgttacctaagcctctggtgggttatctcctctttgagatgtagaaaatggccagattttaataaacgttgttacccatgtc

SEQ ID NO: 4821 - protein, 389 aa, Homo sapiens
MAQEIDLSALKELEREAILQVLYRDQAVQNTEEERTRKLKTHLQHLRWKGAKNTDWEHKEKCCARCQQVLGFLLHRGAVCRGCSHRVCAQCRVFLRGTHAWKCTVCFEDRNVKIKTGEWFYEERAKKFPTGGKHETVGGQLLQSYQKLSKISVVPPTPPPVSESQCSRSPGRLQEFGQFRGFNKSVENLFLSLATHVKKLSKSQNDMTSEKHLLATGPRQCVGQTERRSQSDTAVNVTTRKVSAPDILKPLNQEDPKCSTNPILKQQNLPSSPAPSTIFSGGFRHGSLISIDSTCTEMGNFDNANVTGEIEFAIHYCFKTHSLEICIKACKNLAYGEEKKKKCNPYVKTYLLPDRSSQGLKVPGCSRREALCVCRGATNQVQGPSWRPL

SEQ ID NO: 4822 - DNA, 2851 bp, Homo sapiens
ctcttctcttgaagcagatgcgaaggctccccgaatgagaaagaatactcggaatcagcggtgaattgcagtgatctttcagagaaagcgcctgttcaactttgtcctctctcagagactcagagccttggggcactgagggatgccagttctgcctgttcatctggaacctggatctaaggagggaagaggcgttgcccctgctggcatagtcaggtaccagcccagccaggtattgaacgggctgagcttttcatgatggttcctgctgacctggaaacatcttaaatggaaggttagcttctatgagtcactgatactctttttattgctatttctaaatttccttggcttgaaaattacttctgctttgcagaaattatctgcttgcagctgtggataatttataacaatctctggtgaaacctcagaaaagagatatgcttttgtcttagatggatgtcagcagctgctgcagaacccggtgaaaacaccccccgggtagcacgaggctctgcgagccgtaactccgacaaacgcagaacttcttgaggctttcttcttctaaggagtatgacacagttaaaaaggaaaaaagaaccacaagcaaaacagttgccagtgaaataggagagggagctctttaaacaaggctggctgcagctggcctccgccgctcatctgcagggcgtgagcgcttggtccatgcagtgaagctcttccaacctgggtcaacgaaaacggagaagaaatggcccaagaaatagatctgagtgctctcaaggagttagaacgcgaggccattctccaggtcctgtaccgagaccaggcggttcaaaacacagaggaggagaggacacggaaactgaaaacacacctgcagcatctccggtggaaaggagcgaagaacacggactgggagcacaaagagaagtgctgtgcgcgctgccagcaggtgctggggttcctgctgcaccggggcgccgtgtgccggggctgcagccaccgcgtgtgtgcccagtgccgagtgttcctgagggggacccatgcctggaagtgcacggtgtgcttcgaggacaggaatgtcaaaataaaaactggagaatggttctatgaggaacgagccaagaaatttccaactggaggcaaacatgagacagttggagggcagctcttgcaatcttatcagaagctgagcaaaatttctgtggttcctcctactccacctcctgtcagcgagagccagtgcagccgcagtcctggcaggttacaggaatttggtcagtttagaggatttaataagtccgtggaaaatttgtttctgtctcttgctacccacgtgaaaaagctctccaaatcccagaatgatatgacttctgagaagcatcttctcgccacgggccccaggcagtgtgtgggacagacagagagacggagccagtctgacactgcggtcaacgtcaccaccaggaaggtcagtgcaccagatattctgaaacctctcaatcaagaggatcccaaatgctctactaaccctattttgaagcaacagaatctcccatccagtccggcacccagtaccatattctctggaggttttagacacggaagtttaattagcattgacagcacctgtacagagatgggcaattttgacaatgctaatgtcactggagaaatagaatttgccattcattattgcttcaaaacccattctttagaaatatgcatcaaggcctgtaagaaccttgcctatggagaagaaaagaagaaaaagtgcaatccgtatgtgaagacctacctgttgcccgacagatcctcccagggaaagcgcaagactggagtccaaaggaacaccgtggacccgacctttcaggagaccttgaagtatcaggtggcccctgcccagctggtgacccggcagctgcaggtctcggtgtggcatctgggcacgctggcccggagagtgtttcttggagaagtgatcattcctctggccacgtgggactttgaagacagcacaacacagtccttccgctggcatccgctccgggccaaggcggagaaatacgaagacagcgttcctcagagtaatggagagctcacagtccgggctaagctggttctcccttcacggcccagaaaactccaagaggctcaagaagggacagatcagccatcacttcatggtcaactttgtttggtagtgctaggagccaagaatttacctgtgcggccagatggcaccttgaactcatttgttaagggctgtctcactctgccagaccaacaaaaactgagactgaagtcgccagtcctgaggaagcaggcttgcccccagtggaaacactcatttgtcttcagtggcgtaaccccagctcagctgaggcagtcaagcttggagttaactgtctgggatcaggccctctttggaatgaacgaccgcttgcttggaggaaccagacttggttcaaagggagacacagctgttggcggggatgcatgctcactatcgaagctccagtggcagaaagtcctttccagccccaatctatggacagacatgactcttgtcctgcactgacatgaaggcctcaaggttccaggttgcagcaggcgtgaggcactgtgcgtctgcagaggggctacgaaccaggtgcagggtcccagctggagacccctttgaccttgagcagtctccatctgcggccctgtcccatggcttaaccgcctattggtatctgtgtatatttacgttaaacacaattatgttacctaagcctctggtgggttatctcctctttgagatgtagaaaatggccagattttaataaacgttgttacccatgtc

SEQ ID NO: 4823 - protein, 610 aa, Homo sapiens
MAQEIDLSALKELEREAILQVLYRDQAVQNTEEERTRKLKTHLQHLRWKGAKNTDWEHKEKCCARCQQVLGFLLHRGAVCRGCSHRVCAQCRVFLRGTHAWKCTVCFEDRNVKIKTGEWFYEERAKKFPTGGKHETVGGQLLQSYQKLSKISVVPPTPPPVSESQCSRSPGRLQEFGQFRGFNKSVENLFLSLATHVKKLSKSQNDMTSEKHLLATGPRQCVGQTERRSQSDTAVNVTTRKVSAPDILKPLNQEDPKCSTNPILKQQNLPSSPAPSTIFSGGFRHGSLISIDSTCTEMGNFDNANVTGEIEFAIHYCFKTHSLEICIKACKNLAYGEEKKKKCNPYVKTYLLPDRSSQGKRKTGVQRNTVDPTFQETLKYQVAPAQLVTRQLQVSVWHLGTLARRVFLGEVIIPLATWDFEDSTTQSFRWHPLRAKAEKYEDSVPQSNGELTVRAKLVLPSRPRKLQEAQEGTDQPSLHGQLCLVVLGAKNLPVRPDGTLNSFVKGCLTLPDQQKLRLKSPVLRKQACPQWKHSFVFSGVTPAQLRQSSLELTVWDQALFGMNDRLLGGTRLGSKGDTAVGGDACSLSKLQWQKVLSSPNLWTDMTLVLH

SEQ ID NO: 4824 - DNA, 5766 bp, Homo sapiens
aaggctccccgaatgagaaagaatactcggaatcagcggtgaattgcagtgatctttcagagaaagcgcctgttcaactttgtcctctctcagagactcagagccttggggcactgagggatgccagttctgcctgttcatctggaacctggatctaaggagggaagaggcgttgcccctgctggcatagtcaggtaccagcccagccaggtattgaacgggctgagcttttcatgatggttcctgctgacctggaaacatcttaaatggaaggttagcttctatgagtcactgatactctttttattgctatttctaaatttccttggcttgaaaattacttctgctttgcagaaattatctgcttgcagctgtggataatttataacaatctctggtgaaacctcagaaaagagatatgcttttgtcttagatggatgtcagcagctgctgcagaacccggtgaaaacaccccccgggtagcacgaggctctgcgagccgtaactccgacaaacgcagaacttcttgaggctttcttcttctaaggagtatgacacagttaaaaaggaaaaaagaaccacaagcaaaacagttgccagtgaaataggagagggagctctttaaacaaggctggctgcagctggcctccgccgctcatctgcagggcgtgagcgcttggtccatgcagtgaagctcttccaacctgggtcaacgaaaacggagaagaaatggcccaagaaatagatctgagtgctctcaaggagttagaacgcgaggccattctccaggtcctgtaccgagaccaggcggttcaaaacacagaggaggagaggacacggtaggctgcccttcccggggggtcactttgggtgtttagctttctctgcttggggcctgccactccgtcgccaatgctgtttgcttacaaatcactacccacctgctgctgggcttcgtgcctgagaagggtcctaacgaaggtctgttggtggagatgatcctccttatgtaactaaacgtagaggacgctcaggaggaggagggaggccgctcttgttattcatttaaaacggtgcctttgggcggtaagtttgctgtctgccatctgcttgtctgtttgccgacttcgtgggaatcattcaagggacattttcaggcttccagtttaccccttctttaaggaaagacctccagttaagggttttcctacctcatttttgacggtgccgggaggtgtaaagaaaagcaaagaaagaggctcacaagcagcaactctgatggaatccagccctgtctttttttctttgctcgcttttgcttcccagctggctttgaggaagggggagcataaaatatgaacctgcttagcctgtttcctgaccgctttgccaacagggaactcttccctgtctgtctctaagctgcacgggccgtttgatatgggtcagcatttagaaaagcgtgctgaactctagcagagcagtgttccgccttagctgtcaagatccatctttaaacaggttggcgcttgtttatcaatgtctatggaggaagtgagggtttggtttctaatggcagaacacattagaaaacaaaactttggacaaccaaatgcttgaggagtgaggagaattttctggtatagtattcttcatcctccctgttatttcaaagctttctaagtgcacttgtaaactttcttccattaaaaactataatacagtctgggcgtggtggctcacgcctgtcatcccagcactttgggaggttgaggcgggcggatcacctgaggtcaggagtttgagaccagcctggccaacatagtgaaaccctgtctctactaaaaatacaaaaattagccgggcggtggcaggtgcctgtaatcccagctactcaggaggttgagacaggagaatcccttgaacctgggaggtggagtttgcagtgagctgagatcgcgccactgcactccagcctgggcaatagagcaagcctctgtctcaaaccaacaacaaaaaaacgaaaacaaaaactataatacagtgagaaaagtgaaattttatttgatgatgaaagatctttcagtgatttgagacatccttttgaatattaacaaagtgacatagacatagtgataacaaagttgtatttcaaagggtactaattctagggtagatcctgaaagttgaattttaaagtgcatttctgatgtcatcttgtttcttgggattggctcatcttttctacaagtaggtatcacagacattcataaaagagcgtgctagtaaatgacacctttttggtccaatacagtatctctttgcactatggctatttgtctaggggagtgggctgaccacttattaaaaaaaaaatgtagcaaaagcatagcatcagttgattttattgggcaacttatacccatagcaggatgtatgctgtgtgtttctagattattccatgccttgcagattagaatggatgctcctttcagtgtcttttcctctcctttcactattcttgcttactatcataacagcctttgggcaggaagggatggacctagcagggagcttctctgccccaggcatgttatttatactttgccatttagtcctcacagcaaccctgggaggtaaggtcatatcacctgtttcacggttgaaaaaacccttgagactcgactctgagatgttgagtgagagcccagttcacacagccatgttggagtccagggatgtcgaatgccaaagccccttcccttgccatgggggttactgcctgggctcttgccctatagcctggggtcaggtgttccatctaatactatcttctttaactctgagggctgcaggaaactgaaaacacacctgcagcatctccggtggaaaggagcgaagaacacggactgggagcacaaagagaagtgctgtgcgcgctgccagcaggtgctggggttcctgctgcaccggggcgccgtgtgccggggctgcagccaccgcgtgtgtgcccagtgccgagtgttcctgagggggacccatgcctggaagtgcacggtgtgcttcgaggacaggaatgtcaaaataaaaactggagaatggttctatgaggaacgagccaagaaatttccaactggaggcaaacatgagacagttggagggcagctcttgcaatcttatcagaagctgagcaaaatttctgtggttcctcctactccacctcctgtcagcgagagccagtgcagccgcagtcctggcaggaaggtcagtgcaccagatattctgaaacctctcaatcaagaggatcccaaatgctctactaaccctattttgaagcaacagaatctcccatccagtccggcacccagtaccatattctctggaggttttagacacggaagtttaattagcattgacagcacctgtacagagatgggcaattttgacaatgctaatgtcactggagaaatagaatttgccattcattattgcttcaaaacccattctttagaaatatgcatcaaggcctgtaagaaccttgcctatggagaagaaaagaagaaaaagtgcaatccgtatgtgaagacctacctgttgcccgacagatcctcccagggaaagcgcaagactggagtccaaaggaacaccgtggacccgacctttcaggagaccttgaagtatcaggtggcccctgcccagctggtgacccggcagctgcaggtctcggtgtggcatctgggcacgctggcccggagagtgtttcttggagaagtgatcattcctctggccacgtgggactttgaagacagcacaacacagtccttccgctggcatccgctccgggccaaggcggagaaatacgaagacagcgttcctcagagtaatggagagctcacagtccgggctaagctggttctcccttcacggcccagaaaactccaagaggctcaagaagggacagatcagccatcacttcatggtcaactttgtttggtagtgctaggagccaagaatttacctgtgcggccagatggcaccttgaactcatttgttaaggggtaggtattcgatgtaatcaaatatttattggtgatctagtatacatcacaacatggcccagaacctgcagcgaacactaaaaaacgtaagccacttaaaacgtcttattttagctttcctatgaaaatctaacaacacatattaaagaccctgatttccaaaaattcacgggatgtgtacatgctggagtactcgaaaccctaatcttctcagttctgtgatatcaggaagccagttttgaaatcaagcatgaaaatgtggtgtggtcagtaaatatttcctaagcttaacatctcctcttggaccaacagtaaaacgcatgactgtccacatttcattctcattcagtataggtgcattggcccctctaaaagtaaggcaaataccattattacattgaattgcaaactccccgtcagtgacatagggaaaaatgacggtcaagatagaactcaggctggacgcagtggctcgtgcctgtaatcccagcactttgggaggctgaggcaggtggatcacctgaggtcaggagttcaaaactagcctggccaacatgatgaaaccccatctctactaaaaatacaaaaattagctgggtgtggtggcgggcacctataatcctagctgctctggaggctgagataggagtcttccttgaacttggggggaggaggttgcagtgagctgagatggtgccacttcactccagcctgggcgacagaacaaaactccgtctcaaaaaaaggagaactgagcttatgttctaatcttgttgcttatctgcatggccttggacaagcttgtctgagttgattttcctgagaacagggttaaaaggagataacgtgtatctgcagtcatggtgggaggcaccccaaggaggaaagattaagatgagggccacgaggcctcagcatgcagctcgcccttcatacctgatgcagaattcggccctaagggaaatgtgccgagtcctgtggttcccaccctgcttcactggggagggtgtggatgttgtggacttggcacttttcttagtgcttcccgtctgcactgacgcacaggcctcaggagagaaggccgtgtggatggcaatgattgcagggtttgtgttccctcttcagctgtctcactctgccagaccaacaaaaactgagactgaagtcgccagtcctgaggaagcaggcttgcccccagtggaaacactcatttgtcttcagtggcgtaaccccagctcagctgaggcagtcaagcttggagttaactgtctgggatcaggccctctttggaatgaacgaccgcttgcttggaggaaccagacttggttcaaagggagacacagctgttggcggggatgcatgctcactatcgaagctccagtggcagaaagtcctttccagccccaatctatggacagacatgactcttgtcctgcactgacatgaaggcctcaaggttccaggttgcagcaggcgtgaggcactgtgcgtctgcagaggggctacgaaccaggtgcagggtcccagctggagacccctttgaccttgagcagtctccatctgcggccctgtcccatggcttaaccgcctattggtatctgtgtatatttacgttaaacacaattatgttacctaagcctctggtgggttatctcctctttgagatgtagaaaatggccagattttaataaacgttgttacccatgtc

SEQ ID NO: 4825 - protein, 438 aa, Homo sapiens
MPKPLPLPWGLLPGLLPYSLGSGVPSNTIFFNSEGCRKLKTHLQHLRWKGAKNTDWEHKEKCCARCQQVLGFLLHRGAVCRGCSHRVCAQCRVFLRGTHAWKCTVCFEDRNVKIKTGEWFYEERAKKFPTGGKHETVGGQLLQSYQKLSKISVVPPTPPPVSESQCSRSPGRKVSAPDILKPLNQEDPKCSTNPILKQQNLPSSPAPSTIFSGGFRHGSLISIDSTCTEMGNFDNANVTGEIEFAIHYCFKTHSLEICIKACKNLAYGEEKKKKCNPYVKTYLLPDRSSQGKRKTGVQRNTVDPTFQETLKYQVAPAQLVTRQLQVSVWHLGTLARRVFLGEVIIPLATWDFEDSTTQSFRWHPLRAKAEKYEDSVPQSNGELTVRAKLVLPSRPRKLQEAQEGTDQPSLHGQLCLVVLGAKNLPVRPDGTLNSFVKG

SEQ ID NO: 4826 - DNA, 488 bp, Homo sapiens
catatcttgctagtgtaagtgaccagaatttaaatctgtaaaggttcactttttcttgctaatgctgtgaggtgtttggaagttatctctgatcttcctggtacttactataggctcattcagtttactaattaactccatctgccaccttaaaaaccccaaagtgctgggattacaggcgtgagccaccacgcccggcccagaatgcacatttctgttgtgtattttgctgactccctatttggctagaagaggaaattctgctacccaagttcacggggtcaccagcagaccagcagcaagtgccccatggccatcccaacctcctagacagggtctcggggctctcactttcccccaaacttctggctacaactagactcaaacttcggcatcttccctctccttgcgttcctctttactcttttctaggatcttagtaatccctccatcctgtcctccacctgaccacagagcggcacggtgtg

SEQ ID NO: 4827 - protein, 37 aa, Homo sapiens [sequence omitted]

SEQ ID NO: 4828 - DNA, 2213 bp, Homo sapiens
actttgggtgtttagctttctctgcttggggcctgccactccgtcgccaatgctgtttgcttacaaatcactacccacctgctgctgggcttcgtgcctgagaagggtcctaacgaaggtctgttggtggagatgatcctccttatgtaactaaacgtagaggacgctcaggaggaggagggaggccgctcttgttattcatttaaaacggtgcctttgggcggaaactgaaaacacacctgcagcatctccggtggaaaggagcgaagaacacggactgggagcacaaagagaagtgctgtgcgcgctgccagcaggtgctggggttcctgctgcaccggggcgccgtgtgccggggctgcagccaccgcgtgtgtgcccagtgccgagtgttcctgagggggacccatgcctggaagtgcacggtgtgcttcgaggacaggaatgtcaaaataaaaactggagaatggttctatgaggaacgagccaagaaatttccaactggaggcaaacatgagacagttggagggcagctcttgcaatcttatcagaagctgagcaaaatttctgtggttcctcctactccacctcctgtcagcgagagccagtgcagccgcagtcctggcaggttacaggaatttggtcagtttagaggatttaataagtccgtggaaaatttgtttctgtctcttgctacccacgtgaaaaagctctccaaatcccagaatgatatgacttctgagaagcatcttctcgccacgggccccaggcagtgtgtgggacagacagagagacggagccagtctgacactgcggtcaacgtcaccaccaggaaggtcagtgcaccagatattctgaaacctctcaatcaagaggatcccaaatgctctactaaccctattttgaagcaacagaatctcccatccagtccggcacccagtaccatattctctggaggttttagacacggaagtttaattagcattgacagcacctgtacagagatgggcaattttgacaatgctaatgtcactggagaaatagaatttgccattcattattgcttcaaaacccattctttagaaatatgcatcaaggcctgtaagaaccttgcctatggagaagaaaagaagaaaaagtgcaatccgtatgtgaagacctacctgttgcccgacagatcctcccagggaaagcgcaagactggagtccaaaggaacaccgtggacccgacctttcaggagaccttgaagtatcaggtggcccctgcccagctggtgacccggcagctgcaggtctcggtgtggcatctgggcacgctggcccggagagtgtttcttggagaagtgatcattcctctggccacgtgggactttgaagacagcacaacacagtccttccgctggcatccgctccgggccaaggcggagaaatacgaagacagcgttcctcagagtaatggagagctcacagtccgggctaagctggttctcccttcacggcccagaaaactccaagaggctcaagaagggacagatcagccatcacttcatggtcaactttgtttggtagtgctaggagccaagaatttacctgtgcggccagatggcaccttgaactcatttgttaagggctgtctcactctgccagaccaacaaaaactgagactgaagtcgccagtcctgaggaagcaggcttgcccccagtggaaacactcatttgtcttcagtggcgtaaccccagctcagctgaggcagtcaagcttggagttaactgtctgggatcaggccctctttggaatgaacgaccgcttgcttggaggaaccagacttggttcaaagggagacacagctgttggcggggatgcatgctcactatcgaagctccagtggcagaaagtcctttccagccccaatctatggacagacatgactcttgtcctgcactgacatgaaggcctcaaggttccaggttgcagcaggcgtgaggcactgtgcgtctgcagaggggctacgaaccaggtgcagggtcccagctggagacccctttgaccttgagcagtctccatctgcggccctgtcccatggcttaaccgcctattggtatctgtgtatatttacgttaaacacaattatgttacctaagcctctggtgggttatctcctctttgagatgtagaaaatggccagattttaataaacgttgttacccatgtc

SEQ ID NO: 4829 - protein, 404 aa, Homo sapiens
MTSEKHLLATGPRQCVGQTERRSQSDTAVNVTTRKVSAPDILKPLNQEDPKCSTNPILKQQNLPSSPAPSTIFSGGFRHGSLISIDSTCTEMGNFDNANVTGEIEFAIHYCFKTHSLEICIKACKNLAYGEEKKKKCNPYVKTYLLPDRSSQGKRKTGVQRNTVDPTFQETLKYQVAPAQLVTRQLQVSVWHLGTLARRVFLGEVIIPLATWDFEDSTTQSFRWHPLRAKAEKYEDSVPQSNGELTVRAKLVLPSRPRKLQEAQEGTDQPSLHGQLCLVVLGAKNLPVRPDGTLNSFVKGCLTLPDQQKLRLKSPVLRKQACPQWKHSFVFSGVTPAQLRQSSLELTVWDQALFGMNDRLLGGTRLGSKGDTAVGGDACSLSKLQWQKVLSSPNLWTDMTLVLH

SEQ ID NO: 4830 - DNA, 813 bp, Homo sapiens
ggactctgcacaggaatatctgtccagcaagtaccttcaaggtctcctgaaaggtcgggtccacggtgttcctttggactccagtcttgcgctttccctgggaggatctgtcgggcaacaggttaagctttttgtgaaaatactcgaaatcggccaggaggccaggcgcagaagctcacaactataatcccagcactttgggaggatgaagtggacggatcacctgaggtcaggagttccagaccagcctggccagcatggtgaaaccctgtctctactaaaaatacaaaaattagccaggcatgatggcatgtacctgtaatcccagctactcaggaggctgaggcaggagaatcgcttgtacctgggagatggaggttgcagtgagccgagatcgcgccactgcactccagcctgggcaataaagcgaaattccatctcaaaaaagaaaaacaaaacaacccaaaaactggccaggcacctggctcagggaggattccataagccaggaatttgagaccagcgtgggcaatacacagggagaactcatctccacgaaaaatttaaaagtcaactgggtgtggtggtgtgcacctgtagtcccagctactcgacgcccgaagttggaggatcacctgagcccaggaggtcaaggctgaagtgagccatgataacatcactgcattccagcctagacggcaaagcaagactctgtctcaaaaaatcaaaccaaaacaaaaaatccctcaaaactccatctctaattcttcacagttcatttactcttaagttactgagcattacacattcatg

SEQ ID NO: 4831 - protein, 47 aa, Homo sapiens
MITSLHSSLDGKARLCLKKSNQNKKSLKTPSLILHSSFTLKLLSITH

SEQ ID NO: 4832 - DNA, 1692 bp, Homo sapiens
agagctctcggagcagattcagagggccctgcagctggaggaggagaggaagcgggcacaggaggaggccgagcgcctagaggctgaccgtatggctgcactgcgggctaaggaggagctggagagacaggcggtggatcagataaagagccaggagcagctggctgcggagcttgcagaatacactgccaagattgccctcctggaagaggcgcggaggcgcaaggaggatgaagttgaagagtggcagcacagggccaaagaagcccaggatgacctggtgaagaccaaggaggagctgcacctggtgatgacagcacccccgcccccaccaccccccgtgtacgagccgacgctgagcagcgagctgtcccaggcccgagatgagaataagaggacccacaatgacatcatccacaacgagaacatgaggcaaggccgggacaagtacaagacgctgcggcagatccggcagggcaacaccaagcagcgcatcgacgagttcgaggccctgtaacagccaggccaggaccaagggcagaggggtgctcatagcgggcgctgccagccccgccacgcttgtgtctttagtgctccaagtctaggaactccctcagatcccagttcctttagaaagcagttacccaacagaaacattctgggctgggaaccagggaggcgccctggtttgttttccccagttgtaatagtgccaagcaggcctgattctcgcgattattctcgaatcacctcctgtgttgtgctgggagcaggactgattgaattacggaaaatgcctgtaaagtctgagtaagaaacttcatgctggcctgtgtgatacaagagtcagcatcattaaaggaaacgtggcaggacttccatctgtgccatacttgttctgtattcgaaatgagctcaaattgattttttaatttctatgaaggatccatctttgtatatttacatgcttagaggggtgaaaattattttggaaattgagtctgaagcactctcgcacacacagtgattccctcctcccgtcactccacgcagctggcagagagcacagtgatcaccagcgtgagtggtggaggaggacacttggatttttttttttgttttttttttttttgcttaacagttttagaatacattgtacttatacaccttattaatgatcagctatatactatttatatacaagtgataatacagatttgtaacattagttttaaaaagggaaagttttgttctgtatattttgttaccttttacagaataaaagaattacatatgaaaaaccctctaaaccatggcacttgatgtgatgtggcaggagggcagtggtggagctggacctgcctgctgcagtcacgtgtaaacaggattattattagtgttttatgcatgtaatggactatgcacacttttaattttgtcagattcacacatgccactatgagctttcagactccagctgtgaagagactctgtttgcttgtgtttgtttgtttgcagtctctctctgccatggccttggcaggctgctggaaggcagcttgtggaggccgttggttccgcccactcattccttctcgtgcactgctttctccttcacagctaagatgccatgtgcaggtggattccatgccgcagacatgaaataaaagctttgcaaaggcacgaagcagc

SEQ ID NO: 4833 - protein, 141 aa, Homo sapiens
MAALRAKEELERQAVDQIKSQEQLAAELAEYTAKIALLEEARRRKEDEVEEWQHRAKEAQDDLVKTKEELHLVMTAPPPPPPPVYEPTLSSELSQARDENKRTHNDIIHNENMRQGRDKYKTLRQIRQGNTKQRIDEFEAL

SEQ ID NO: 4834 - DNA, 1882 bp, Homo sapiens
gagggtttgaatggctctggctttgtgtctttgcagagctctcggagcagattcagagggccctgcagctggaggaggagaggaagcgggcacaggaggaggccgagcgcctagaggctgaccgtatggctgcactgcgggctaaggaggagctggagagacaggcggtggatcagataaagagccaggagcagctggctgcggagcttgcagaatacactgccaagattgccctcctggaagaggcgcggaggcgcaaggaggatgaagttgaagagtggcagcacagggccaaagaagcccaggatgacctggtgaagaccaaggaggagctgcacctggtgatgacagcacccccgcccccaccaccccccgtgtacgagccggtgagctaccatgtccaggagagcttgcaggatgagggcgcagagcccacgggctacagcgcggagctgtctagtgagggcatccgggatgaccgcaatgaggagaagcgcatcactgaggcagagaagaacgagcgtgtgcagcggcagctgctgacgctgagcagcgagctgtcccaggcccgagatgagaataagaggacccacaatgacatcatccacaacgagaacatgaggcaaggccgggacaagtacaagacgctgcggcagatccggcagggcaacaccaagcagcgcatcgacgagttcgaggccctgtaacagccaggccaggaccaagggcagaggggtgctcatagcgggcgctgccagccccgccacgcttgtgtctttagtgctccaagtctaggaactccctcagatcccagttcctttagaaagcagttacccaacagaaacattctgggctgggaaccagggaggcgccctggtttgttttccccagttgtaatagtgccaagcaggcctgattctcgcgattattctcgaatcacctcctgtgttgtgctgggagcaggactgattgaattacggaaaatgcctgtaaagtctgagtaagaaacttcatgctggcctgtgtgatacaagagtcagcatcattaaaggaaacgtggcaggacttccatctgtgccatacttgttctgtattcgaaatgagctcaaattgattttttaatttctatgaaggatccatctttgtatatttacatgcttagaggggtgaaaattattttggaaattgagtctgaagcactctcgcacacacagtgattccctcctcccgtcactccacgcagctggcagagagcacagtgatcaccagcgtgagtggtggaggaggacacttggatttttttttttgttttttttttttttgcttaacagttttagaatacattgtacttatacaccttattaatgatcagctatatactatttatatacaagtgataatacagatttgtaacattagttttaaaaagggaaagttttgttctgtatattttgttaccttttacagaataaaagaattacatatgaaaaaccctctaaaccatggcacttgatgtgatgtggcaggagggcagtggtggagctggacctgcctgctgcagtcacgtgtaaacaggattattattagtgttttatgcatgtaatggactatgcacacttttaattttgtcagattcacacatgccactatgagctttcagactccagctgtgaagagactctgtttgcttgtgtttgtttgtttgcagtctctctctgccatggccttggcaggctgctggaaggcagcttgtggaggccgttggttccgcccactcattccttctcgtgcactgctttctccttcacagctaagatgccatgtgcaggtggattccatgccgcagacatgaaataaaagctttgcaaaggcacgaagcagc

SEQ ID NO: 4835 - protein, 193 aa, Homo sapiens
MAALRAKEELERQAVDQIKSQEQLAAELAEYTAKIALLEEARRRKEDEVEEWQHRAKEAQDDLVKTKEELHLVMTAPPPPPPPVYEPVSYHVQESLQDEGAEPTGYSAELSSEGIRDDRNEEKRITEAEKNERVQRQLLTLSSELSQARDENKRTHNDIIHNENMRQGRDKYKTLRQIRQGNTKQRIDEFEAL

SEQ ID NO: 4836 - DNA, 1652 bp, Homo sapiens
tggaaagcgagggctcctaggtccctgggctgagggtttgaatggctctggctttgtgtctttgcagagctctcggagcagattcagagggccctgcagctggaggaggagaggaagcgggcacaggaggaggccgagcgcctagaggctgaccgtatggctgcactgcgggctaaggaggagctggagagacaggcggtggatcagataaagagccaggagcagctggctgcggagcttgcagaatacactgccaagattgccctcctggaagaggcgcggaggcgcaaggaggatgaagttgaagagtggcagcacagggccaaagaagcccaggatgacctggtgaagaccaaggaggagctgcacctggtgatgacagcacccccgcccccaccaccccccgtgtacgagccggtgagctaccatgtccagggcaacaccaagcagcgcatcgacgagttcgaggccctgtaacagccaggccaggaccaagggcagaggggtgctcatagcgggcgctgccagccccgccacgcttgtgtctttagtgctccaagtctaggaactccctcagatcccagttcctttagaaagcagttacccaacagaaacattctgggctgggaaccagggaggcgccctggtttgttttccccagttgtaatagtgccaagcaggcctgattctcgcgattattctcgaatcacctcctgtgttgtgctgggagcaggactgattgaattacggaaaatgcctgtaaagtctgagtaagaaacttcatgctggcctgtgtgatacaagagtcagcatcattaaaggaaacgtggcaggacttccatctgtgccatacttgttctgtattcgaaatgagctcaaattgattttttaatttctatgaaggatccatctttgtatatttacatgcttagaggggtgaaaattattttggaaattgagtctgaagcactctcgcacacacagtgattccctcctcccgtcactccacgcagctggcagagagcacagtgatcaccagcgtgagtggtggaggaggacacttggatttttttttttgttttttttttttttgcttaacagttttagaatacattgtacttatacaccttattaatgatcagctatatactatttatatacaagtgataatacagatttgtaacattagttttaaaaagggaaagttttgttctgtatattttgttaccttttacagaataaaagaattacatatgaaaaaccctctaaaccatggcacttgatgtgatgtggcaggagggcagtggtggagctggacctgcctgctgcagtcacgtgtaaacaggattattattagtgttttatgcatgtaatggactatgcacacttttaattttgtcagattcacacatgccactatgagctttcagactccagctgtgaagagactctgtttgcttgtgtttgtttgtttgcagtctctctctgccatggccttggcaggctgctggaaggcagcttgtggaggccgttggttccgcccactcattccttctcgtgcactgctttctccttcacagctaagatgccatgtgcaggtggattccatgccgcagacatgaaataaaagctttgcaaaggcacgaagcagc

SEQ ID NO: 4837 - protein, 106 aa, Homo sapiens
MAALRAKEELERQAVDQIKSQEQLAAELAEYTAKIALLEEARRRKEDEVEEWQHRAKEAQDDLVKTKEELHLVMTAPPPPPPPVYEPVSYHVQGNTKQRIDEFEAL

SEQ ID NO: 4838 - DNA, 1555 bp, Homo sapiens
tccaggtggccctgttctgttttgtaggactttgtgttttatgccccacgtctgagaatcaacaagcggatcctgcagctctgcatgggcaaccatgagttgtatatgcgccgcaggaagcctgacaccatcgaggtgcagcagatgaaggcccaggcccgggaggagaagcatcagaagcagagaagaacgagcgtgtgcagcggcagctgctgacgctgagcagcgagctgtcccaggcccgagatgagaataagaggacccacaatgacatcatccacaacgagaacatgaggcaaggccgggacaagtacaagacgctgcggcagatccggcagggcaacaccaagcagcgcatcgacgagttcgaggccctgtaacagccaggccaggaccaagggcagaggggtgctcatagcgggcgctgccagccccgccacgcttgtgtctttagtgctccaagtctaggaactccctcagatcccagttcctttagaaagcagttacccaacagaaacattctgggctgggaaccagggaggcgccctggtttgttttccccagttgtaatagtgccaagcaggcctgattctcgcgattattctcgaatcacctcctgtgttgtgctgggagcaggactgattgaattacggaaaatgcctgtaaagtctgagtaagaaacttcatgctggcctgtgtgatacaagagtcagcatcattaaaggaaacgtggcaggacttccatctgtgccatacttgttctgtattcgaaatgagctcaaattgattttttaatttctatgaaggatccatctttgtatatttacatgcttagaggggtgaaaattattttggaaattgagtctgaagcactctcgcacacacagtgattccctcctcccgtcactccacgcagctggcagagagcacagtgatcaccagcgtgagtggtggaggaggacacttggatttttttttttgttttttttttttttgcttaacagttttagaatacattgtacttatacaccttattaatgatcagctatatactatttatatacaagtgataatacagatttgtaacattagttttaaaaagggaaagttttgttctgtatattttgttaccttttacagaataaaagaattacatatgaaaaaccctctaaaccatggcacttgatgtgatgtggcaggagggcagtggtggagctggacctgcctgctgcagtcacgtgtaaacaggattattattagtgttttatgcatgtaatggactatgcacacttttaattttgtcagattcacacatgccactatgagctttcagactccagctgtgaagagactctgtttgcttgtgtttgtttgtttgcagtctctctctgccatggccttggcaggctgctggaaggcagcttgtggaggccgttggttccgcccactcattccttctcgtgcactgctttctccttcacagctaagatgccatgtgcaggtggattccatgccgcagacatgaaataaaagctttgcaaaggcacgaagcagc

SEQ ID NO: 4839 - protein, 43 aa, Homo sapiens
MGNHELYMRRRKPDTIEVQQMKAQAREEKHQKQRRTSVCSGSC

SEQ ID NO: 4840 - DNA, 3100 bp, Homo sapiens
gcggcagcgcgctgcgggcgccgagtgtcgggcgcggcaggaggacgaggcagggcgggcgggcgctctaagggttctgctctgactccaggttgggacagcgtcttcgctgctgctggatagtcgtgttttcggggatcgaggatactcaccagaaaccgaaaatgccgaaaccaatcaatgtccgagttaccaccatggatgcagagctggagtttgcaatccagccaaatacaactggaaaacagctttttgatcaggtggtaaagactatcggcctccgggaagtgtggtactttggcctccactatgtggataataaaggatttcctacctggctgaagctggataagaaggtgtctgcccaggaggtcaggaaggagaatcccctccagttcaagttccgggccaagttctaccctgaagatgtggctgaggagctcatccaggacatcacccagaaacttttcttcctccaagtgaaggaaggaatccttagcgatgagatctactgcccccctgagactgccgtgctcttggggtcctacgctgtgcaggccaagtttggggactacaacaaagaagtgcacaagtctgggtacctcagctctgagcggctgatccctcaaagagtgatggaccagcacaaacttaccagggaccagtgggaggaccggatccaggtgtggcatgcggaacaccgtgggatgctcaaagataatgctatgttggaatacctgaagattgctcaggacctggaaatgtatggaatcaactatttcgagataaaaaacaagaaaggaacagacctttggcttggagttgatgcccttggactgaatatttatgagaaagatgataagttaaccccaaagattggctttccttggagtgaaatcaggaacatctctttcaatgacaaaaagtttgtcattaaacccatcgacaagaaggcacctgactttgtgttttatgccccacgtctgagaatcaacaagcggatcctgcagctctgcatgggcaaccatgagttgtatatgcgccgcaggaagcctgacaccatcgaggtgcagcagatgaaggcccaggcccgggaggagaagcatcagaagcagctggagcggcaacagctggaaacagagaagaaaaggagagaaaccgtggagagagagaaagagcagatgatgcgcgagaaggaggagttgatgctgcggctgcaggactatgaggagaagacaaagaaggcagagagagagctctcggagcagattcagagggccctgcagctggaggaggagaggaagcgggcacaggaggaggccgagcgcctagaggctgaccgtatggctgcactgcgggctaaggaggagctggagagacaggcggtggatcagataaagagccaggagcagctggctgcggagcttgcagaatacactgccaagattgccctcctggaagaggcgcggaggcgcaaggaggatgaagttgaagagtggcagcacagggccaaagaagcccaggatgacctggtgaagaccaaggaggagctgcacctggtgatgacagcacccccgcccccaccaccccccgtgtacgagccggtgagctaccatgtccaggagagcttgcaggatgagggcgcagagcccacgggctacagcgcggagctgtctagtgagggcatccgggatgaccgcaatgaggagaagcgcatcactgaggcagagaagaacgagcgtgtgcagcggcagctgctgacgctgagcagcgagctgtcccaggcccgagatgagaataagaggacccacaatgacatcatccacaacgagaacatgaggcaaggccgggacaagtacaagacgctgcggcagatccggcagggcaacaccaagcagcgcatcgacgagttcgaggccctgtaacagccaggccaggaccaagggcagaggggtgctcatagcgggcgctgccagccccgccacgcttgtgtctttagtgctccaagtctaggaactccctcagatcccagttcctttagaaagcagttacccaacagaaacattctgggctgggaaccagggaggcgccctggtttgttttccccagttgtaatagtgccaagcaggcctgattctcgcgattattctcgaatcacctcctgtgttgtgctgggagcaggactgattgaattacggaaaatgcctgtaaagtctgagtaagaaacttcatgctggcctgtgtgatacaagagtcagcatcattaaaggaaacgtggcaggacttccatctgtgccatacttgttctgtattcgaaatgagctcaaattgattttttaatttctatgaaggatccatctttgtatatttacatgcttagaggggtgaaaattattttggaaattgagtctgaagcactctcgcacacacagtgattccctcctcccgtcactccacgcagctggcagagagcacagtgatcaccagcgtgagtggtggaggaggacacttggatttttttttttgttttttttttttttgcttaacagttttagaatacattgtacttatacaccttattaatgatcagctatatactatttatatacaagtgataatacagatttgtaacattagttttaaaaagggaaagttttgttctgtatattttgttaccttttacagaataaaagaattacatatgaaaaaccctctaaaccatggcacttgatgtgatgtggcaggagggcagtggtggagctggacctgcctgctgcagtcacgtgtaaacaggattattattagtgttttatgcatgtaatggactatgcacacttttaattttgtcagattcacacatgccactatgagctttcagactccagctgtgaagagactctgtttgcttgtgtttgtttgtttgcagtctctctctgccatggccttggcaggctgctggaaggcagcttgtggaggccgttggttccgcccactcattccttctcgtgcactgctttctccttcacagctaagatgccatgtgcaggtggattccatgccgcagacatgaaataaaagctttgcaaaggcacgaagcagc

SEQ ID NO: 4841 - protein, 586 aa, Homo sapiens; identical to SEQ ID NO: 616

SEQ ID NO: 4842 - DNA, 3105 bp, Homo sapiens
ggacccgccccgccggggcttttgggagcgcgggcagcgagcgcactcggcggacgcaagggcggcggggagcacacggagcactgcaggcgccgggttgggacagcgtcttcgctgctgctggatagtcgtgttttcggggatcgaggatactcaccagaaaccgaaaatgccgaaaccaatcaatgtccgagttaccaccatggatgcagagctggagtttgcaatccagccaaatacaactggaaaacagctttttgatcaggtggtaaagactatcggcctccgggaagtgtggtactttggcctccactatgtggataataaaggatttcctacctggctgaagctggataagaaggtgtctgcccaggaggtcaggaaggagaatcccctccagttcaagttccgggccaagttctaccctgaagatgtggctgaggagctcatccaggacatcacccagaaacttttcttcctccaagtgaaggaaggaatccttagcgatgagatctactgcccccctgagactgccgtgctcttggggtcctacgctgtgcaggccaagtttggggactacaacaaagaagtgcacaagtctgggtacctcagctctgagcggctgatccctcaaagagtgatggaccagcacaaacttaccagggaccagtgggaggaccggatccaggtgtggcatgcggaacaccgtgggatgctcaaagataatgctatgttggaatacctgaagattgctcaggacctggaaatgtatggaatcaactatttcgagataaaaaacaagaaaggaacagacctttggcttggagttgatgcccttggactgaatatttatgagaaagatgataagttaaccccaaagattggctttccttggagtgaaatcaggaacatctctttcaatgacaaaaagtttgtcattaaacccatcgacaagaaggcacctgactttgtgttttatgccccacgtctgagaatcaacaagcggatcctgcagctctgcatgggcaaccatgagttgtatatgcgccgcaggaagcctgacaccatcgaggtgcagcagatgaaggcccaggcccgggaggagaagcatcagaagcagctggagcggcaacagctggaaacagagaagaaaaggagagaaaccgtggagagagagaaagagcagatgatgcgcgagaaggaggagttgatgctgcggctgcaggactatgaggagaagacaaagaaggcagagagagagctctcggagcagattcagagggccctgcagctggaggaggagaggaagcgggcacaggaggaggccgagcgcctagaggctgaccgtatggctgcactgcgggctaaggaggagctggagagacaggcggtggatcagataaagagccaggagcagctggctgcggagcttgcagaatacactgccaagattgccctcctggaagaggcgcggaggcgcaaggaggatgaagttgaagagtggcagcacagggccaaagaagcccaggatgacctggtgaagaccaaggaggagctgcacctggtgatgacagcacccccgcccccaccaccccccgtgtacgagccggtgagctaccatgtccaggagagcttgcaggatgagggcgcagagcccacgggctacagcgcggagctgtctagtgagggcatccgggatgaccgcaatgaggagaagcgcatcactgaggcagagaagaacgagcgtgtgcagcggcagctgctgacgctgagcagcgagctgtcccaggcccgagatgagaataagaggacccacaatgacatcatccacaacgagaacatgaggcaaggccgggacaagtacaagacgctgcggcagatccggcagggcaacaccaagcagcgcatcgacgagttcgaggccctgtaacagccaggccaggaccaagggcagaggggtgctcatagcgggcgctgccagccccgccacgcttgtgtctttagtgctccaagtctaggaactccctcagatcccagttcctttagaaagcagttacccaacagaaacattctgggctgggaaccagggaggcgccctggtttgttttccccagttgtaatagtgccaagcaggcctgattctcgcgattattctcgaatcacctcctgtgttgtgctgggagcaggactgattgaattacggaaaatgcctgtaaagtctgagtaagaaacttcatgctggcctgtgtgatacaagagtcagcatcattaaaggaaacgtggcaggacttccatctgtgccatacttgttctgtattcgaaatgagctcaaattgattttttaatttctatgaaggatccatctttgtatatttacatgcttagaggggtgaaaattattttggaaattgagtctgaagcactctcgcacacacagtgattccctcctcccgtcactccacgcagctggcagagagcacagtgatcaccagcgtgagtggtggaggaggacacttggatttttttttttgttttttttttttttgcttaacagttttagaatacattgtacttatacaccttattaatgatcagctatatactatttatatacaagtgataatacagatttgtaacattagttttaaaaagggaaagttttgttctgtatattttgttaccttttacagaataaaagaattacatatgaaaaaccctctaaaccatggcacttgatgtgatgtggcaggagggcagtggtggagctggacctgcctgctgcagtcacgtgtaaacaggattattattagtgttttatgcatgtaatggactatgcacacttttaattttgtcagattcacacatgccactatgagctttcagactccagctgtgaagagactctgtttgcttgtgtttgtttgtttgcagtctctctctgccatggccttggcaggctgctggaaggcagcttgtggaggccgttggttccgcccactcattccttctcgtgcactgctttctccttcacagctaagatgccatgtgcaggtggattccatgccgcagacatgaaataaaagctttgcaaaggcacgaagcagc

SEQ ID NO: 4843 - protein, 586 aa, Homo sapiens; identical to SEQ ID NO: 616

SEQ ID NO: 4844 - DNA, 1267 bp, Homo sapiens
tggaaagcgagggctcctaggtccctgggctgagggtttgaatggctctggctttgtgtctttgcagagctctcggagcagattcagagggccctgcagctggaggaggagaggaagcgggcacaggaggaggccgagcgcctagaggctgaccgtatggctgcactgcgggctaaggaggagctggagagacaggcggtggatcagataaagagccaggagcagctggctgcggagcttgcagaatacactgccaagattgccctcctggaagaggcgcggaggcgcaaggaggatgaagttgaagagtggcagcacagggccaaagaagcccaggatgacctggtgaagaccaaggaggagctgcacctggtgatgacagcacccccgcccccaccaccccccgtgtacgagccggtgagctaccatgtccagggcaacaccaagcagcgcatcgacgagttcgaggccctgtaacagccaggccaggaccaagggcagaggggtgctcatagcgggcgctgccagccccgccacgcttgtgtctttagtgctccaagtctaggaactccctcagatcccagttcctttagaaagcagttacccaacagaaacattctgggctgggaaccagggaggcgccctggtttgttttccccagttgtaatagtgccaagcaggcctgattctcgcgattattctcgaatcacctcctgtgttgtgctgggagcaggactgattgaattacggaaaatgcctgtaaagtctgagtaagaaacttcatgctggcctgtgtgatacaagagtcagcatcattaaaggaaacgtggcaggacttccatctgtgccatacttgttctgtattcgaaatgagctcaaattgattttttaatttctatgaaggatccatctttgtatatttacatgcttagaggggtgaaaattattttggaaattgagtctgaagcactctcgcacacacagtgattccctcctcccgtcactccacgcagctggcagagagcacagtgatcaccagcgtgagtggtggaggaggacacttggatttttttttttgttttttttttttttgcttaacagttttagaatacattgtacttatacaccttattaatgatcagctatatactatttatatacaagtgataatacagatttgtaacattagttttaaaaagggaaagttttgttctgtatattttgttaccttttacagaataaaagaattacatatgaaaaaccctct

SEQ ID NO: 4845 - protein, 106 aa, Homo sapiens; identical to SEQ ID NO: 4837

SEQ ID NO: 4846 - DNA, 1170 bp, Homo sapiens
tccaggtggccctgttctgttttgtaggactttgtgttttatgccccacgtctgagaatcaacaagcggatcctgcagctctgcatgggcaaccatgagttgtatatgcgccgcaggaagcctgacaccatcgaggtgcagcagatgaaggcccaggcccgggaggagaagcatcagaagcagagaagaacgagcgtgtgcagcggcagctgctgacgctgagcagcgagctgtcccaggcccgagatgagaataagaggacccacaatgacatcatccacaacgagaacatgaggcaaggccgggacaagtacaagacgctgcggcagatccggcagggcaacaccaagcagcgcatcgacgagttcgaggccctgtaacagccaggccaggaccaagggcagaggggtgctcatagcgggcgctgccagccccgccacgcttgtgtctttagtgctccaagtctaggaactccctcagatcccagttcctttagaaagcagttacccaacagaaacattctgggctgggaaccagggaggcgccctggtttgttttccccagttgtaatagtgccaagcaggcctgattctcgcgattattctcgaatcacctcctgtgttgtgctgggagcaggactgattgaattacggaaaatgcctgtaaagtctgagtaagaaacttcatgctggcctgtgtgatacaagagtcagcatcattaaaggaaacgtggcaggacttccatctgtgccatacttgttctgtattcgaaatgagctcaaattgattttttaatttctatgaaggatccatctttgtatatttacatgcttagaggggtgaaaattattttggaaattgagtctgaagcactctcgcacacacagtgattccctcctcccgtcactccacgcagctggcagagagcacagtgatcaccagcgtgagtggtggaggaggacacttggatttttttttttgttttttttttttttgcttaacagttttagaatacattgtacttatacaccttattaatgatcagctatatactatttatatacaagtgataatacagatttgtaacattagttttaaaaagggaaagttttgttctgtatattttgttaccttttacagaataaaagaattacatatgaaaaaccctct

SEQ ID NO: 4847 - protein, 43 aa, Homo sapiens; identical to SEQ ID NO: 4839

SEQ ID NO: 4848 - DNA, 1400 bp, Homo sapiens
ggaggccgagcgcctagaggctgaccgtatggctgcactgcgggctaaggaggagctggagagacaggcggtggatcagataaagagccaggagcagctggctgcggagcttgcagaatacactgccaagattgccctcctggaagaggcgcggaggcgcaaggaggatgaagttgaagagtggcagcacagggccaaagaagcccaggatgacctggtgaagaccaaggaggagctgcacctggtgatgacagcacccccgcccccaccaccccccgtgtacgagccggtgagctaccatgtccaggagagcttgcaggatgagggcgcagagcccacgggctacagcgcggagctgtctagtgagggcatccgggatgaccgcaatgaggagaagcgcatcactgaggcagagaagaacgagcgtgtgcagcggcagctgctgacgctgagcagcgagctgtcccaggcccgagatgagaataagaggacccacaatgacatcatccacaacgagaacatgaggcaaggccgggacaagtacaagacgctgcggcagatccggcagggcaacaccaagcagcgcatcgacgagttcgaggccctgtaacagccaggccaggaccaagggcagaggggtgctcatagcgggcgctgccagccccgccacgcttgtgtctttagtgctccaagtctaggaactccctcagatcccagttcctttagaaagcagttacccaacagaaacattctgggctgggaaccagggaggcgccctggtttgttttccccagttgtaatagtgccaagcaggcctgattctcgcgattattctcgaatcacctcctgtgttgtgctgggagcaggactgattgaattacggaaaatgcctgtaaagtctgagtaagaaacttcatgctggcctgtgtgatacaagagtcagcatcattaaaggaaacgtggcaggacttccatctgtgccatacttgttctgtattcgaaatgagctcaaattgattttttaatttctatgaaggatccatctttgtatatttacatgcttagaggggtgaaaattattttggaaattgagtctgaagcactctcgcacacacagtgattccctcctcccgtcactccacgcagctggcagagagcacagtgatcaccagcgtgagtggtggaggaggacacttggatttttttttttgttttttttttttttgcttaacagttttagaatacattgtacttatacaccttattaatgatcagctatatactatttatatacaagtgataatacagatttgtaacattagttttaaaaagggaaagttttgttctgtatattttgttaccttttacagaataaaagaattacatatgaaaaaccctct

SEQ ID NO: 4849 - protein, 193 aa, Homo sapiens; identical to SEQ ID NO: 4835

SEQ ID NO: 4850 - DNA, 1307 bp, Homo sapiens
agagctctcggagcagattcagagggccctgcagctggaggaggagaggaagcgggcacaggaggaggccgagcgcctagaggctgaccgtatggctgcactgcgggctaaggaggagctggagagacaggcggtggatcagataaagagccaggagcagctggctgcggagcttgcagaatacactgccaagattgccctcctggaagaggcgcggaggcgcaaggaggatgaagttgaagagtggcagcacagggccaaagaagcccaggatgacctggtgaagaccaaggaggagctgcacctggtgatgacagcacccccgcccccaccaccccccgtgtacgagccgacgctgagcagcgagctgtcccaggcccgagatgagaataagaggacccacaatgacatcatccacaacgagaacatgaggcaaggccgggacaagtacaagacgctgcggcagatccggcagggcaacaccaagcagcgcatcgacgagttcgaggccctgtaacagccaggccaggaccaagggcagaggggtgctcatagcgggcgctgccagccccgccacgcttgtgtctttagtgctccaagtctaggaactccctcagatcccagttcctttagaaagcagttacccaacagaaacattctgggctgggaaccagggaggcgccctggtttgttttccccagttgtaatagtgccaagcaggcctgattctcgcgattattctcgaatcacctcctgtgttgtgctgggagcaggactgattgaattacggaaaatgcctgtaaagtctgagtaagaaacttcatgctggcctgtgtgatacaagagtcagcatcattaaaggaaacgtggcaggacttccatctgtgccatacttgttctgtattcgaaatgagctcaaattgattttttaatttctatgaaggatccatctttgtatatttacatgcttagaggggtgaaaattattttggaaattgagtctgaagcactctcgcacacacagtgattccctcctcccgtcactccacgcagctggcagagagcacagtgatcaccagcgtgagtggtggaggaggacacttggatttttttttttgttttttttttttttgcttaacagttttagaatacattgtacttatacaccttattaatgatcagctatatactatttatatacaagtgataatacagatttgtaacattagttttaaaaagggaaagttttgttctgtatattttgttaccttttacagaataaaagaattacatatgaaaaaccctct

SEQ ID NO: 4851 - protein, 141 aa, Homo sapiens; identical to SEQ ID NO: 4833

SEQ ID NO: 4852 - DNA, 1497 bp, Homo sapiens
gagggtttgaatggctctggctttgtgtctttgcagagctctcggagcagattcagagggccctgcagctggaggaggagaggaagcgggcacaggaggaggccgagcgcctagaggctgaccgtatggctgcactgcgggctaaggaggagctggagagacaggcggtggatcagataaagagccaggagcagctggctgcggagcttgcagaatacactgccaagattgccctcctggaagaggcgcggaggcgcaaggaggatgaagttgaagagtggcagcacagggccaaagaagcccaggatgacctggtgaagaccaaggaggagctgcacctggtgatgacagcacccccgcccccaccaccccccgtgtacgagccggtgagctaccatgtccaggagagcttgcaggatgagggcgcagagcccacgggctacagcgcggagctgtctagtgagggcatccgggatgaccgcaatgaggagaagcgcatcactgaggcagagaagaacgagcgtgtgcagcggcagctgctgacgctgagcagcgagctgtcccaggcccgagatgagaataagaggacccacaatgacatcatccacaacgagaacatgaggcaaggccgggacaagtacaagacgctgcggcagatccggcagggcaacaccaagcagcgcatcgacgagttcgaggccctgtaacagccaggccaggaccaagggcagaggggtgctcatagcgggcgctgccagccccgccacgcttgtgtctttagtgctccaagtctaggaactccctcagatcccagttcctttagaaagcagttacccaacagaaacattctgggctgggaaccagggaggcgccctggtttgttttccccagttgtaatagtgccaagcaggcctgattctcgcgattattctcgaatcacctcctgtgttgtgctgggagcaggactgattgaattacggaaaatgcctgtaaagtctgagtaagaaacttcatgctggcctgtgtgatacaagagtcagcatcattaaaggaaacgtggcaggacttccatctgtgccatacttgttctgtattcgaaatgagctcaaattgattttttaatttctatgaaggatccatctttgtatatttacatgcttagaggggtgaaaattattttggaaattgagtctgaagcactctcgcacacacagtgattccctcctcccgtcactccacgcagctggcagagagcacagtgatcaccagcgtgagtggtggaggaggacacttggatttttttttttgttttttttttttttgcttaacagttttagaatacattgtacttatacaccttattaatgatcagctatatactatttatatacaagtgataatacagatttgtaacattagttttaaaaagggaaagttttgttctgtatattttgttaccttttacagaataaaagaattacatatgaaaaaccctct

SEQ ID NO: 4853 - protein, 193 aa, Homo sapiens; identical to SEQ ID NO: 4835

SEQ ID NO: 4854 - DNA, 995 bp, Homo sapiens
ggaggccgagcgcctagaggctgaccgtatggctgcactgcgggctaaggaggagctggagagacaggcggtggatcagataaagagccaggagcagctggctgcggagcttgcagaatacactgccaagattgccctcctggaagaggcgcggaggcgcaaggaggatgaagttgaagagtggcagcacagggccaaagaagcccaggatgacctggtgaagaccaaggaggagctgcacctggtgatgacagcacccccgcccccaccaccccccgtgtacgagccggtgagctaccatgtccaggagagcttgcaggatgagggcgcagagcccacgggctacagcgcggagctgtctagtgagggcatccgggatgaccgcaatgaggagaagcgcatcactgaggcagagaagaacgagcgtgtgcagcggcagctgctgacgctgagcagcgagctgtcccaggcccgagatgagaataagaggacccacaatgacatcatccacaacgagaacatgaggcaaggccgggacaagtacaagacgctgcggcagatccggcagggcaacaccaagcagcgcatcgacgagttcgaggccctgtaacagccaggccaggaccaagggcagaggggtgctcatagcgggcgctgccagccccgccacgcttgtgtctttagtgctccaagtctaggaactccctcagatcccagttcctttagaaagcagttacccaacagaaacattctgggctgggaaccagggaggcgccctggtttgttttccccagttgtaatagtgccaagcaggcctgattctcgcgattattctcgaatcacctcctgtgttgtgctgggagcaggactgattgaattacggaaaatgcctgtaaagtctgagtaagaaacttcatgctggcctgtgtgatacaagagtcagcatcattaaaggaaacgtggcaggacttccatctgtgccatacttgttctgt

SEQ ID NO: 4855 - protein, 193 aa, Homo sapiens; identical to SEQ ID NO: 4835

SEQ ID NO: 4856 - DNA, 902 bp, Homo sapiens
agagctctcggagcagattcagagggccctgcagctggaggaggagaggaagcgggcacaggaggaggccgagcgcctagaggctgaccgtatggctgcactgcgggctaaggaggagctggagagacaggcggtggatcagataaagagccaggagcagctggctgcggagcttgcagaatacactgccaagattgccctcctggaagaggcgcggaggcgcaaggaggatgaagttgaagagtggcagcacagggccaaagaagcccaggatgacctggtgaagaccaaggaggagctgcacctggtgatgacagcacccccgcccccaccaccccccgtgtacgagccgacgctgagcagcgagctgtcccaggcccgagatgagaataagaggacccacaatgacatcatccacaacgagaacatgaggcaaggccgggacaagtacaagacgctgcggcagatccggcagggcaacaccaagcagcgcatcgacgagttcgaggccctgtaacagccaggccaggaccaagggcagaggggtgctcatagcgggcgctgccagccccgccacgcttgtgtctttagtgctccaagtctaggaactccctcagatcccagttcctttagaaagcagttacccaacagaaacattctgggctgggaaccagggaggcgccctggtttgttttccccagttgtaatagtgccaagcaggcctgattctcgcgattattctcgaatcacctcctgtgttgtgctgggagcaggactgattgaattacggaaaatgcctgtaaagtctgagtaagaaacttcatgctggcctgtgtgatacaagagtcagcatcattaaaggaaacgtggcaggacttccatctgtgccatacttgttctgt

SEQ ID NO: 4857 - protein, 141 aa, Homo sapiens; identical to SEQ ID NO: 4833

SEQ ID NO: 4858 - DNA, 1092 bp, Homo sapiens
gagggtttgaatggctctggctttgtgtctttgcagagctctcggagcagattcagagggccctgcagctggaggaggagaggaagcgggcacaggaggaggccgagcgcctagaggctgaccgtatggctgcactgcgggctaaggaggagctggagagacaggcggtggatcagataaagagccaggagcagctggctgcggagcttgcagaatacactgccaagattgccctcctggaagaggcgcggaggcgcaaggaggatgaagttgaagagtggcagcacagggccaaagaagcccaggatgacctggtgaagaccaaggaggagctgcacctggtgatgacagcacccccgcccccaccaccccccgtgtacgagccggtgagctaccatgtccaggagagcttgcaggatgagggcgcagagcccacgggctacagcgcggagctgtctagtgagggcatccgggatgaccgcaatgaggagaagcgcatcactgaggcagagaagaacgagcgtgtgcagcggcagctgctgacgctgagcagcgagctgtcccaggcccgagatgagaataagaggacccacaatgacatcatccacaacgagaacatgaggcaaggccgggacaagtacaagacgctgcggcagatccggcagggcaacaccaagcagcgcatcgacgagttcgaggccctgtaacagccaggccaggaccaagggcagaggggtgctcatagcgggcgctgccagccccgccacgcttgtgtctttagtgctccaagtctaggaactccctcagatcccagttcctttagaaagcagttacccaacagaaacattctgggctgggaaccagggaggcgccctggtttgttttccccagttgtaatagtgccaagcaggcctgattctcgcgattattctcgaatcacctcctgtgttgtgctgggagcaggactgattgaattacggaaaatgcctgtaaagtctgagtaagaaacttcatgctggcctgtgtgatacaagagtcagcatcattaaaggaaacgtggcaggacttccatctgtgccatacttgttctgt

SEQ ID NO: 4859 - protein, 193 aa, Homo sapiens; identical to SEQ ID NO: 4835

SEQ ID NO: 4860 - DNA, 765 bp, Homo sapiens
tccaggtggccctgttctgttttgtaggactttgtgttttatgccccacgtctgagaatcaacaagcggatcctgcagctctgcatgggcaaccatgagttgtatatgcgccgcaggaagcctgacaccatcgaggtgcagcagatgaaggcccaggcccgggaggagaagcatcagaagcagagaagaacgagcgtgtgcagcggcagctgctgacgctgagcagcgagctgtcccaggcccgagatgagaataagaggacccacaatgacatcatccacaacgagaacatgaggcaaggccgggacaagtacaagacgctgcggcagatccggcagggcaacaccaagcagcgcatcgacgagttcgaggccctgtaacagccaggccaggaccaagggcagaggggtgctcatagcgggcgctgccagccccgccacgcttgtgtctttagtgctccaagtctaggaactccctcagatcccagttcctttagaaagcagttacccaacagaaacattctgggctgggaaccagggaggcgccctggtttgttttccccagttgtaatagtgccaagcaggcctgattctcgcgattattctcgaatcacctcctgtgttgtgctgggagcaggactgattgaattacggaaaatgcctgtaaagtctgagtaagaaacttcatgctggcctgtgtgatacaagagtcagcatcattaaaggaaacgtggcaggacttccatctgtgccatacttgttctgt

SEQ ID NO: 4861 - protein, 43 aa, Homo sapiens; identical to SEQ ID NO: 4839

SEQ ID NO: 4862 - DNA, 860 bp, Homo sapiens
tggaaagcgagggctcctaggtccctgggctgagggtttgaatggctctggctttgtgtctttgcagagctctcggagcagattcagagggccctgcagctggaggaggagaggaagcgggcacaggaggaggccgagcgcctagaggctgaccgtatggctgcactgcgggctaaggaggagctggagagacaggcggtggatcagataaagagccaggagcagctggctgcggagcttgcagaatacactgccaagattgccctcctggaagaggcgcggaggcgcaaggaggatgaagttgaagagtggcagcacagggccaaagaagcccaggatgacctggtgaagaccaaggaggagctgcacctggtgatgacagcacccccgcccccaccaccccccgtgtacgagccggtgagctaccatgtccagggcaacaccaagcagcgcatcgacgagttcgaggccctgtaacagccaggccaggaccaagggcagaggggtgctcatagcgggcgctgccagccccgccacgcttgtgtctttagtgctccaagtctaggaactccctcagatcccagttcctttagaaagcagttacccaacagaaacattctgggctgggaaccagggaggcgccctggtttgttttccccagttgtaatagtgccaagcaggcctgattctcgcgattattctcgaatcacctcctgtgttgtgctgggagcaggactgattgaattacggaaaatgcctgtaaagtctgagtaagaaacttcatgctggcctgtgtgatacaagagtcagcatcattaaaggaaacgtggcaggacttccatctgtgccatacttgttct

SEQ ID NO: 4863 - protein, 106 aa, Homo sapiens; identical to SEQ ID NO: 4837

SEQ ID NO: 4864 - DNA, 700 bp, Homo sapiens
caaaaaggttgcaggtttccagtaaatggagatatcgattggaaatcagatctggcatttctccatagtgctcactcattggagcatatgatggttaattgcatagcttttagttgaccttagttttttcaatgagattgttaatcttataaactgtgaatcatccaccatcttgtaagaacctgttattgctttgtttgaacctgtgacagattatcttccaactttaaagagtggataattccattaaccaaccaaaaagaaaagtagtaagataaacattttcttcaaactctgaaaattatccttttttttttttttgaaacccccactgtcctcccaagtcacagcaacaagttaaaaagatgatgggaggtggggaagagtggaggagcaggaggaattcttaacagtaagtttcggggtccagggcccgattggcatgtggccccattccaggtcactggggtcatttccaaatttgagttctccaggattgatagcatcatcccatgaggactggggcttagtgaggcagtagctttgatttccagctgagcacaagagtgtgatagtacttgtttgttttttgttgttgttgttttgagatggagtcttgctctgtcgcccaggctggggtgcatgagctgagatcgccactgcactcaagcctgggtgacagagctagactccgtctcaa

SEQ ID NO: 4865 - protein, 32 aa, Homo sapiens
MWPHSRSLGSFPNLSSPGLIASSHEDWGLVRQ

SEQ ID NO: 4866 - DNA, 689 bp, Homo sapiens
cacttttgactaacctttttttgtctggagtgctaaaaagatgactttaagaataaatatctcctgaaaactggcttgagggccccattgagtcttggttagaagcctgtgttggggacagtgggccttcgtcttccggatttgtgtggagagtgtggcttgtttcgtgcaggtgtctgcccaggaggtcaggaaggagaatcccctccagttcaagttccgggccaagttctaccctgaagatgtggctgaggagctcatccaggacatcacccagaaacttttcttcctccaagtgaaggaaggaatccttagcgatgagatctactgcccccctgagactgccgtgctcttggggtcctacgctgtgcaggccaagtttggggactacaacaaagaagtgcacaagtctgggtacctcagctctgagcggctgatccctcaaagagtgatggaccagcacaaacttaccagggaccagtgggaggaccggatccaggtgtggcatgcggaacaccgtgggatgctcaagtgagtgctgtgccctgctgttgggatcttgccatctccgtgcgctccagcatgtcttttcctgtgactctagttagtgctttaaagggctctgtgtcaggccttgtgaagaccttgagggaaccgagttaaaagtggggttttcttagggaagaggt

SEQ ID NO: 4867 - protein, 39 aa, Homo sapiens
MRSTAPLRLPCSWGPTLCRPSLGTTTKKCTSLGTSALSG

SEQ ID NO: 4868 - DNA, 398 bp, Homo sapiens
cacacggagcactgcaggcgccgggttgggacagcgtcttcgctgctgctggatagtcgtgttttcggggatcgaggatactcaccagaaaccgaaaatgccgaaaccaatcaatgtccgagttaccaccatggatgcagagctggagtttgcaatccagccaaatacaactggaaaacagctttttgatcaggtggtaaagactatcggcctccgggaagtgtggtactttggcctccactatgtggataataaaggatttcctacctggctgaagctggataagaaggcaagtcaggattaactatttacaggctgtggattgggtgttggtctgcttcatcgataaggaaactggagcaactcaccctgtcttttgttttctgttcctttttgtt

SEQ ID NO: 4869 - protein, 68 aa, Homo sapiens
MPKPINVRVTTMDAELEFAIQPNTTGKQLFDQVVKTIGLREVWYFGLHYVDNKGFPTWLKLDKKASQD

SEQ ID NO: 4870 - DNA, 344 bp, Homo sapiens
gcgggcgccgagtgtcgggcgcggcaggaggacgaggcagggcgggcgggcgctctaagggttctgctctgactccaggttgggacagcgtcttcgctgctgctggatagtcgtgttttcggggatcgaggatactcaccagaaaccgaaaatgccgaaaccaatcaatgtccgagttaccaccatggatgcagagctggagtttgcaatccagccaaatacaactggaaaacagctttttgatcaggtggtaaagactatcggcctccgggaagtgtggtactttggcctccactatgtggataataaaggatttcctacctggctgaagctggataagaagg

SEQ ID NO: 4871 - protein, 63 aa, Homo sapiens
MPKPINVRVTTMDAELEFAIQPNTTGKQLFDQVVKTIGLREVWYFGLHYVDNKGFPTWLKLDK

SEQ ID NO: 4872 - DNA, 1555 bp, Homo sapiens
ccatgtgaagaaggatgtgtttgcttccccttctaccatgatcataagtttcctgaggcttcctcagctgggctaaactataattgggagatttcattgggatgaacaaaaaggaaagaagcttctgatgcgttggcatccactgtctttcaattaaaccattcagcgagaggccaaggcctaccccatcctgtgcagtcaggaatggctggagcatcgtcggaaaccgtgggcgctgggccagggatgccggggaatgacatcatttcattgtgttcgcatgaccatggaaggcctgtgttacacacaccggatgaagtcaccagaatgctagggaacagagaaagccaggggtaagaataaagaaacccttggcaaaggcttgggagacaggaaggttgaaaagaggggcagagaggagtctgtgtttattgtcagtggtctggcattctgggtttgaaaataacatctgcttcactcgctgccttccctccacctacccacgggctctgggacccaggaacctcgacggagcagaaacccgtaggcgccatcgctgggatatttgccagttacagctcatttttctccatgtcaggatacaaaaaagagaatggaagaagggagcttgatacacatatatcttaaaactcttattttgtcaaaaaaatgtacagttttagcagcggcacttttttaaaaaagaaatgttatttttctcacaatccttcttatattcctggaaatattttctatattcctcaaaaggcaaatatttacttaactcaggttttataaactggaaatagattgcctaataatgaagaaaataagaatatacaaatgtatgaatatgaaatatatatgagatattcatatctatatggaagaagaccaaaagtgtattaataatgaagcaaataaggatgtacatacatatatatatggaaacaaaaagtagattaattttgcagagtataattttacccttacatactccagtgtgtattatgcaacaataggaaaatctttttccataaccacagtggagttctccacttgagtcactttcacgttgatacagcacagtatctgatccacatctgtattccattttgcagttgcccgataacgtcctttataacttctgttccctccaggacaggatccagcctagagtcagatactgcatttagttgtcacgcatcttcagtctccttttatctagaacatttcctcagcctttttcttttacaacgttgaaactgttgaagaatatcgtgcccctccccttttgttagtaggcaggtcctcactttgggtttgtctgttgcttcatcgtgattggattcagggagtgcattcttagctgaaacactgcagaggtgacggtgcgtccggggagttacacctggaagcacgcagtgctcctctcttcctcatctatggtgttaattttgatcgctcaaccaaggtgttgtccaatttctccacctcattattttttgaactgaacaagcagattgtgaggagatattttgagctcctcgtcaaa

SEQ ID NO: 4873 - protein, 50 aa, Homo sapiens
MAGASSETVGAGPGMPGNDIISLCSHDHGRPVLHTPDEVTRMLGNRESQG

SEQ ID NO: 4874 - DNA, 447 bp, Homo sapiens
aggcaaagccagaaagccctggcaacccaaaactgaaggatctggggctttcttcctgcaagctctgctcagcgaggggcttgtgctcctacaagctctttgctacataagtcaagccaaacttccatttcccgacatgacatggccaaataagagaaggccaggttaccagagattaaaaataggacgttgctgcagagtcctgggaccggctggcaaatgacacaggaactttgggagcgcatggactcaggccaagcggccgtcctcaccctcggccacctcagggcagggacgaagagtaagcccagcctttgatggtggggattagtcccaaaattctggagttcaccactcctcccgctacactggctttatttcaaatctctgttggtccatgtcaacatcagcgatgggagttgaaagaagtaaaacagtgactcgtgc

SEQ ID NO: 4875 - protein, 32 aa, Homo sapiens
MTQELWERMDSGQAAVLTLGHLRAGTKSKPSL

SEQ ID NO: 4876 - DNA, 960 bp, Homo sapiens
atgccattcccaaactgctcagcccccagcactgtggtggccacagctgtgggtgtcttgctggggctggagtgtgggctgggtctgctgggcaacgcggtggcgctgtggaccttcctgttccgggtcagggtgtggaagccgtacgctgtctacctgctcaacctggccctggctgacctgctgttggctgcgtgcctgcctttcctggccgccttctacctgagcctccaggcttggcatctgggccgtgtgggctgctgggccctgcacttcctgctggacctcagccgcagcgtggggatggccttcctggccgccgtggctttggaccggtacctccgtgtggtccaccctcggcttaaggtcaacctgctgtctcctcaggcggccctgggggtctcgggcctcgtctggctcctgatggtcgccctcacctgcccgggcttgctcatctctgaggccgcccagaactccaccaggtgccacagtttctactccagggcagacggctccttcagcatcatctggcaggaagcactctcctgccttcagtttgtcctcccctttggcctcatcgtgttctgcaatgcaggcatcatcagggctctccagaaaagactccgggagcctgagaaacagcccaagcttcagcgggcccaggcactggtcaccttggtggtggtgctgtttgctctgtgctttctgccctgcttcctggccagagtcctgatgcacatcttccagaatctggggagctgcagggccctttgtgcagtggctcatacctcggatgtcacgggcagcctcacctacctgcacagtgtgctcaaccccgtggtatactgcttctccagccccaccttcaggagctcctatcggagggtcttccacaccctccgaggcaaagggcaggcagcagagcccccagatttcaaccccagagactcctattcctga

SEQ ID NO: 4877 - protein, 319 aa, Homo sapiens
MPFPNCSAPSTVVATAVGVLLGLECGLGLLGNAVALWTFLFRVRVWKPYAVYLLNLALADLLLAACLPFLAAFYLSLQAWHLGRVGCWALHFLLDLSRSVGMAFLAAVALDRYLRVVHPRLKVNLLSPQAALGVSGLVWLLMVALTCPGLLISEAAQNSTRCHSFYSRADGSFSIIWQEALSCLQFVLPFGLIVFCNAGIIRALQKRLREPEKQPKLQRAQALVTLVVVLFALCFLPCFLARVLMHIFQNLGSCRALCAVAHTSDVTGSLTYLHSVLNPVVYCFSSPTFRSSYRRVFHTLRGKGQAAEPPDFNPRDSYS

SEQ ID NO: 4878 - DNA, 2141 bp, Homo sapiens
ggagatgaggcgggaggacttggggacagctgtggggacacggcccagatgttctggtcccagcagaagtgactggcggggaccaggatgctggagggtcagctcgaggccagggagcccaaggagggcacccacccagaggacccgtgcccgggagctggggctgccatggagaagacacctgcagcagccgaggtccccagggaggacagcaatgccggggagatgccgtcattacagcagcagatcaccagcctccaccaagagctcgggagacagcagtcgctgtgggctgatattcacagaaaactccagagtcatatggatgccttgaggaagcagaaccgggagctccgagaagagctgagaggcctgcagcggcagcagtgggaagccgggaagaaacccgcagcgtccccacacgcggggcgagaatcacacactctggcattggaacctgcttttggaaaaatttcacctctgtcagctgatgaagagacaacgcccaaatacgctggccgcaagagtcagagtgcgactctcctgggacaaagatggtcatctaaccacttagctcctccaaagccaatgagtttaaagacagaaagaattaactcggggaaaacaccaccacaggaagatagagagaaaagtcctcccgggagacgtcaagacagaagtccagcacccactggaaggccgactcccggtgcagaaagacgggaggtgtctgaagacggaaagattatgcatccatcttcccgaagtctgcaaaactccggtggcagaaaatcaccagtgcaggcttcccaggccgccacgctgcaggagcagacggcagcagccggagttgctgacagaagctcatcagtcttagggagttctgaaggcggatttctcagccgcgttcaagctgaagagttcgccagttcttccccagacagtgcagagcggcagaatcttcctgtaaacccaccatcttccctggaaatagcacaggccatggacactaagatgaaaaaggaggaagtacaggaagaaaaacgacatccaaatggcaaggcagatgactgccggcggtccggtttcccgagtgaatttccaggagctctgcatgccgctccctccagacaggacatggggccctgacctggaggccaggcgtttctagcattgttgactgccagtttattaccagtaaataaagcaatacgcttttcaggaggaagatttgttttaaatacttaaaaaaaaacccaaaactatagcctcaaatatcttccagccaccacattttagcccttgaggagagctcagttccggaaggacgcgtcaaggtggcggtggtcggcattgactcaggaaggggtgggaagaggcacctgctgcggctgcggctgcggctacagtgttttgtgagctccgaggagacccagtcctgcctggggcagcacatcatcgctgcttcttcagctcaacagttcgttcatctcacgcctcttgctggcctgttagaaactgggagtcggcctcaggctagctttgctgagggaactctgcctcagtaaaagcgaattcatgtcttgcaagcggataaagcatttggataaatgaacaacagggaatgctacttgcagtaacagtttgaattcactgaaatgcttttgtctttagcgcagtggttgtagtggtttgtcaggggagaaggaaacccacatcatttgagcacctgaccttgccatccccataggcaggtccatgagacataagtgatgctcctccttggctaagtgcatggagaaaccaatcgctgaagctcatgaaaccacgaagatgaggacacaagaactaggtaacgcgctgtgccctctgctagcgcgatccttcctttctccccacaaccagcggtcacccacctctgcctgctcctacgtctctggctcccccaccctccctcccaggtcttcaacactttcctcttctcgtgactcatcttgcatctacttcttgtgtgtcttgcattggatatgccaaagttctttccttttttgtgttttctttcttttaataatataaactccaaaatagattgtttgattcttttcatgtggaacatttaaaatattatttgtgctttatta

SEQ ID NO: 4879 - protein, 353 aa, Homo sapiens
MLEGQLEAREPKEGTHPEDPCPGAGAAMEKTPAAAEVPREDSNAGEMPSLQQQITSLHQELGRQQSLWADIHRKLQSHMDALRKQNRELREELRGLQRQQWEAGKKPAASPHAGRESHTLALEPAFGKISPLSADEETTPKYAGRKSQSATLLGQRWSSNHLAPPKPMSLKTERINSGKTPPQEDREKSPPGRRQDRSPAPTGRPTPGAERREVSEDGKIMHPSSRSLQNSGGRKSPVQASQAATLQEQTAAAGVADRSSSVLGSSEGGFLSRVQAEEFASSSPDSAERQNLPVNPPSSLEIAQAMDTKMKKEEVQEEKRHPNGKADDCRRSGFPSEFPGALHAAPSRQDMGP

SEQ ID NO: 4880 - DNA, 752 bp, Homo sapiens
gggacacggcccagatgttctggtcccagcagaagtgactggcggggaccaggcattggaacctgcttttggaaaaatttcacctctgtcagctgatgaagagacaacgcccaaatacgctggccgcaagagtcagagtgcgactctcctgggacaaagatggtcatctaaccacttagctcctccaaagccaatgagtttaaagacagaaagaattaactcggggaaaacaccaccacaggaagatagagagaaaagtcctcccgggagacgtcaagacagaagtccagcacccactggaaggccgactcccggtgcagaaagacgggaggtgtctgaagacggaaaggtgacctcggaaacctgggtcactctacactggcagcatggaaaattcagattcagatgaagttccacttaggtctcataagagtactcaatttgttattcgaaatagacctagtaatttattaacctaattatgtttctatagataaaactttgaatttctgcagacatgtctttaatgctataaaagcaaataaattgaattgggttttaaaaagcaaacaacttgaattgggttttaaaaatcaattacttgcccgagctccgtaattggtatatttctgcagagtctttaaaagaattgatctaccttgtagtgctgagctcagggctgttgggtgagccctggggtcttgctggaaattgtggatggctgaagatggcttcgtgctcccagcctttgg

SEQ ID NO: 4881 - protein, 71 aa, Homo sapiens [sequence omitted]

SEQ ID NO: 4882 - DNA, 523 bp, Homo sapiens
accaccctttctcctggtgccctgtccataactaagtgtccagaagtctcctccacaggcattttctctgctcattctcctagtaatcctgtgaaggagacgtgttctccattctataggagaggactctgaggttcagaaaactcaagtcagagaaagcatgaggttggacttcgcttcttggcccgggtcggactgtaggctgctgctggagctgtgcggctttgggtaccagagcaatgaggaagcaggacccagacccctgactcctaactccaggtgaagtccaccctgagctcaggagcagagctgcctccatcgggtgtggagagacagagcctcctccccagccatgcctcctcatcggcccacgggagctgctgtgactctgacccctgtacctggctctgtcgaccggaatagtcagtgggcagccagcacacctttgggtgctctgtatgagtgggattttctcctgattagacattttaaaagattgtcaacaaaaagaacaaactctgta

SEQ ID NO: 4883 - protein, 40 aa, Homo sapiens
MRLDFASWPGSDCRLLLELCGFGYQSNEEAGPRPLTPNSR

SEQ ID NO: 4884 - DNA, 575 bp, Homo sapiens
agcaatattccgccagcttcatttcatgcagtgagtggaacaagagtcagaacaccagggcggctgagcctatcgatcaagcctccacctaatgacagacatacttgagtcccacagtcataaggaggatgaagtctctctctggctggacctggactgcagtcacactctaagagctcctctttctacacctctgccagtgggcgttcggtcagagacaagctatggcaccggctcccggacgcacgggaggactcctaccagggacagagtccgcacaggtaccagagcaatgaggaagcaggacccagacccctgactcctaactccaggtgaagtccaccctgagctcaggagcagagctgcctccatcgggtgtggagagacagagcctcctccccagccatgcctcctcatcggcccacgggagctgctgtgactctgacccctgtacctggctctgtcgaccggaatagtcagtgggcagccagcacacctttgggtgctctgtatgagtgggattttctcctgattagacattttaaaagattgtcaacaaaaagaacaaactctgt

SEQ ID NO: 4885 - protein, 75 aa, Homo sapiens
MTDILESHSHKEDEVSLWLDLDCSHTLRAPLSTPLPVGVRSETSYGTGSRTHGRTPTRDRVRTGTRAMRKQDPDP

SEQ ID NO: 4886 - DNA, 203 bp, Homo sapiens
cgtcctgcaagaaagaaaaggcaagaacgtcagcgatggctccactgactgattaaggcaaaggaagtcgccactatgccctggatctgttcctgaaggattacagcatgaagaaaaataatgtgggtagccgggcttcatcttagcaacacgagcacctcattttggttttcagttggtcttttaatgaacaaatgtgttgg

SEQ ID NO: 4887 - DNA, 531 bp, Homo sapiens
gtcataatagtgctaagtaacaagtcatcccaaaactcagtggtgtataggaccatgcatgtttttcactctcaggatctctgggtcactagtggctcaggtgatccacgcaggttcatctgggtcggatggtgtcttggctccaggctgtgggctgaatcctggtctgtcacacgtatgttattctggggcttgaagagatagaaggtatcacctgagtgtctttcattcacaccaaataggctaggctcttctgccatctagaaagcttgtcctggcattatgggttctagaaggcctgcttcaagctgacaaagttgatgccaacagtacttgtttcttccaacctgtggctacatggaaccttcgcctcactgcacctccgtgaatcacttaattgctgcatatccaggaggtggaggtaaaaagggatttgggtcccatggagaataggattttttttttttttgagacagagtttcgttcttattgaccagtgcaatggcgtggtctcggctcactgcaacctcc

SEQ ID NO: 4888 - protein, 49 aa, Homo sapiens [sequence omitted]

SEQ ID NO: 4889 - DNA, 2154 bp, Homo sapiens
gtttagcaaggtctccaggtgcttctgctgagggccagagttaagaaagagcgagaacctcatcaggaggactgaaggaaaggagccaggctgcagccctctgcctgcccttccgtgccatcatctccaggattaatgaaagggccattcaggaaacagcacagggagctacaaatttacgtgttcactggtgattgatcttttcatccagcacaatggacagaagtctaaggaacgtccttgtggtttcctttgggttcctgcttctctttacagcctatggaggtctgcagagcctgcagagcagcctgtacagcgaggagggcctgggtgtcacagcgctcagcaccctctatggaggcatgctcctgtcctccatgttcctcccaccgctcctcatcgagaggctgggctgcaaggggaccatcatcctctccatgtgtggctacgtggccttctccgtgggcaacttcttcgccagctggtacactttgatccccacctccatactgctgggactcggggccgccccgctgtggtctgcacagtgcacatacctcacgatcacgggaaacacacatgcagagaaggcgggaaagcgtggcaaagacatggtgaaccagtattttggcatcttcttcctcatattccagtcatccggtgtgtggggcaacttgatctcatcgctggtatttggccagactcccagccaagagacccttccagaagagcagctcacgtcctgtggggccagtgactgcctgatggccaccacaaccaccaacagcacccagaggccctcccagcagctggtctacaccctcctgggcatctacactgggagtggtgtcctggctgtcctgatgatagctgcgttcctccaacccatacgagatgttcagcgggaaagtgaaggagagaagaaatcagtacctttctggtccactttactgtcgactttcaagctatatagagataaacgtctgtgcctcttaattctgctgccgctgtacagtggattgcagcaaggattcctctccagcgaatacacaaggtcctatgtcacctgcaccctgggcatccagttcgtcggctacgtgatgatctgcttctcggccactgacgcgctgtgctccgtgttgtatggaaaggtctcgcagtacacgggcagggctgtgctgtacgtgctgggcgcggtgacccacgtgtcctgcatgattgccctactgctgtggagacctcgtgctgaccatctggcagtgttcttcgtattctctggcctgtggggcgtggcagatgccgtctggcagacacaaaacaatgctctctacggcgttctgtttgagaagagcaaggaagctgccttcgccaattaccgcctgtgggaggccctgggcttcgtcattgccttcgggtacagcatgtttttgtgcgtgcacgtcaagctctacattctgctgggggtcctgagcctgaccatggtggcgtatgggcttgtggagtgcgtggagtccaagaacccgatcagaccccacgctccaggacaggtcaaccaggcagaggatgaagaaatacaaacaaaaatgtgagagcagtgaggtccgaggaggatgaactcagaaagcaccagccagagaattttcttagaagatgcctcaggacatagagcggctcctcatcaccatctcagcacaatttggccattctgaagagatcatgttatttcactcttcatgtattttttttctattctaacaaatttttcgtccaccatcttaacagagatcaagtgtatacatgaaggtatcagttcatttaattttagatgcaaaagaaaaaggtctaacgtacaatcagccaattagaatttgcctgaaatcatagactcaccctagttttattgctgtagttgtttttaagaattggaagcctgcttaaaaaatgtagttgagccccataattttacaaatgggcgaacttttaaacttctaactctacttggatcaaaacctcatacattttacaaaggggtcctgacaagtcagctgactcaacctcacagagtcagggggtgacaaagccagactggggctcaggattcctgaaacgtgtggggtctgcgtttctaaataaagacggttatttaatggactt

SEQ ID NO: 4890 - protein, 457 aa, Homo sapiens; identical to SEQ ID NO: 622

SEQ ID NO: 4891 - DNA, 2116 bp, Homo sapiens
attaacgagtgacagtcttaatgactaacacacctctaacatttcacctctagctcagatgagagagagaatgggacttcttggtactgattgtttttcccatgcctcaattggtttcttttagggagctacaaatttacgtgttcactggtgattgatcttttcatccagcacaatggacagaagtctaaggaacgtccttgtggtttcctttgggttcctgcttctctttacagcctatggaggtctgcagagcctgcagagcagcctgtacagcgaggagggcctgggtgtcacagcgctcagcaccctctatggaggcatgctcctgtcctccatgttcctcccaccgctcctcatcgagaggctgggctgcaaggggaccatcatcctctccatgtgtggctacgtggccttctccgtgggcaacttcttcgccagctggtacactttgatccccacctccatactgctgggactcggggccgccccgctgtggtctgcacagtgcacatacctcacgatcacgggaaacacacatgcagagaaggcgggaaagcgtggcaaagacatggtgaaccagtattttggcatcttcttcctcatattccagtcatccggtgtgtggggcaacttgatctcatcgctggtatttggccagactcccagccaagagacccttccagaagagcagctcacgtcctgtggggccagtgactgcctgatggccaccacaaccaccaacagcacccagaggccctcccagcagctggtctacaccctcctgggcatctacactgggagtggtgtcctggctgtcctgatgatagctgcgttcctccaacccatacgagatgttcagcgggaaagtgaaggagagaagaaatcagtacctttctggtccactttactgtcgactttcaagctatatagagataaacgtctgtgcctcttaattctgctgccgctgtacagtggattgcagcaaggattcctctccagcgaatacacaaggtcctatgtcacctgcaccctgggcatccagttcgtcggctacgtgatgatctgcttctcggccactgacgcgctgtgctccgtgttgtatggaaaggtctcgcagtacacgggcagggctgtgctgtacgtgctgggcgcggtgacccacgtgtcctgcatgattgccctactgctgtggagacctcgtgctgaccatctggcagtgttcttcgtattctctggcctgtggggcgtggcagatgccgtctggcagacacaaaacaatgctctctacggcgttctgtttgagaagagcaaggaagctgccttcgccaattaccgcctgtgggaggccctgggcttcgtcattgccttcgggtacagcatgtttttgtgcgtgcacgtcaagctctacattctgctgggggtcctgagcctgaccatggtggcgtatgggcttgtggagtgcgtggagtccaagaacccgatcagaccccacgctccaggacaggtcaaccaggcagaggatgaagaaatacaaacaaaaatgtgagagcagtgaggtccgaggaggatgaactcagaaagcaccagccagagaattttcttagaagatgcctcaggacatagagcggctcctcatcaccatctcagcacaatttggccattctgaagagatcatgttatttcactcttcatgtattttttttctattctaacaaatttttcgtccaccatcttaacagagatcaagtgtatacatgaaggtatcagttcatttaattttagatgcaaaagaaaaaggtctaacgtacaatcagccaattagaatttgcctgaaatcatagactcaccctagttttattgctgtagttgtttttaagaattggaagcctgcttaaaaaatgtagttgagccccataattttacaaatgggcgaacttttaaacttctaactctacttggatcaaaacctcatacattttacaaaggggtcctgacaagtcagctgactcaacctcacagagtcagggggtgacaaagccagactggggctcaggattcctgaaacgtgtggggtctgcgtttctaaataaagacggttatttaatggacttac

SEQ ID NO: 4892 - protein, 457 aa, Homo sapiens; identical to SEQ ID NO: 622

SEQ ID NO: 4893 - DNA, 2700 bp, Homo sapiens
aaatctcatgaatattttatagattatttgcatagaacatgtttctaaacagattcaatgtaacatatactgaaaaactgcattctgcagaaaaattctaccccaatggctccaaagaaatcgtgtttcccgacgggacggtggaacatctcaaggatggacaggaagagaccttatttcctgatgggacaatcgtaagggtggaaaggaacggcgacaaaaccattgtgctcagcaacgggcagaaagaaatccacacagcccggttcaagaggagggagtacccggatggcaccgtcaagactgtgtattgcagcggctgtcaggaaaccaagtatgcctccgggagggttaagatcaaagatgaagctggaaatgtcgtcctggacgagaagcagatgagccctcaacacgcagcatcacatgggaaatgccaattgcagatttttgctgtagtcccagctactcaggaggctgaggcaggagaatgacttgaacctatgaggcggaagttgcagtgagccgagatggcgccactgcactccagcctggcgacagagcaagacttggtgggaggctgtgtggtatttgtagaattctttcaagacacctgagcaaataaacatgggatgtaatgtagtttaatcaccacttgaacatattgtgctttgtcagagctgttatatttatacatatggccacatcttcagtcccaatgtcatagttaacatgctggtggcacaggtagggacttgaactattgctttctctaggacaggatccttggtttttaaaaatccatgtcactttttcttgatttgattttttaccacttaggaatgttgcttattcattagtttctggagctcttggattattcttttgacatttaatccattcctggaagctccgagagttgcttcattgaaaggaaaaacaagaacaaagttgcctgcttggggatctggagctttgccacggtctgacaggacacacggggaggtcttggtcttgcaggagtgcgactggaagagggacgcgtagggcatgagtgtcttgtgaggcgtgtgcctgctccgtaacttgggcttgctttgtggcatctcccttgttgacagatgaaaatcctgcccactcatctctccttccagctgggaggcaggtgcagcttcaggacgcacactcacagctttctccaccacagagtcatcctcgttgtacattctgcttgtgaacgaaagagaatcataaggaagacagtcaggagcatcaagcccacctctgtcactttttgcagcgtcgatgttggaatttccatgtgtggcattactggcttctctcccctcatttcttagaccatttaagtaaatcaggtcaataatatcatggacaagttttctcttcaccaacacatctgttgaacaatccaaggtcaaggctgggctgtagttgacctctaaaagccatggtttcaagttgtcatcaatcaaaatatcaaacccaaagagctcaaagcaattggcagcaaaggggacagatggtgcaatggcgagaatggtgagaataaccatgcggtggattttcttccacaaaagcagatcgtccacatcccagctacgaaggtaggaaaaaaatctgctgagcgtccatttacaaccatgaccaatcacttctttgatcttctcataagaggccccggatttattgatgctgctgttggtcaaatgggcataattgttttgcaaattactgaggtcaaacttttccgtggcaaaccgaaccaacccttcctgataaacataaatggtcaaaggcttaaagccagtaacacaaacatagatgcggagatcacatttatatctgccaataagtaaaggattggagatatatttctgcactatgtacatatcatcaaagatgaagtctttaaagtcactgaaaattagtatccccctcccacgagataactcagcaggcttgcaaatccaatagctatgcttggtgcccagcatctgcctctcctgaaagtattcagccacgaacttggtatagtcattgggcatgacgaacgtcagggggatgaactggtacagggaagtgccatacatcctcctcatgtgcttcaggtgtttggccaaacagtctttcctggtaagcttggtggttccagggtggtggtttagctgctgccacggtttaacactgttgtgttcggtcattcggaaagaggatgtcctccagtacaggttccagtcctccgcgttctgctcctgcttatcaaacttattccaccccctctccaggaggacgctttgcaccacagccggggtggtctcgtcaacgcgaaaaaccagcggcttcaagagggcccctgaaggttcatcttccgccatcaaatgaggttttttcttcttctccagtgttggtgttgggcggcctcgcctgggagggatggaaacacctgcttcctgtagccttgctcccaggcctgcaggcggctgctcagtgtggtttgcctcggatggaatgttaagggtaaaggctggggtggtggttctcaaagatcccagcgcctggctttgtgtggaggaacacaggtcccgccctctcattgggcgctggttccgagggtggcctctgtgggtctctgtgcagcagctgcagcgccagctgaaatgcgcggaggctggagggagcact

SEQ ID NO: 4894 - protein, 150 aa, Homo sapiens
MFLNRFNVTYTEKLHSAEKFYPNGSKEIVFPDGTVEHLKDGQEETLFPDGTIVRVERNGDKTIVLSNGQKEIHTARFKRREYPDGTVKTVYCSGCQETKYASGRVKIKDEAGNVVLDEKQMSPQHAASHGKCQLQIFAVVPATQEAEAGE

SEQ ID NO: 4895 - DNA, 721 bp, Homo sapiens
ggaaaaccacgtttgaaaattacactatcttcctcatgtcatcctcggtcattgacaaggttttgtgggtcaccacgctgtgagctgtgtggatgtagcagcaaatgaatgaagggagacttgctcggattggtcatgaactgtggtccccactcttcccatcttccaggtacaaccagatctttgcataaatcatagatcgaatgaacaagaaaattcaacagttgcagaaatgtcactaactgtggttcatctgatcgctggatggattttgtcctggatagctttctgagacttttctctgggttcagtgtcctcctttctctgggttacctgtcctcctttctctgggtgcgctctctgttctctgggtgcaccgtcatcttttgcagtcttgtcacactcagtatcaaagtgccttccttcaaggacatcaccactttcaatatttgcaatgactgtggcgaatttatgaacgaacatttgtatagccaatcctttggttgttcgagcacattatttaggtattgtatgagcacaggatctgtagttacaagcaagtctacctaaaccacctgccaaggagtcctggagaagtcacgcacagcagtgcctcagcaggcaggtccacctacatggtcccagctgtggatgtgaaaattaccctgtgccttggcaccagcccccctcagctgtggttgcaggttaatcctgctcctac

SEQ ID NO: 4896 - protein, 101 aa, Homo sapiens
MDFVLDSFLRLFSGFSVLLSLGYLSSFLWVRSLFSGCTVIFCSLVTLSIKVPSFKDITTFNICNDCGEFMNEHLYSQSFGCSSTLFRYCMSTGSVVTSKST

SEQ ID NO: 4897 - DNA, 721 bp, Homo sapiens
ctttcaaaataatttcaaccgacggtacaaccagatctttgcataaatcatagatcgaatgaacaagaaaattcaacagttgcagaaatgtcactaactgtggttcatctgatcgctggatggattttgtcctggatagctttctgagacttttctctgggttcagtgtcctcctttctctgggttacctgtcctcctttctctgggtgcgctctctgttctctgggtgcaccgtcatcttttgcagtcttgtcacactcagtatcaaagtgccttccttcaaggacatcaccactttcaatatttgcaatgactgtggcgaatttatgaacgaacatttgtatagccaatcctttggttgttcgagcacattatttaggtattgtatgagcacaggatctgtagttacaagcaaggtgagtctgtactctgcactccaatgaaggcttcaggtgggtatgtgctgtgctgatataaaatgctgttgataccaaatgggaagaactcagccaggattccacgctcctgccagggtgattctctgctcctgggagagctgcatcgcctcagccaggcccacagaccaaggcacatgggtttccacttggccgaccaagagcgcagccgctcccccggcccctcccgcagcagttccccaccacggcttcatagaacttagttcttctgcctcactgaactttgtaccctttgactagcattt

SEQ ID NO: 4898 - protein, 107 aa, Homo sapiens
MDFVLDSFLRLFSGFSVLLSLGYLSSFLWVRSLFSGCTVIFCSLVTLSIKVPSFKDITTFNICNDCGEFMNEHLYSQSFGCSSTLFRYCMSTGSVVTSKVSLYSALQ

SEQ ID NO: 4899 - DNA, 4099 bp, Homo sapiens
aagacagaaagtccgttggaaccgtcggctgctctctggtctctggagatgaggcgggaggacttggggacagctgtggggacacggcccagatgctctggtcccagcagaagtgactggcggggaccaggatgctggagggtcagctcgaggccgggtagcccaaggagggcacccacccagaagacccgtgcccgggagctggggctgccatggagaagacacctgcagcagccgaggtccccagggaggacagcaatgccggggagatgccgtcattacagcagcagatcaccagcctccaccaagagctcgggagacagcagtcgctgtgggctgatattcacagaaaactccagagtcatatggatgccttgaggaagcagaaccgggagctccgagaagagctgagaggcctgcagcggcagcagtgggaagccgggaagaaacccgcagcgtccccacacgcggggcgagaatcacacactctggcattggaacctgcttttggaaaaatttcacatctgtcagctgatgaagacacaacgcccaaatacgctggccgcaagagtcagagtgccactctcctgggacaaagatggtcatctaaccacttagctcctccaaaggtgacccttcgtgcttatcgtctgtaaagagcagcagagcttctgtacccaaacacacacatcccatcagctcctcaccacacagtttcacctccctgggggagcatggtgctccctggagtcctgcgtttttccaaggacatgggtgcatgcctttcaaacaagatcctaaaccacagcacttcctgctgtagggcagattccaagtcctgccagctgcttccctctgagctcactcacggcagcaaatgtctggctggggccgagtggactcgggggctttgtttccgtgggtgccacccacggaggtgatatgtgtggcgctctcgccacatgccatggcccgtgcgtctgggggctcgcagcctcccacgatccctgcttctgcactgcggtcttgcacctgctgcttgtcagcgtggactcctctgaacaggggctgtgccgcttgcttgggggccacagtgcaggatgctattttgtctccaacacatttttccttgttaaaattagctcctctttagaaccttctgctggccagtgtgtctcttcccatcccagctttgtgtcaccctcacactcgggaggcaaatctcgtgagtcctgagccagcaactgatactgggtcgatgtggatggagaagactgcccccccaactcctgaagatgatttatcccctcgcttctttcccaaagcaactgctgagcagataacactttattccctgaaggaagatcagaaatctactccaagcatttgtcacaagtaggaaaatagtcctttcagatcctatgagtacaaaacatcgaaagtcccaggacgtactgcataggtccagcctcctgtgagacacggacttctctcacgcttctgcattgacctgagttaatcacacgcgtgctggacaatgtacgagtaaatagataactgaatgggtggcttatccacgcctccaaaccctgaatttttaagcagcagaaaaggtagaacattattttcattatgcatttttgaattgagtttcaagtactttatttcactgttgactattctacaacgtcagccataccgtccctgaattcctcaagagcgtggctgtaaaatggggaatgagagcgtggatgcctcatgtgtccttctgtaggaagcgggggtagaatcctctagattctgtggcagctggtgtgatgtgttgctcaacattttaaaataatatgatggttattaatgcaaccacatttattttcagccaatgagtttaaagacagaaagaattaactcggggaaaacaccaccacaggaagatagagagaaaagtcctcccgggagacgtcaagacagaagtccagcacccactggaaggccgactcccggtgcagaaagacggggggtgtctgaagacggaaaggtgacctcggaaacctgggtcactctacactggcagcatggaaaattcagattcagatgaagttccacttaggtctcataagagtactcaatttgttattcgaaatagacctagtaatttattaacctaattatgtttctatagataaaactttgaatttctgcagacatgtctttaatgctataaaagcaaataaattgaattgggttttaaaaagcaaacaacttgaattgggttttaaaaatcaattactttcccgagctccgtaattggtatatttctgcagagtctttaaaagaattgatctaccttgtagtgctgagctcagggctgttgggtgagccctggggtcttgctggaaattgtggatggctgaagatggcttcgtgctcccagcctttgggctcgaggcattgccggctgcagggaccttgtgacaaggggggcctctgactgtctttgccccagattatgcatccatcttcccgaagtccgcaaaactccggtggcagaaaatcaccagtgcaggcttcccaggccaccacgctgcaggagcagacggcagcagccagaggagctgacagaagctcatcagtcttagggagttctgaaggcggatttctcagccgcgttcaagctgacgagttcgccagttctgccccagacagtgcagagcggcagaaaaattctaccccaatggctccaaagaaatcgtgtttcccgacgggacggtggaacatctcaaggatggacaggaagagaccttatttcctgatgggacaatcgtaagggtggaaaggaacggcgacaaaaccattgtgctcagcaacgggcagaaagaaatccacacagcccggttcaagaggagggagtacccggatggcaccgtcaagactgtgtattgcagcggctgtcaggaaaccaagtatgcctccgggagggttaagatcaaagatgaagctggaaatgtcgtcctggacgagaagcagatgagccctcaacacgcagcatcacatgggaaatgccaattgcagatttttgctaaaacagacaaaaactaataacatattagctgccctaaatgatcttggagagccaccaaaactttaggactacccaagtcatctagaaattgcaaaggaaaagacattctctcccctatttaggaaacttggttagagcagcacacgtcggagaacaggaggctcacaaaagaacgattttcagtgcccccagcaaggctgcaccctccttgatcatcacaggggccatttctgccttgtgatggacccaggaggtctctgcagagcaagtgccgttggaccagctgattcacaaagtgctgagcccctcttccccgtgtggcccaccccaggcacggctcattcctccagaattatagaagctcagcctggcctgctcccctctggtcaccgacacccctgtcctcgctgggacaagagggagacaattctagtcactacaaggacacccaaggggtgtctgagtcagggctccaatagtgcagttatcgtggcctctcgcagcccggggagcacgtcgcctcttgaaactcgagatttcttaaatcccaatataaaaatgataaccagttacttacttcttttgttgttttgcaggccacctagaaatacaaaatgccaattcacctaatttttatactgaaatgtagatgcccccaacatgattttggaaagatataatttcttgaaaatcttatcagaagatgcatagttaatttttttccattatgtactcatgtttttatgaaatacaataccatattttagggccagggattattttaaccttaaaattgtgcatgcatcattgtagccctcaatatttggtaatgctatttaaagtgactcaagaagcatgtgctatctggctttgaaggaaaaaaaaagaattctgcaattacagtggatggaggccttttcttttcagatgaatgctaaagcaatgcaaggctgtttgtcaggcacaactggcaaaacaaatccattattaaaaagctactttgcatttggctgaaag

SEQ ID NO: 4900 - protein, 147 aa, Homo sapiens
MEKTPAAAEVPREDSNAGEMPSLQQQITSLHQELGRQQSLWADIHRKLQSHMDALRKQNRELREELRGLQRQQWEAGKKPAASPHAGRESHTLALEPAFGKISHLSADEDTTPKYAGRKSQSATLLGQRWSSNHLAPPKVTLRAYRL

SEQ ID NO: 4901 - DNA, 2197 bp, Homo sapiens
ggagatgaggcgggaggacttggggacagctgtggggacacggcccagatgctctggtcccagcagaagtgactggcggggaccaggatgctggagggtcagctcgaggccgggtagcccaaggagggcacccacccagaagacccgtgcccgggagctggggctgccatggagaagacacctgcagcagccgaggtccccagggaggacagcaatgccggggagatgccgtcattacagcagcagatcaccagcctccaccaagagctcgggagacagcagtcgctgtgggctgatattcacagaaaactccagagtcatatggatgccttgaggaagcagaaccgggagctccgagaagagctgagaggcctgcagcggcagcagtgggaagccgggaagaaacccgcagcgtccccacacgcggggcgagaatcacacactctggcattggaacctgcttttggaaaaatttcacatctgtcagctgatgaagacacaacgcccaaatacgctggccgcaagagtcagagtgccactctcctgggacaaagatggtcatctaaccacttagctcctccaaagccaatgagtttaaagacagaaagaattaactcggggaaaacaccaccacaggaagatagagagaaaagtcctcccgggagacgtcaagacagaagtccagcacccactggaaggccgactcccggtgcagaaagacggggggtgtctgaagacggaaagattatgcatccatcttcccgaagtccgcaaaactccggtggcagaaaatcaccagtgcaggcttcccaggccaccacgctgcaggagcagacggcagcagccagaggagctgacagaagctcatcagtcttagggagttctgaaggcggatttctcagccgcgttcaagctgacgagttcgccagttctgccccagacagtgcagagcggcagaaaaattctaccccaatggctccaaagaaatcgtgtttcccgacgggacggtggaacatctcaaggatggacaggaagagaccttatttcctgatgggacaatcgtaagggtggaaaggaacggcgacaaaaccattgtgctcagcaacgggcagaaagaaatccacacagcccggttcaagaggagggagtacccggatggcaccgtcaagactgtgtattgcagcggctgtcaggaaaccaagtatgcctccgggagggttaagatcaaagatgaagctggaaatgtcgtcctggacgagaagcagatgagccctcaacacgcagcatcacatgggaaatgccaattgcagatttttgctaaaacagacaaaaactaataacatattagctgccctaaatgatcttggagagccaccaaaactttaggactacccaagtcatctagaaattgcaaaggaaaagacattctctcccctatttaggaaacttggttagagcagcacacgtcggagaacaggaggctcacaaaagaacgattttcagtgcccccagcaaggctgcaccctccttgatcatcacaggggccatttctgccttgtgatggacccaggaggtctctgcagagcaagtgccgttggaccagctgattcacaaagtgctgagcccctcttccccgtgtggcccaccccaggcacggctcattcctccagaattatagaagctcagcctggcctgctcccctctggtcaccgacacccctgtcctcgctgggacaagagggagacaattctagtcactacaaggacacccaaggggtgtctgagtcagggctccaatagtgcagttatcgtggcctctcgcagcccggggagcacgtcgcctcttgaaactcgagatttcttaaatcccaatataaaaatgataaccagttacttacttcttttgttgttttgcaggccacctagaaatacaaaatgccaattcacctaatttttatactgaaatgtagatgcccccaacatgattttggaaagatataatttcttgaaaatcttatcagaagatgcatagttaatttttttccattatgtactcatgtttttatgaaatacaataccatattttagggccagggattattttaaccttaaaattgtgcatgcatcattgtagccctcaatatttggtaatgctatttaaagtgactcaagaagcatgtgctatctggctttgaagg

SEQ ID NO: 4902 - protein, 298 aa, Homo sapiens
MEKTPAAAEVPREDSNAGEMPSLQQQITSLHQELGRQQSLWADIHRKLQSHMDALRKQNRELREELRGLQRQQWEAGKKPAASPHAGRESHTLALEPAFGKISHLSADEDTTPKYAGRKSQSATLLGQRWSSNHLAPPKPMSLKTERINSGKTPPQEDREKSPPGRRQDRSPAPTGRPTPGAERRGVSEDGKIMHPSSRSPQNSGGRKSPVQASQATTLQEQTAAARGADRSSSVLGSSEGGFLSRVQADEFASSAPDSAERQKNSTPMAPKKSCFPTGRWNISRMDRKRPYFLMGQS

SEQ ID NO: 4903 - DNA, 2140 bp, Homo sapiens
ggagatgaggcgggaggacttggggacagctgtggggacacggcccagatgctctggtcccagcagaagtgactggcggggaccaggatgctggagggtcagctcgaggccgggtagcccaaggagggcacccacccagaagacccgtgcccgggagctggggctgccatggagaagacacctgcagcagccgaggtccccagggaggacagcaatgccggggagatgccgtcattacagcagcagatcaccagcctccaccaagagctcgggagacagcagtcgctgtgggctgatattcacagaaaactccagagtcatatggatgccttgaggaagcagaaccgggagctccgagaagagctgagaggcctgcagcggcagcagtgggaagccgggaagaaacccgcagcgtccccacacgcggggcgagaatcacacactctggcattggaacctgcttttggaaaaatttcacatctgtcagctgatgaagacacaacgcccaaatacgctggccgcaagagtcagagtgccactctcctgggacaaagatggtcatctaaccacttagctcctccaaagccaatgagtttaaagacagaaagaattaactcggggaaaacaccaccacaggaagatagagagaaaagtcctcccgggagacgtcaagacagaagtccagcacccactggaaggccgactcccggtgcagaaagacggggggtgtctgaagacggaaagattatgcatccatcttcccgaagtccgcaaaactccggtggcagaaaatcaccagtgcaggcttcccaggccaccacgctgcaggagcagacggcagcagccagaggagctgacagaagctcatcagtcttagggagttctgaaggcggatttctcagccgcgttcaagctgacgagttcgccagttctgccccagacagtgcagagcggcagaatcttcctgtaaacccaccatcttccctggaaatagcacaggccatggacactaagatgaaaaaggaggaagtacaggaagaaaaacgacatccaaagggcaaggcagatgactgccggcggtccggtttcccgagtgaatttccaggagctctgcacgccgctccctccagacaggacatggggccctgacctggaggccaggcgtttctagcattgttgactgccagtttattcccagtaaataaagcaatacgcttttcaggaggaagatttgttttaaatacttaaaaaaaaacccaaaactatagcctcaaatatcttccagccaccacattttagcccttgaggagagctcagttccggaaggacgcgtcaaggtggcggtggtcggcattgactcaggaaggggtgggaagaggcacctgctgcggctgcggctgcggctacagtgttttgtgagctccgaggagacccagtcctgcctggggcagcacatcatcgctgcttcttcagctcaacagttcgttcatctcacgcctcttgctggcctgttagaaactgggagtcggcctcaggctagctttgctgagggaactctgcctcagtaaaagcgaattcatgtcttgcaagcgggtaaagcatttggataaatgaacaacagggaatgctacttgcagtaacagtttgaattcactgaaatgcttttgtctttagcgcagtggttgtagtggtttgtcaggggagaaggaaacccacatcatttgagcacctgaccttgccatccccgtaggcaggtccatgagacataagtgatgctcctccttggctaagtgcatggaggaaccaatcgctgaagctcatgaaaccacgaagatgaggacacaagaactaggtaacgcgctgtgccctctgctagcgcgatccttcctttctccccacaaccagcggtcacccacctctgcctgcccctatgtctctggctcccccaccctccctcccaggtcttcagcactttcctcttctcgtgactcatcttgcatctacttcttgtgtatcttgcattggatatgccaaagttctttccttttttgtgttttctttcttttaataatataaactccaaaatagattgtttgattcttttcatgtggaacatttaaaatattatttgtgctttatt

SEQ ID NO: 4904 - protein, 326 aa, Homo sapiens; identical to SEQ ID NO: 626

SEQ ID NO: 4905 - DNA, 1737 bp, Homo sapiens
ccctggttgggtcctcacctgggagtcttgccgacacccctagccctccaccccacacacagcccacatgccggtctccaggggccgtggctggagattccgaatcctaccggccacttcccctgagtacactcccagctgaaggcgtctggctgggcctgggcggactcgggggctttgttcccttttctccgtttgcccgcccatggcgttgctgccacgctgatggagcgccctctcatccggcacctgcccggcctctttcctgagcccagctctgtccatgcagatgtgggtgctttctgcattgggggtcccaccgggaggagccaacagtacccctggtagagttgggaaagaactccttcctcacgttactgccagaaaatgaccatagcagcttcacaaaccccgcaggaacctgtcttcctaaagaaatggagcccatgaggtggccgagcctcaggtgtggtccttatgcacagcacagcccaagcctgtgggcacaactcgccctgggctgcctggcacctggactctttcctatcctcggcccaggcctgtgtggccctgtagggccaaacccgacactgtcttcctcctgggtccgctccctgggcctcctgcaccccagactgcttcatggcctctgcagggagcttcacagaggtgagactggtgccatctgtctgcttcagaccaccccaggctctgcgtaccctcacagtcccctctgcgctcctctacggggtggggaagcccttcccatcaggtcagcaccagcctggccaccttgtttctgctgccccctcctcttcaggcccccagaccagactttagttacttgctgctgccgggcagaactggaggccttgtcttgcacaacctccacaacctccaggcatcatctcagctgacagtgacgccatcctggggaagaccccccggatcccgggctctcctggaagcctgtgatgctccttcaccacagcccctgtcccttcataggtcccataagccagtggtgcagggatctggcctttctctcctgtgtctgcctcctgcagaaccatgagcagcttcagggccgaggcagtgcctttccatccgtgaatctcctgagccatcagaatactcgagagagagtgatgcccaagaaatactgactgagtgtattcatgaaagaattaatgttcttacaggatcacttgttgttgaactgacctgacatgtgtatagtgatctcatgaacaagagggaagctgtgcatccattcacttcaattggatttagcaatcgcagtaggataatgatatttccacaatgtatatgctctgtccctttaaatttaactttttgctttttagacagaagctcatcagtcttagggagttctgaaggcggatttctcagccgcgttcaagctgacgagttcgccagttctgccccagacagtgcagagcggcagaatcttcctgtaaacccaccatcttccctggaaatagcacaggccatggacactaagatgaaaaaggaggaagtacaggaagaaaaacgacatccaaagggcaaggcagatgactgccggcggtccggtttcccgagtgaatttccaggagctctgcacgccgctccctccagacaggacatggggccctgacctggaggccaggcgtttctagcattgttgactgccagtttattcccagtaaataaagcaatacgcttttcaggagg

SEQ ID NO: 4906 - protein, 137 aa, Homo sapiens
MNKREAVHPFTSIGFSNRSRIMIFPQCICSVPLNLTFCFLDRSSSVLGSSEGGFLSRVQADEFASSAPDSAERQNLPVNPPSSLEIAQAMDTKMKKEEVQEEKRHPKGKADDCRRSGFPSEFPGALHAAPSRQDMGP

SEQ ID NO: 4907 - DNA, 3214 bp, Homo sapiens
gacacggcccagatgctctggtcccagcagaagtgactggcggggaccaggtgaggtgatgaggtctgttagtggggctgagggaaggggtcttccccagactgagggggtcacaagtttggggccgaggacactggggtatcccctcggaggagcgggaaagaagaagctttctcagggctgtgaggaccgcggacccttgcccacttccacagaaactgtcccaatccccgcggggaaggaacagccagggatccggttactggcattggaacctgcttttggaaaaatttcacatctgtcagctgatgaagacacaacgcccaaatacgctggccgcaagagtcagagtgccactctcctgggacaaagatggtcatctaaccacttagctcctccaaagccaatgagtttaaagacagaaagaattaactcggggaaaacaccaccacaggaagatagagagaaaagtcctcccgggagacgtcaagacagaagtccagcacccactggaaggccgactcccggtgcagaaagacggggggtgtctgaagacggaaaggtgacctcggaaacctgggtcactctacactggcagcatggaaaattcagattcagatgaagttccacttaggtctcataagagtactcaatttgttattcgaaatagacctagtaatttattaacctaattatgtttctatagataaaactttgaatttctgcagacatgtctttaatgctataaaagcaaataaattgaattgggttttaaaaagcaaacaacttgaattgggttttaaaaatcaattactttcccgagctccgtaattggtatatttctgcagagtctttaaaagaattgatctaccttgtagtgctgagctcagggctgttgggtgagccctggggtcttgctggaaattgtggatggctgaagatggcttcgtgctcccagcctttgggctcgaggcattgccggctgcagggaccttgtgacaaggggggcctctgactgtctttgccccagattatgcatccatcttcccgaagtccgcaaaactccggtggcagaaaatcaccagtgcaggcttcccaggccaccacgctgcaggagcagacggcagcagccagaggagctggtgagcagggtcgagggctcctaactgtttccatgcttcctgtaaagtggggggctttcttgtggatacgcgtgagcagaacatcttactacggcaaggacatgtccttcatggagctgcctaatttctgaccacttttgtccgattccctggttgggtcctcacctgggagtcttgccgacacccctagccctccaccccacacacagcccacatgccggtctccaggggccgtggctggagattccgaatcctaccggccacttcccctgagtacactcccagctgaaggcgtctggctgggcctgggcggactcgggggctttgttcccttttctccgtttgcccgcccatggcgttgctgccacgctgatggagcgccctctcatccggcacctgcccggcctctttcctgagcccagctctgtccatgcagatgtgggtgctttctgcattgggggtcccaccgggaggagccaacagtacccctggtagagttgggaaagaactccttcctcacgttactgccagaaaatgaccatagcagcttcacaaaccccgcaggaacctgtcttcctaaagaaatggagcccatgaggtggccgagcctcaggtgtggtccttatgcacagcacagcccaagcctgtgggcacaactcgccctgggctgcctggcacctggactctttcctatcctcggcccaggcctgtgtggccctgtagggccaaacccgacactgtcttcctcctgggtccgctccctgggcctcctgcaccccagactgcttcatggcctctgcagggagcttcacagaggtgagactggtgccatctgtctgcttcagaccaccccaggctctgcgtaccctcacagtcccctctgcgctcctctacggggtggggaagcccttcccatcaggtcagcaccagcctggccaccttgtttctgctgccccctcctcttcaggcccccagaccagactttagttacttgctgctgccgggcagaactggaggccttgtcttgcacaacctccacaacctccaggcatcatctcagctgacagtgacgccatcctggggaagaccccccggatcccgggctctcctggaagcctgtgatgctccttcaccacagcccctgtcccttcataggtcccataagccagtggtgcagggatctggcctttctctcctgtgtctgcctcctgcagaaccatgagcagcttcagggccgaggcagtgcctttccatccgtgaatctcctgagccatcagaatactcgagagagagtgatgcccaagaaatactgactgagtgtattcatgaaagaattaatgttcttacaggatcacttgttgttgaactgacctgacatgtgtatagtgatctcatgaacaagagggaagctgtgcatccattcacttcaattggatttagcaatcgcagtaggataatgatatttccacaatgtatatgctctgtccctttaaatttaactttttgctttttagacagaagctcatcagtcttagggagttctgaaggcggatttctcagccgcgttcaagctgacgagttcgccagttctgccccagacagtgcagagcggcaggtaggtggctgagtggcttctgtgagggcggcccacccggttcccctcagggagacctgagaaggtgaccttttcgtcctggggaagtgagattcggagccggtgtcatgagatggttgcatcttcccatcttctcaacaagaacagaaaattaagatgattccaaatgtctctttatttcctgaagttcagcctttcaaacagagacttttttttatagatttaagttggttgcatttagcacaaacaagattaatgttttttatgacttaagagttcccctagtcagagtttcattttttatcattttgatttacagttctcagttgacattaatagactcgaaggcaagaatagcaaacatacttctaagccctagctaggggccgacttgtaacatgctatattttacaaaaaaaaaaagtcaataaaataaaattattttctctacgccagg

SEQ ID NO: 4908 - protein, 187 aa, Homo sapiens
MRSVSGAEGRGLPQTEGVTSLGPRTLGYPLGGAGKKKLSQGCEDRGPLPTSTETVPIPAGKEQPGIRLLALEPAFGKISHLSADEDTTPKYAGRKSQSATLLGQRWSSNHLAPPKPMSLKTERINSGKTPPQEDREKSPPGRRQDRSPAPTGRPTPGAERRGVSEDGKVTSETWVTLHWQHGKFRFR

SEQ ID NO: 4909 - DNA, 2705 bp, Homo sapiens
aagacagaaagtccgttggaaccgtcggctgctctctggtctctggagatgaggcgggaggacttggggacagctgtggggacacggcccagatgctctggtcccagcagaagtgactggcggggaccaggatgctggagggtcagctcgaggccgggtagcccaaggagggcacccacccagaagacccgtgcccgggagctggggctgccatggagaagacacctgcagcagccgaggtccccagggaggacagcaatgccggggagatgccgtcattacagcagcagatcaccagcctccaccaagagctcgggagacagcagtcgctgtgggctgatattcacagaaaactccagagtcatatggatgccttgaggaagcagaaccgggagctccgagaagagctgagaggcctgcagcggcagcagtgggaagccgggaagaaacccgcagcgtccccacacgcggggcgagaatcacacactctggcattggaacctgcttttggaaaaatttcacatctgtcagctgatgaagacacaacgcccaaatacgctggccgcaagagtcagagtgccactctcctgggacaaagatggtcatctaaccacttagctcctccaaaggtgacccttcgtgcttatcgtctgtaaagagcagcagagcttctgtacccaaacacacacatcccatcagctcctcaccacacagtttcacctccctgggggagcatggtgctccctggagtcctgcgtttttccaaggacatgggtgcatgcctttcaaacaagatcctaaaccacagcacttcctgctgtagggcagattccaagtcctgccagctgcttccctctgagctcactcacggcagcaaatgtctggctggggccgagtggactcgggggctttgtttccgtgggtgccacccacggaggtgatatgtgtggcgctctcgccacatgccatggcccgtgcgtctgggggctcgcagcctcccacgatccctgcttctgcactgcggtcttgcacctgctgcttgtcagcgtggactcctctgaacaggggctgtgccgcttgcttgggggccacagtgcaggatgctattttgtctccaacacatttttccttgttaaaattagctcctctttagaaccttctgctggccagtgtgtctcttcccatcccagctttgtgtcaccctcacactcgggaggcaaatctcgtgagtcctgagccagcaactgatactgggtcgatgtggatggagaagactgcccccccaactcctgaagatgatttatcccctcgcttctttcccaaagcaactgctgagcagataacactttattccctgaaggaagatcagaaatctactccaagcatttgtcacaagtaggaaaatagtcctttcagatcctatgagtacaaaacatcgaaagtcccaggacgtactgcataggtccagcctcctgtgagacacggacttctctcacgcttctgcattgacctgagttaatcacacgcgtgctggacaatgtacgagtaaatagataactgaatgggtggcttatccacgcctccaaaccctgaatttttaagcagcagaaaaggtagaacattattttcattatgcatttttgaattgagtttcaagtactttatttcactgttgactattctacaacgtcagccataccgtccctgaattcctcaagagcgtggctgtaaaatggggaatgagagcgtggatgcctcatgtgtccttctgtaggaagcgggggtagaatcctctagattctgtggcagctggtgtgatgtgttgctcaacattttaaaataatatgatggttattaatgcaaccacatttattttcagccaatgagtttaaagacagaaagaattaactcggggaaaacaccaccacaggaagatagagagaaaagtcctcccgggagacgtcaagacagaagtccagcacccactggaaggccgactcccggtgcagaaagacggggggtgtctgaagacggaaagattatgcatccatcttcccgaagtccgcaaaactccggtggcagaaaatcaccagtgcaggcttcccaggccaccacgctgcaggagcagacggcagcagccagaggagctgacagaagctcatcagtcttagggagttctgaaggcggatttctcagccgcgttcaagctgacgagttcgccagttctgccccagacagtgcagagcggcaggtaggtggctgagtggcttctgtgagggcggcccacccggttcccctcagggagacctgagaaggtgaccttttcgtcctggggaagtgagattcggagccggtgtcatgagatggttgcatcttcccatcttctcaacaagaacagaaaattaagatgattccaaatgtctctttatttcctgaagttcagcctttcaaacagagacttttttttatagatttaagttggttgcatttagcacaaacaagattaatgttttttatgacttaagagttcccctagtcagagtttcattttttatcattttgatttacagttctcagttgacattaatagactcgaaggcaagaatagcaaacatacttctaagccctagctaggggccgacttgtaacatgctatattttacaaaaaaaaaaagtcaataaaataaaattattttctctacgcc

SEQ ID NO: 4910 - protein, 147 aa, Homo sapiens; identical to SEQ ID NO: 4900

SEQ ID NO: 4911 - DNA, 545 bp, Homo sapiens
cccaaggagggcacccacccagaagacccgtgcccgggagctggggctgccatggagaagacacctgcagcagccgaggtccccagggaggacagcaatgccggggagatgccgtcattacagcagcagatcaccagcctccaccaagagctcgggagacagcagtcgctgtgggctgatattcacagaaaactccagagtcatatggatgccttgaggaagcagaaccgggagctccgagaagagctgagaggcctgcagcggcagcagtgggaagccgggaagaaacccgcagcgtccccacacgcggggcgagaatcacacactctggtaccaaaggcgcatttgtgtttttgtatcatttgcgtcgtgtaaatatagcgtccccgtaaagatgtgggctttgttgctgggtgacgtggtatctctcacgttccaggtggtgggagggcttgctatctttccatcagctccatttcccacaagtaaagattaaagaactggatacatcaggcatctcacctgacactccagcagacagaagc

SEQ ID NO: 4912 - protein, 107 aa, Homo sapiens
MEKTPAAAEVPREDSNAGEMPSLQQQITSLHQELGRQQSLWADIHRKLQSHMDALRKQNRELREELRGLQRQQWEAGKKPAASPHAGRESHTLVPKAHLCFCIICVV

SEQ ID NO: 4913 - DNA, 442 bp, Homo sapiens
agtgactggcggggaccagaaactgtcccaatccccgcggggaaggaacagccagggatccggttactggatgctggagggtcagctcgaggccgggtagcccaaggagggcacccacccagaagacccgtgcccgggagctggggctgccatggagaagacacctgcagcagccgaggtccccagggaggacagcaatgccggggagatgccgtcattacagcagcagatcaccagcctccaccaagagctcgggagacagcagtcgctgtgggctgatattcacagaaaactccagagtcatatggatgccttgaggaagcagaaccgggagctccgagaagagctgagaggcctgcagcggcagcagtgggaagccgggaagaaacccgcagcgtccccacacgcggggcgagaatcacacactctggtaccaaaggcg

SEQ ID NO: 4914 - protein, 96 aa, Homo sapiens
MEKTPAAAEVPREDSNAGEMPSLQQQITSLHQELGRQQSLWADIHRKLQSHMDALRKQNRELREELRGLQRQQWEAGKKPAASPHAGRESHTLVPK

SEQ ID NO: 4915 - DNA, 4505 bp, Homo sapiens
cttccgactggtgtggatcccagacaatttcagggtcctgcagggtttgagaccctctgtgaacactgacccgggaccccgttttgcccatgggaagttgaagccagcgcagcccccggccaggggcactgtctcctcggccccgggatgctggacggaggggacaacgtgcaggggcagctgctgctgggctgtggacctcccggaaccggaggagcccgggaggggctggcccagcagtgagggctccgatgcgcctcaattcatatgctaaggagccctggattcggctttaattgccggagtgggaggtgaccccaggggcccaagctgggggcgtggctgggaaatgcacagaaagagacttcgacgggggtggctatggtttgtgctgtgctgtgcacacgtctggctgatagaaatctatgtctataaacagttccttccaggtctccgcggaaaactgaagattcctgtgtgctttcagaaaagaggttccaaggaaaagggcagccatttagttttcacaagtctgggcagtgagcgatttggagcttccatccttggctgacatcatgaacaccaatgttgctggcctcgatcgcaagaagggtgggacttcgtgcttagccttcctggggaagggcctgtccctgggtcacgtccccagtgaccacaggaggaagagaagggatgaggatcctggggggcctggctctgcgtccacccgtctctgtgtggatgcctcctgtgtccagggtgataaccggtcacccgactgtgtccttggggtcattcctggcttctcctgccgcttgatcacccctctggctgcagggagcccaggacggagaaggagagacctcattctccctggggaatgcaggctgagaccacccatgcttctggagcagggtttcatgtgggggaggtccctccagggagggacagtgaactgacgctgtgatattgctcaggatggaggcccagggcagacggcgtcaccagctgccgcagaagccaggttgccagaggggctgtgtcaccagccctggggacgccatgttgctgtgcgtttcgacacattcctgtggagtgtctgaggaaaaacagggcacacgcattcctgataagattgcaccaaaaggccagggtgggggaccaggctcccagcctccctctgtctcagttgggggccgaggggcagggacagccaggagaaggcccagccagatgctgctggcttcccccaggactctgcccgactggcctctcggttaaacctcctcacctgagcctctcttatggcgtggttgagtcacacatgagagggttttgtctgccgggaggggctcttcttatgggacaacaggggcgcgaggtgtgtggtgtggctctcagggatgtgtctggactctatcacgtctgagtgtccctggggccagagtgctgggggcaggagcctgtggtttatcaagcaccttctgccagctgaggccgtgactttttgtccctcactggaggaggcttcaaggtcagcctctttttcctttggtcccaagcttgccgtgtctcctcctcattccccacgtccacatgagaaggcagtgttcacaggtgggttggtctgagattgaaatcgcaaggccaggattttctgtctgggcagccccctcgagtcagcctcagaggagcccagacctcttggatggctttcggcgagcctcccagtgggcacagcactcgccaccggacactgcatggactcagcttccacactgcgatgggtatggcctggtccttgcactaccaggggcaaggaggaacgctatgcctggtgggggtgagcaccccatctcatgacaaagcagttctccagggtctgccccacttttctgtaaacctgggggtccagcccagtgcattggctggaaggagaggggacgcctcctgtcccagctcatggcgctctgccgaccccactgtcagccccaaccttggtgctccggggggccccaatgccatagatgcacttcatggggagcaactggggctgttcctgaggaccaagatgggcagagaccctaaagacgtccatggattgacccctgctctctgtggcccctgcctggctggcctcccctcctcacactctccacagttctcatgcaacacagcgcctctaaaaatgctgtcctgaaaatgtgcgctttggggaagagcagcttcctcctcttcgaccaagttcgggtcccttctacccttcagtggctgtaggcagtcggtgagggtcctggacggggtgggccgggggcagggaggggcactgtgggctttggttgctcaggggtcctggcagacacaccaacctggtgtgtttggaaatgcacctggatgtgtgctgacctctgtgtggaggaccacgggtctgttcatcccccactggctgcacccccgggaggctgcagcgtgcactattcggtccctacgctgcagttattcttgtatctgccttgtcactggccttgctgcccatgactccctcaggtcagcccacgtctctgtcaaactttcatcctccgcaattctgcgcagcctgtaaatgcttaaaaaatattgcggaacaggtgagtcacattacagaaaggacgcaacctggaaaagcacagacattccttccccttctgcacctgttagagtaagggaggggcatgagggggtgggacctgcacaaggtgcagctgatagaaatgcagtcttcaggaaaagccctggctctgaaacggcaaaggctgtgtgcctgggaaaaagacaaacgtgtcttatccggagacggcccccctgccccaaaggctgtcacgctgccgttcagttatctattctgcagcgatagaactggcttgacctaaaaattcagtgacggaaaaatgtcatctaatgctgcttagtgcagtcaggcggtcagcagatgagggcagaaggccactggtctttgacagaacacgcggatggcgaaataacaaaacaggtggcggatgagggcagaaggccactggtctttgacagaatatgcggacggcgaaataacaaaacaggcagcagatgagggcagaaggccactggtctttgacagaacacgcggacggcgaaataacaaaacaggattcaggctgcactgtcagcagcagagacaaacaattcttccaaaataaacaagcgagctcccagcagaggcctgtgaagtctcccgttctgcccaaaccacacacatgtggcccacagaggaggctgcagaggcccacggggaactcaagtggccgagtgtgagacccaggccaccggccgtcctccctgtcagaacaaaaggttcatggaaagggccaggaggacacagcaaggggaaccgaatgccactggcatttcttggatcttttgtaccatagtctaagcatttagaggaagcaccgcgagtttgctgccctggaagctgacgtgctccccaaacacaagacgcaggactggaggccttgccccgcagctcgagaggccgttttgggacatatcaaggaaggaaggcttaagcgacacaggacctggctgacttacgcacccgctgtctaaagatggggtgctggccggtgaactggagtggctcacggcagacctggagtgacagtcatgggtctgtacctgtgtggagtcctccatggctgggcttgcagagactgagctggactgcattgcacattggctggaaggagaggagccactgagagacccagcttacggcactctgcccaccccactgcccaccccaaccctggcgctccaggggggcccaatgccacagacacactccagggggacaattggggctgttcccaaggaccaggagggacaaatgccctaaagatgtccatggtttgacccctgctgtctgtgggccctgcctggctggcctccccttctcacactctccacagtcctcatgcaacacagcacatctgaaaatgctgtcctgaaaacgcgcactctggggaagagcagcttcctcctctccgagtggagcgggctggccccatgaggcgtgattttcactgtgaaatgtgcttcacgtaacactggggcctttgtcaccatttttaattgtacagtttggaggcattaagtgtgttcatcatcaccaccttccacccacagagcttcttcgtcttcccaaacggaaactctgtcgtcggtaaacactccctcccctcccacagcccctggcacctgccttctccttcctgtctccatgaacctgacaactcttcggaccccacctaagtggagttgggcaggatttgtcctctgtggctggctcgcgtcactcagcggccctgaagactcatctgcgccgcagcctgtcccagaatctccctccctctaacactgattaatatcctgctgcacaaaaaaacaaagatgatcatttgatacccgaaatccacttgaaaattggtaag

SEQ ID NO: 4916 - protein, 73 aa, Homo sapiens
MHRKRLRRGWLWFVLCCAHVWLIEIYVYKQFLPGLRGKLKIPVCFQKRGSKEKGSHLVFTSLGSERFGASILG

SEQ ID NO: 4917 - DNA, 2993 bp, Homo sapiens
agtgctgggggcaggagcctgtggtttatcaagcaccttctgccagctgaggccgtgactttttgtccctcactggaggaggcttcaaggtcagcctctttttcctttggtcccaagcttgccgtgtctcctcctcattccccacgtccacatgagaaggcagtgttcacaggtgggttggtctgagattgaaatcgcaaggccaggattttctgtctgggcagccccctcgagtcagcctcagaggagcccagacctcttggatggctttcggcgagcctcccagtgggcacagcactcgccaccggacactgcatggactcagcttccacactgcgatgggtatggcctggtccttgcactaccaggggcaaggaggaacgctatgcctggtgggggtgagcaccccatctcatgacaaagcagttctccagggtctgccccacttttctgtaaacctgggggtccagcccagtgcattggctggaaggagaggggacgcctcctgtcccagctcatggcgctctgccgaccccactgtcagccccaaccttggtgctccggggggccccaatgccatagatgcacttcatggggagcaactggggctgttcctgaggaccaagatgggcagagaccctaaagacgtccatggattgacccctgctctctgtggcccctgcctggctggcctcccctcctcacactctccacagttctcatgcaacacagcgcctctaaaaatgctgtcctgaaaatgtgcgctttggggaagagcagcttcctcctcttcgaccaagttcgggtcccttctacccttcagtggctgtaggcagtcggtgagggtcctggacggggtgggccgggggcagggaggggcactgtgggctttggttgctcaggggtcctggcagacacaccaacctggtgtgtttggaaatgcacctggatgtgtgctgacctctgtgtggaggaccacgggtctgttcatcccccactggctgcacccccgggaggctgcagcgtgcactattcggtccctacgctgcagttattcttgtatctgccttgtcactggccttgctgcccatgactccctcaggtcagcccacgtctctgtcaaactttcatcctccgcaattctgcgcagcctgtaaatgcttaaaaaatattgcggaacaggtgagtcacattacagaaaggacgcaacctggaaaagcacagacattccttccccttctgcacctgttagagtaagggaggggcatgagggggtgggacctgcacaaggtgcagctgatagaaatgcagtcttcaggaaaagccctggctctgaaacggcaaaggctgtgtgcctgggaaaaagacaaacgtgtcttatccggagacggcccccctgccccaaaggctgtcacgctgccgttcagttatctattctgcagcgatagaactggcttgacctaaaaattcagtgacggaaaaatgtcatctaatgctgcttagtgcagtcaggcggtcagcagatgagggcagaaggccactggtctttgacagaacacgcggatggcgaaataacaaaacaggtggcggatgagggcagaaggccactggtctttgacagaatatgcggacggcgaaataacaaaacaggcagcaggctgcactgtcagcagcagagacaaacaattcttccaaaataaacaagcgagctcccagcagaggcctgtgaagtctcccgttctgcccaaaccacacacatgtggcccacagaggaggctgcagaggcccacggggaactcaagtggccgagtgtgagacccaggccaccggccgtcctccctgtcagaacaaaaggttcatggaaagggccaggaggacacagcaaggggaaccgaatgccactggcatttcttggatcttttgtaccatagtctaagcatttagaggaagcaccgcgagtttgctgccctggaagctgacgtgctccccaaacacaagacgcaggactggaggccttgccccgcagctcgagaggccgttttgggacatatcaaggaaggaaggcttaagcgacacaggacctggctgacttacgcacccgctgtctaaagatggggtgctggccggtgaactggagtggctcacggcagacctggagtgacagtcatgggtctgtacctgtgtggagtcctccatggctgggcttgcagagactgagctggactgcattgcacattggctggaaggagaggagccactgagagacccagcttacggcactctgcccaccccactgcccaccccaaccctggcgctccaggggggcccaatgccacagacacactccagggggacaattggggctgttcccaaggaccaggagggacaaatgccctaaagatgtccatggtttgacccctgctgtctgtgggccctgcctggctggcctccccttctcacactctccacagtcctcatgcaacacagcacatctgaaaatgctgtcctgaaaacgcgcactctggggaagagcagcttcctcctctccgagtggagcgggctggccccatgaggcgtgattttcactgtgaaatgtgcttcacgtaacactggggcctttgtcaccatttttaattgtacagtttggaggcattaagtgtgttcatcatcaccaccttccacccacagagcttcttcgtcttcccaaacggaaactctgtcgtcggtaaacactccctcccctcccacagcccctggcacctgccttctccttcctgtctccatgaacctgacaactcttcggaccccacctaagtggagttgggcaggatttgtcctctgtggctggctcgcgtcactcagcggccctgaagactcatctgcgccgcagcctgtcccagaatctccctccctctaacactgattaatatcctgctgcacaaaaaaacaaagatgatcatttgatacccgaaatccacttgaaaattggtaag

SEQ ID NO: 4918 - protein, 74 aa, Homo sapiens
MRAEGHWSLTEYADGEITKQAAGCTVSSRDKQFFQNKQASSQQRPVKSPVLPKPHTCGPQRRLQRPTGNSSGRV

SEQ ID NO: 4919 - DNA, 2557 bp, Homo sapiens
aacgtttctatctgcaaatcaagcaagcgcttgggcgaacatcttcccaaggcagagatgaagaatggatttcagctacagaaggcaggaatcctttggacttggccctttatcagtggaatggacagagcagctctcggtggggtctctgttgggaatgcctgctgagacgggaccaaggacggctgcaggatgtggtgtctgtgctcagcgtcacctcctcccaggctcctgggaagcacctgagcatctcctgacaaagccaccatgagcaagaccctcagagaaggtatgaagatgagaggctggtgtgaagaggctgctgtgaagcaactatatagcatcgggcaggacataaggggaaattgttgctttcatgttcctttacccccacagtttggatttctgccacaaggatcactgtggtcttcctccctggggctcactccacctaccccacacctcccacctcccccgtcctctcttgggggacttcctgagttctcgacagagcagtttcactgtcttctctccacgcttcctggactggcccgcccatttttttctatgacccagaattccttcccaaataagagcgtcatattccttgagccccttcactagaagcaaggagatgggcaggcgttgaactgcggcttttctctagactcttccctaatccctaggttcccccaactatttagtctagagcaagcccaggaacagtgattttttttttttaacctgccatttctgttattcaagctgttttagtcagttcaggctgctgtaacaaaaatgcaatggcctgggtggttttaacaacagaaatggatttctcacagttcttgtgaggctgggacgcaggaacccccacatccaagtgccaggcagttccgtggctgggagggctccagactggtgtgtggatggcaccttctgctgtgtcctcacatggctgagagatgggtcatctctgttcttatcagggcactaatcccattcacaaggccccccatgacctaatcacctcctaaatgccccgcttcctaataccagcaccttggaaaatagggcttcaagatacaaattttgggggactcaaacattccatccatagcacccgctcatgtgctgtgatgtccagtgagcaggcggagttccagggctggtcagtgccaggtgctccttctcccacccgagaacaggggccaggttgctcctcaggcaccctgggcaactgccccttcccttccagtggggcctgacctggctaccgagcttggcagctaataggcgggcccctcagcattcacgctcctgagctgctttatcaaactaggattgttcccccaggtctaagaaaaccatccattcactgcaaagttatttattactgcggatgggctaggagttagaggaagagagtgactcaaatcacaacacctcctggacgaagctggaagggattaaaatacggcctaatttctcccttgctgtgtgaagcgtgtggttctcctagaacatcagcccgactgtcgctgggtagcggcggtactgttcattctgcattagctttgtccagattgttcagtgtgggtccctgcctacagatcttgattccttgagattgccctttgtgcttctgtctggggactgcctgtttctgtaatggccaccgtctcagaacacatggttgtaggcctcagcatttgccttacacacagcccccttggagacaaaccgtgtctgtgtccctcagaaggccctgactttcagggcacactccagcctgactttggcactctgctagacacatccgaaacgctggttctcgtgttgaagtctgttatggatatgtagggtaaggcagggaaactggagcgcctgcatacccttgacttcctccatttggaaaagataaccctgagacatggtggaggagaaggggccctgacctgtcagctacatctggatgtaactcccctgatgaagaaagtgccagaggcagcaaagcagcccttatagggtattttgtgctcccccaacagaggaagaggagcttagggtctccagggagaatgtctggttgtgaagagccgccaggacctggagctgcacggttgctcagtgtgcatttcacttggtcagcccctacgctggagagtgcttgcatccgaaccttcagtgcctggatagacactgagctgagcgaacggtatgctggaaaatgaagcgtgcaagtgacaaagtgctcaacttagactctgggcaaaattctcacaaagggctttctaatcctcacttaatggaagagtggagcaatttccagcagaagttgtggcttgcttcaccaggtctgctcaggtcagcggggtgagcctacggccaggatgggtggtaattaatattggaatacttggccagtctgcagacctcagaccacaaaaaaccctccatcctcaagcagtctcttctttatgcctcgcaaggggaagataattaaagactgtggtaacgggttaatttataggaaaataatgtagcatactcaact

SEQ ID NO: 4920 - protein, 68 aa, Homo sapiens
MDFSYRRQESFGLGPLSVEWTEQLSVGSLLGMPAETGPRTAAGCGVCAQRHLLPGSWEAPEHLLTKPP

SEQ ID NO: 4921 - DNA, 3867 bp, Homo sapiens
ggtctatggttgcagcttttaggaggccacggcttttactcccaacaggcccactgagactaatggggccacactactgggagggggcagtgtttctcaaagcatggtctttagaccgtctgagtgagaaaccccggggcaatgatttcgctggttcccagtcagatctgccactgccgaatctgtgatgaggcccagaaagctcctgacagacggtgcctctgtgtgcagcaacaggagaccacggcggtctcacctggaaactcttccacagttgtcatttcagcagcgctccacaagtgatggagttgactcccatcagagccctcctggacatgaactcctgagtgccagaaacaagattcatttaaagatacaactgtgaacgctgctgaccacattccagcgcagtgtggatgttcaacaccgaagggaggggactcgggcttggatctgcagctagcattggatggacacagaatcctgaactatgcatcgtgctttagctgccatgaaaattgatttttttttttttcagaaaggaatgtgccaatgatgggacttaagctggtgaaaaccacgtggaacgggatgctcatgggacctgccccttggagctccaggcctccaggcctcagtgctggttttcctaagtccttattttctcccgtgtttggctgggggctggtccgacttctccctttggtggactctcagttgtcaagtgtgaagtctttgaactgcacacaagagtggggacaacgtttctatctgcaaatcaagcaagcgcttgggcgaacatcttcccaaggcagagatgaagaatgggtactctaggatgctccattttgggacaaacgtctagtggggccacatttgcatggcaacatgccatttccactttttccgtatttagaagcttcccatggagctcccgctgacaggagccactcatgtgcacactgagtggaggctcagaaggaggatttgtcgtagagttgtttttcagaggctgggagtcagggctgagggccagcgggtggctctgcacccccatccctccatcccctgtggaatgccaggagttctcttctccgtccctcatgcgtgatgggggacaaatgtctcctcaccggtgacaataatgacaggcttctgtccagaggcaggaggggggccagtatcatgcactgaagaaactttcacagcacagttgtctgagacagggaaacccacacgcagacggccaggggaccttgacctccttagcaaacaggaaacaaagtgctcttgttctcaggccggaatgaagcggctgtgcgaacacatcccaattgtacatctgatgctgactcacacagagcgtttccatttttagatttcagctacagaaggcaggaatcctttggacttggccctttatcagtggaatggacagagcagctctcggtggggtctctgttgggaatgcctgctgagacgggaccaaggacggctgcaggatgtggtgtctgtgctcagcgtcacctcctcccaggctcctgggaagcacctgagcatctcctgacaaagccaccatgagcaagaccctcagagaaggtatgaagatgagaggctggtgtgaagaggctgctgtgaagcaactatatagcatcgggcaggacataaggggaaattgttgctttcatgttcctttacccccacagtttggatttctgccacaaggatcactgtggtcttcctccctggggctcactccacctaccccacacctcccacctcccccgtcctctcttgggggacttcctgagttctcgacagagcagtttcactgtcttctctccacgcttcctggactggcccgcccatttttttctatgacccagaattccttcccaaataagagcgtcatattccttgagccccttcactagaagcaaggagatgggcaggcgttgaactgcggcttttctctagactcttccctaatccctaggttcccccaactatttagtctagagcaagcccaggaacagtgattttttttttttaacctgccatttctgttattcaagctgttttagtcagttcaggctgctgtaacaaaaatgcaatggcctgggtggttttaacaacagaaatggatttctcacagttcttgtgaggctgggacgcaggaacccccacatccaagtgccaggcagttccgtggctgggagggctccagactggtgtgtggatggcaccttctgctgtgtcctcacatggctgagagatgggtcatctctgttcttatcagggcactaatcccattcacaaggccccccatgacctaatcacctcctaaatgccccgcttcctaataccagcaccttggaaaatagggcttcaagatacaaattttgggggactcaaacattccatccatagcacccgctcatgtgctgtgatgtccagtgagcaggcggagttccagggctggtcagtgccaggtgctccttctcccacccgagaacaggggccaggttgctcctcaggcaccctgggcaactgccccttcccttccagtggggcctgacctggctaccgagcttggcagctaataggcgggcccctcagcattcacgctcctgagctgctttatcaaactaggattgttcccccaggtctaagaaaaccatccattcactgcaaagttatttattactgcggatgggctaggagttagaggaagagagtgactcaaatcacaacacctcctggacgaagctggaagggattaaaatacggcctaatttctcccttgctgtgtgaagcgtgtggttctcctagaacatcagcccgactgtcgctgggtagcggcggtactgttcattctgcattagctttgtccagattgttcagtgtgggtccctgcctacagatcttgattccttgagattgccctttgtgcttctgtctggggactgcctgtttctgtaatggccaccgtctcagaacacatggttgtaggcctcagcatttgccttacacacagcccccttggagacaaaccgtgtctgtgtccctcagaaggccctgactttcagggcacactccagcctgactttggcactctgctagacacatccgaaacgctggttctcgtgttgaagtctgttatggatatgtagggtaaggcagggaaactggagcgcctgcatacccttgacttcctccatttggaaaagataaccctgagacatggtggaggagaaggggccctgacctgtcagctacatctggatgtaactcccctgatgaagaaagtgccagaggcagcaaagcagcccttatagggtattttgtgctcccccaacagaggaagaggagcttagggtctccagggagaatgtctggttgtgaagagccgccaggacctggagctgcacggttgctcagtgtgcatttcacttggtcagcccctacgctggagagtgcttgcatccgaaccttcagtgcctggatagacactgagctgagcgaacggtatgctggaaaatgaagcgtgcaagtgacaaagtgctcaacttagactctgggcaaaattctcacaaagggctttctaatcctcacttaatggaagagtggagcaatttccagcagaagttgtggcttgcttcaccaggtctgctcaggtcagcggggtgagcctacggccaggatgggtggtaattaatattggaatacttggccagtctgcagacctcagaccacaaaaaaccctccatcctcaagcagtctcttctttatgcctcgcaaggggaagataattaaagactgtggtaacgggttaatttataggaaaataatgtagcatactcaact

SEQ ID NO: 4922 - protein, 65 aa, Homo sapiens
MRPRKLLTDGASVCSNRRPRRSHLETLPQLSFQQRSTSDGVDSHQSPPGHELLSARNKIHLKIQL

SEQ ID NO: 4923 - DNA, 2801 bp, Homo sapiens
ggtctatggttgcagcttttaggaggccacggcttttactcccaacaggcccactgagactaatggggccacactactgggagggggcagtgtttctcaaagcatggtctttagaccgtctgagtgagaaaccccggggcaatgatttcgctggttcccagtcagatctgccactgccgaatctgtgatgaggcccagaaagctcctgacagacggtgcctctgtgtgcagcaacaggagaccacggcggtctcacctggaaactcttccacagttgtcatttcagcagcgctccacaagtgatggagttgactcccatcagagccctcctggacatgaactcctgagtgccagaaacaagattcatttaaagatacaactgtgaacgctgctgaccacattccagcgcagtgtggatgttcaacaccgaagggaggggactcgggcttggatctgcagctagcattggatggacacagaatcctgaactatgcatcgtgctttagctgccatgaaaattgatttttttttttttcagaaaggaatgtgccaatgatgggacttaagctggtgaaaaccacgtggaacgggatgctcatgggacctgccccttggagctccaggcctccaggcctcagtgctggttttcctaagtccttattttctcccgtgtttggctgggggctggtccgacttctccctttggtggactctcagttgtcaagtgtgaagtctttgaactgcacacaagagtggggacaacgtttctatctgcaaatcaagcaagcgcttgggcgaacatcttcccaaggcagagatgaagaatgggtactctaggatgctccattttgggacaaacgtctagtggggccacatttgcatggcaacatgccatttccactttttccgtatttagaagcttcccatggagctcccgctgacaggagccactcatgtgcacactgagtggaggctcagaaggaggatttgtcgtagagttgtttttcagaggctgggagtcagggctgagggccagcgggtggctctgcacccccatccctccatcccctgtggaatgccaggagttctcttctccgtccctcatgcgtgatgggggacaaatgtctcctcaccggtgacaataatgacaggcttctgtccagaggcaggaggggggccagtatcatgcactgaagaaactttcacagcacagttgtctgagacagggaaacccacacgcagacggccaggggaccttgacctccttagcaaacaggaaacaaagtgctcttgttctcaggccggaatgaagcggctgtgcgaacacatcccaattgtacatctgatgctgactcacacagagcgtttccatttttagatttcagctacagaaggcaggaatcctttggacttggccctttatcagtggaatggacagagcagctctcggtggggtctctgttgggaatgcctgctgagacgggaccaaggacggctgcaggatgtggtgtctgtgctcagcgtcacctcctcccaggctcctgggaagcacctgagcatctcctgacaaagccaccatgagcaagaccctcagagaaggtatgaagatgagaggctggtgtgaagaggctgctgtgaagcaactatatagcatcgggcaggacataaggggaaattgttgctttcatgttcctttacccccacagtttggatttctgccacaaggatcactgtggtcttcctccctggggctcactccacctaccccacacctcccacctcccccgtcctctcttgggggacttcctgagttctcgacagagcagtttcactgtcttctctccacgcttcctggactggcccgcccatttttttctatgacccagaattccttcccaaataagagcgtcatattccttgagccccttcactagaagcaaggagatgggcaggcgttgaactgcggcttttctctagactcttccctaatccctaggttcccccaactatttagtctagagcaagcccaggaacagtgattttttttttttaacctgccatttctgttattcaagctgttttagtcagttcaggctgctgtaacaaaaatgcaatggcctgggtggttttaacaacagaaatggatttctcacagttcttgtgaggctgggacgcaggaacccccacatccaagtgccaggcagttccgtggctgggagggctccagactggtgtgtggatggcaccttctgctgtgtcctcacatggctgagagatgggtcatctctgttcttatcagggcactaatcccattcacaaggccccccatgacctaatcacctcctaaatgccccgcttcctaataccagcaccttggaaaatagggcttcaagatacaaattttgggggactcaaacattccatccatagcacccgctcatgtgctgtgatgtccagtgagcaggcggagttccagggctggtcagtgccaggtgctccttctcccacccgagaacaggggccaggttgctcctcaggcaccctgggcaactgccccttcccttccagtggggcctgacctggctaccgagcttggcagctaataggcgggcccctcagcattcacgctcctgagctgctttatcaaactaggattgttcccccaggtctaagaaaaccatccattcactgcaaagttatttattactgcggatgggctaggagttagaggaagagagtgactcaaatcacaacacctcctggacgaagctggaagggattaaaatacggcctaatttctc

SEQ ID NO: 4924 - protein, 65 aa, Homo sapiens; identical to SEQ ID NO: 4922

SEQ ID NO: 4925 - DNA, 1648 bp, Homo sapiens
gcgggcagcaggcaggacacgtggaaacgcaaccgccaggaggaaaggcgggacacagcgggaagggaggtttgcctcccctctcttcctgtggtgacccccacctcacttacaaaaatcaccaccgacgtttgggaaccgtgcacgccgactgaaagcaaagctcagctgacctgcgaggagtccccggggagctgccgcggtggtcgccgttgagtccgtccgtgccgctggggccgaggcagctggagatgtggtcaacgggctgatgggcacggctgtgggaccccatcattcccctgccccgcatgactctgctctcccagctcgactgctcacttcagacttcccttatggaaggagttgccagatagagcaagtaaaatacagtgtgccagacacaggtttatttcaacactgggaaggctccattcctacttaaacccagcagggaacagggagcggtgtgcagaggaggtggcctgcccgggaagccggccttggtgctgggactgcagggagagggctgtgaggaagagcacaggcttcatgcacattgcacagaggaggagattcatggggacagcaggcactggttaggcacagcgggaaggttatcgaagacaaaacacatttctacccaagtttaaatgacctgctatgcccacagagcttgatccagaagtgcacagtagagacggggtttcaccatgttagccaggatggtctcgatctcctgacctcgtgatctgcccgcctcagcctcccaaagtgctgggattacaggagtgagccaccgctcccggcccagaacttttaataaatataaatacacaggtaattttaacacatattcctgatgaaatcattattatctgcaatgctttcattctgctttttctcttaacaatggcataaacatttttcaaggtcaataaatgtttttcaaaatcgcatttgtattagtggctgtatagttttctatcaaatgtggaataaactcaatttatttctcccttttgttcttgaacatttaagatcattggttcatagttactaatcatgttacaacaaatattcatgtattccaaattttgctcattcctgattatttccttagatttccaggtatggaataattaggttgaagtgtttgaaatctttttttgttggtttgtttgtttttgagatgtagcttccctctgttgccccggctggagtgcactggcatgatctcagctcactcactgcaacctctgctgcctggttcaagcgattctcctgcctcagcctcctgaatagctggggttacaggtgcgcaccaccacgcccggctaatttttgtatttttagtagagacagggtttcatcatgttggccaggtgggtctcaaactcctgacctcaggtggtccttctgccttggcctcccaaagtgctgggattacaggcgtgagccactgcgcccggccgaagtgtttgaaatctttaagcatcctggtaaatattgagttttgtcaatatttagaaaagttgcatgattgacatcgcttccacccatgtttcagagcatctgatttgtcagaccctcaccaaaaatgggcttttatcaaaatgtaataaaaaataaatacaacttttccaatgac

SEQ ID NO: 4926 - protein, 57 aa, Homo sapiens; identical to SEQ ID NO: 1388

SEQ ID NO: 4927 - DNA, 1175 bp, Homo sapiens
gcaggacacgtggaaacgcaaccgccaggaggaaaggcgggacacagcgggaagggaggtttgcctcccctctcttcctgtggtgacccccacctcacttacaaaaatcaccaccgacgtttgggaaccgtgcacgccgactgaaagcaaagctcagctgacctgcgaggagtccccggggagctgccgcggtggtcgccgttgagtccgtccgtgccgctggggccgaggcagctggagatgtggtcaacgggctgatgggcacggctgtgggaccccatcattcccctgccccgcatgactctgctctcccagctcgactgctcacttcagacttcccttatggaaggagttgccagatagagcaagtaaaatacagtgtgccagacacaggtttatttcaacactgggaaggctccattcctacttaaacccagcagggaacagggagcggtgtgcagaggaggtggcctgcccgggaagccggccttggtgctgggactgcagggagagggctgtgaggaagagcacaggcttcatgcacattgcacagaggaggagattcatggggacagcaggcactggttaggcacagcgggaaggttatcgaagacaaaacacatttctacccaagtttaaatgacctgctatgcccacagagcttgatccagaagtgcacaggtaagtatttagcaggctggccgatgttgatttgaacaatctcaagaatgtgctctttagtgcattaaacatatgtgacgagagctgagcacgtttaaaatctcagtaactttggggtttgtaagtgttgtagctcatagtgtcggttaaggttagacatctcagtcacatgctgtcttggcaccagctgtggactgtgctgtgaaagagatctgtgaccttgcaccctgagatctcaggctcaattaagagacaaaacaggcaatgcagtatcagtgcagatgggaaagagaaagcagaaagtatgaagagggaaaggaggagcacaaaggagttagcattagtctctactgagcaattcctattccaaccacgtcctaaatgatgagttggatcctagcagaaagggaacacatgttatttttaactgattttaacttgatttattgtaacctatcaggagctcttaataaatatggctctttatgttgtta

SEQ ID NO: 4928 - protein, 57 aa, Homo sapiens; identical to SEQ ID NO: 1388

SEQ ID NO: 4929 - DNA, 2730 bp, Homo sapiens
cccgcgcggtgctagggttccgtctggactggcggtggtgggtcccaaccggcggtaccgggttccttcccgaccagcggtgctaggttcggttcggacgcgcgctgctggatctaaatgggcagtgctgggtccgatgggtggtgctgtgttgggtccggacgcgcggtgcagagtccggacgggcggtgctggatccaaatgggcggtgctggatctggacgggcggtgatgggtccgatgggcggtgctatgttcggttcggacgggcggtgctaggtctaaatgggcgctgctgggtccgatgggcggtgctgcgttcggtccggacgggcggggacgggcggtgctgggtccaaatgggtggtgatggatctgtggacgggcggtgctggttccagacgggcggtgctgggtccagacgggcggtgggtccgatgggcggtgctaggttcggttcggatgggtggtgctaggtctaaatgggcggcgccggatccgatgggcggtgctgggttcggtccggactggcgggtccgggtctggacgggcggtgctggatccaaatgggggtgcagtgctggatctggacgggcggtgctgggtccgaacgggcgatgggtcccatgggcggtgctaggttcggttcggactggcggtgctgggtctaaatgggcggcgctgggtccgatgggtggtactgggtccggacgggcggttctgggtctggacgggcggtgcagtatccaaatgggcgctgctgggtccggacgggcggtgctaggttcggtccggacgggtggtgctgggtctaaatgggcggtgctaggctcagcaggggaccggtgggcgtggcggcacaggtacggagcgcagggccggtggagcgccctctccgaagggccctgcgctccccgcgctcgctgctcctcctgcccgcgcattgccccggggctgctgcgtgtttcttccagggtgattcctttccgctgggtcacttcaaagccgaccttttcaagctgttttcttccgcggaggacacgttgttaggctttgtgtgcatttcaagggtcatgttttctgaaccgcgctctgccgctcttggggtgttcgagcccccacactgctgtgcggtgttcctctcacagagtgaggttggagggtcccactccctttgtgtgtctccttagaaaacgcctcttctctcagacacatcgttatctgccaattcttcgcagacgtagagaacggactgcagagttaataaacgtcgaggggaagctttgatgcgccccatttggccctgagagatgccacgtgatcgtcattttaaatcctttcctgggcttcccgatggactcgagtttttactatgtgagcatcccggtgcctgcacagcaaggactctcattgggttccacacgtgctgcgcagatccctgacgcagcgttcactgaacctcaactgcaggagcttcattcctgaggacgctgttaccaagaatgacttgcctcttgaagaatgagtttgcaaagccggcagttagattgctgatgtccaaagtaagtatgtgtagcatcactaaagagaaaattcaggattcctggaaaacagttatgggctctctgcagtgttatttttgtaataaaaaacatatagcatatgtgaaatacctactgggtgatgcaggacacatagaaggctcgaaattaatgtgaatcattctcgtttttctgactgtcattaaaagtccccatttgtattatgtatgagtggtatatcaatatctaaactacactttattgtaggtcccaaccaacattagtttattgacaaatgtttaagagcagccaaaaattcatagaatacctatgattcttaaatcatgaacactcccataactggtatatgtttaggacatgaaaatttccaggctgacaaataatttcgctgtcatcggtcaagactccaggatgatattctgagccatatgttaattttgataaccacctagaacaataaaaggtaaacatgctaccatcttctattctcattgcaccactggattctggtacatctaaaaattgtacttaaatgatatccaagaaatgctgtaaaaaacaaaatagggccgggcgcagtggctcacacctgtaatcccagcattttgggaggccaaggcgggcagatcacgaggtcaggagatcaagaccatcctggctaacacggtgaaaccccgtctctactaaaaatacaaaaaaaaaaaaaattagccgggcatggttgtgggtgcctgtagttccagctactcaggaggctgaggcaggagaatgacgtgaacccgggaggcggaggttgcagtgagctgagaccgcgccactgcactccagcctgggcgacagagcaagactctgtctcaaaataaataaataaataaaagaatgggcttttctgttattaattccattttatacatggtgagactgaaatgcaagataaaggactggactgaagctaaacaaacctgcactgggcgaggttgaaaaagacctttttaatctataagtcggtttttgaaaattcaagtttctactttataattttagttttccttttaaacgtatattattgttagttgcactgttcaaaaagttttacagcttctatttcaatcagcactggtatactaatatttttaagtatctcctatctaaaaccaaaatctacgta

SEQ ID NO: 4930 - protein, 43 aa, Homo sapiens
MPRDRHFKSFPGLPDGLEFLLCEHPGACTARTLIGFHTCCADP

SEQ ID NO: 4931 - DNA, 637 bp, Homo sapiens
atgtggaaataatttttctctccaccaactggatttcctcttttgcagacaattaaagaattctgtcatccccactgggttctgtcttttctaccgcacttgtccagtacagctacataaggaggcttctcagcagaggagcctggggtgttgaaccagtgccatgagggaatgaattattcaatagatcgctagtctcctttcttaaaattaaagtgtggtgacttgcagaaaagcatctgtgtctaaatgtcatcttcgtgttctagcactcggtttctttatgcctttcagttcctgggcttcccgatggactcgagtttttactatgtgagcatcccggtgcctgcacagcaaggactctcattgggttccacacgtgctgcgcagatccctgacgcagcgttcactgaacctcaactgcaggagcttcattcctgaggacgctgttaccaagaatgacttgcctcttgaagaatgagtttgcaaagccggcagttagattgctgatgtccaaagacatgaaaatttccaggctgacaaataatttcgctgtcatcggtcaagactccaggatgatattctgagccatatgttaattttgataaccacctagaacaataaaaggtaaacatgc

SEQ ID NO: 4932 - protein, 42 aa, Homo sapiens
MTCLLKNEFAKPAVRLLMSKDMKISRLTNNFAVIGQDSRMIF

SEQ ID NO: 4933 - DNA, 911 bp, Homo sapiens
ctggcgggtccgggtctggacgggcggtgctggatccaaatgggggtgcagtgctggatctggacgggcggtgctgggtccgaacgggcgatgggtcccatgggcggtgctaggttcggttcggactggcggtgctgggtctaaatgggcggcgctgggtccgatgggtggtactgggtccggacgggcggttctgggtctggacgggcggtgcagtatccaaatgggcgctgctgggtccggacgggcggtgctaggttcggtccggacgggtggtgctgggtctaaatgggcggtgctaggctcagcaggggaccggtgggcgtggcggcacaggtacggagcgcagggccggtggagcgccctctccgaagggccctgcgctccccgcgctcgctgctcctcctgcccgcgcattgccccggggctgctgcgtgtttcttccagggtgattcctttccgctgggtcacttcaaagccgaccttttcaagctgttttcttccgcggaggacacgttgttaggctttgtgtgcatttcaagggtcatgttttctgaaccgcgctctgccgctcttggggtgttcgagcccccacactgctgtgcggtgttcctctcacagagtgaggttggagggtcccactccctttgtgtgtctccttagaaaacgcctcttctctcagacacatcgttatctgccaattcttcgcagacgtagagaacggactgcagagttaataaacgtcgaggggaagctttgatgcgccccatttggccctgagagatgccacgtgatcgtcattttaaatcctagcgccatctctgcagtctccccacgccgggttcagtcaggcgaagttgcgttatctgtgatgtgttgtaacaaaaagcgtttatctttgaaacactaag

SEQ ID NO: 4934 - protein, 124 aa, Homo sapiens [sequence omitted]

SEQ ID NO: 4935 - DNA, 4982 bp, Homo sapiens
gcggccgcggaggcggaggcagccgcggaggcggaggcggccggcggggggtggcgaggggcgccgggcccccgcggacctgtcgtcctcggcccgtcctccggccccggccccgcgcggctgaggaggcgcggccaggaccatgtcggcgggcggccgtgacgaggagcggcggaagctggccgacatcatccaccactggaacgccaaccggctggacctgttcgagatcagccagccgaccgaggatttggagttccatggagtgatgagattttattttcaagataaagctgctggaaactttgcaacaaaatgtattcgggtctctagtactgccaccactcaagatgtaatcgaaacgctcgcggagaaatttcgacctgatatgcgaatgctgtcctctcccaagtattcactctatgaagtgcatgtcagcggagaaagaagattggatatagatgagaaacctctagttgtacaactgaattggaacaaagatgatcgggaaggcagatttgttcttaagaatgagaatgacgccattcctcctaagaaggctcaaagtaatggacctgaaaagcaggaaaaagaaggggttatccagaacttcaagagaactctctcaaagaaagaaaagaaggaaaaaaagaagagagaaaaagaggcattgcgacaggcatctgataaagatgatagacctttccaaggggaggatgttgaaaattctcgactggctgctgaggtttacaaagacatgccggaaaccagctttactcgaaccatttctaatcctgaggtggttatgaaacgacggaggcagcaaaaattggaaaagagaatgcaggaatttcggagctcagatgggcggcctgattcaggtggaacattgagaatttatgcagatagtttaaaaccaaatattccctacaagacaatcctgctgtctactacagatcctgcagactttgctgtggctgaagctttagagaagtatggtctggaaaaagaaaaccctaaggattactgcatcgcccgggttatgcttcctcctggagcccagcattctgatgaaaagggtgctaaagaaattattcttgatgatgatgagtgtcctttacaaatcttcagggaatggccaagtgacaaagggattttagtctttcagttgaagaggaggccaccagaccacatcccaaagaaaaccaagaaacacttggaaggcaagacacccaagggaaaggagagagctgacgggtctggctatggctccacccttcctccggagaagctgccctatttagtagagttaagcccagatggttctgactctagagataagccaaagctttaccgccttcagttaagtgttactgaagttgggacagaaaagttggatgacaactctatccagttgtttggcccaggaattcagccccatcactgtgaccttaccaacatggatggagtggtcactgtgacgcccagaagtatggacgcagaaacctacgtggaaggccagcgcatctcagaaaccaccatgctgcagagtggcatgaaagtgcagtttggggcgtcccatgtatttaagtttgtggaccccagtcaggatcatgctcttgcaaaaagatctgtggatggaggcctgatggttaagggcccaagacataaacctggaattgttcaggagacaacttttgatttgggaggagatattcatagtgggacagcattaccgacaagcaagagcaccactaggctggacagcgacagagtgtcgtctgcctctagcacagccgagcggggaatggtgaagccgatgatcagagtagaacagcagccagattatcgcaggcaagaaagcagaacacaggatgcttctgggcctgagctgatactacctgcaagcattgaattcagggaaagttctgaagattcatttttgtctgccattataaattatactaatagctctacagtccactttaagttgtcccctacatatgtattatatatggcatgccggtatgtattgtccaaccagtacagacctgacatcagccctacagagcgcacacataaagtcattgcagtcgtcaacaagatggtgagcatgatggagggtgtcatccagaaacagaagaatattgcaggggcacttgccttctggatggcaaatgcatctgaacttctcaacttcattaagcaagaccgagaccttagtcggatcacactggatgctcaagatgttttagcacatttggttcaaatggcatttaaatacttggttcactgtcttcaatcagaacttaataattacatgccagcctttctagatgaccctgaagagaacagtctgcaacgaccaaaaatagatgatgtgctgcacacgctcacaggagccatgtccttgctacgacgctgcagagtcaatgccgccctgaccatccagctcttctctcagctcttccacttcatcaatatgtggctgttcaatagattggtgaccgacccagattcggggctgtgctcccattactggggtgcgattatccgtcagcagttgggccatattgaagcctgggctgagaagcaggggctggaactggctgcggactgtcatctgagcaggatcgtgcaggcaacgactttgcttaccatggataagtatgcacctgatgacattccaaatataaacagcacctgctttaagttaaattcattacaacttcaagccttattacagaactatcactgtgcacctgatgagccttttatcccaacggatcttatagaaaatgtagtgactgtggctgaaaacactgccgatgagctggcccgcagtgatggaagggaagtgcagttggaggaggatcctgatctgcagctgccgtttcttttgccagaagatggttattcttgtgatgttgtcagaaacattccaaatggtttacaagaatttttagaccctctgtgccagagaggattttgcaggttaattcctcacacacgttcaccaggtacttggacaatatattttgaaggtgcagattatgaaagtcaccttctgcgtgagaacacagagctggcaacctctgaggaaagaacctgaaataatcactgtgaccctaaaaaagcagaatggaatgggccttagcattgttgcagcaaagggtgctggtcaagataaactaggaatctatgtgaagtcggttgtgaaaggaggtgctgcagatgtggatggacgtctagctgcaggtgatcagctcctcagtgtggatggacgaagtctggttggactctctcaggaaagggcggcagaactcatgacaagaacaagctctgtggtgacactggaagtagcaaagcagggtgccatctaccacggtctggccacccttctcaatcagccatcccccatgatgcagagaatttcagatcgtcgtggctcaggtaaaccccgaccaaagagtgaaggctttgagctctataataattcaactcaaaatgggtctcctgagagtcctcagctgccttgggcagaatatagtgaaccaaagaaattgcctggtgatgacagactgatgaaaaatagagctgatcaccgttccagccccaacgtagcaaatcagcctcctagtcctggagggaaaagtgcatatgcctctggaacaacagcgaagataacatctgtctctactggaaacctctgcactgaggagcagacgcctccgcctagacctgaagcctaccccatccccactcagacgtacaccagagagtattttaccttcccagcttccaaatcccaggatcggatggctcctcctcagaaccagtggccaaattatgaggaaaagccacatatgcacacagatagtaatcattccagtattgcaattcagcgtgttacacgttcccaagaagaacttcgagaagataaagcttaccaacttgagcggcatcgaatagaggcagctatggaccgaaagtctgatagtgatatgtggataaatcagagctcctcactggactccagtacctctagccaggagcatctgaaccattcctctaagtcggtcacccctgcttccacactgaccaaaagtggccctggccgttggaaaacaccagcagccataccggccacccctgtggccgtctcccagccaatccgaacagacctgcctccgccacccccgccacctccagtccactatgccggtgatttcgatggaatgtccatggatttgcctctcccaccacccccttccgccaaccagatagggctgccgtctgcgcaggtggctgctgctgaacggagaaagagagaagaacatcagcgttggtatgagaaggagaaggcccgcctggaggaggagcgggagaggaagcggagagagcaggagaggaagttgggccagatgcgcactcagtccttaaaccctgctccgttttctcccctgactgcacagcagatgaagcccgaaaagccttccacactccagcggccacaggaaacagtcattcgggagctgcagcctcagcagcagccccgcacgatcgagcgcagagacttgcagtacattacagtcagcaaagaggagctttcctcgggggacagtctgtcccccgacccgtggaagcgggacgccaaggagaagctggagaagcagcagcagatgcacatcgtggacatgctgagcaaggagatccaggagctccagagcaaaccggaccgcagcgccgaggagagcgaccggctgcgcaagctcatgctggagtggcagttccagaagagactccaggagtcgaagcagaaggacgaagatgacgaggaggaggaggacgatgatgtggacaccatgctgatcatgcagcgcctggaggctgaacgaagagcgagggtaaaggggggagtgctttggctgtgcccatctgtggtccctattttagcttctgcgtgtttcccatggggatag

SEQ ID NO: 4936 - protein, 989 aa, Homo sapiens
MSAGGRDEERRKLADIIHHWNANRLDLFEISQPTEDLEFHGVMRFYFQDKAAGNFATKCIRVSSTATTQDVIETLAEKFRPDMRMLSSPKYSLYEVHVSGERRLDIDEKPLVVQLNWNKDDREGRFVLKNENDAIPPKKAQSNGPEKQEKEGVIQNFKRTLSKKEKKEKKKREKEALRQASDKDDRPFQGEDVENSRLAAEVYKDMPETSFTRTISNPEVVMKRRRQQKLEKRMQEFRSSDGRPDSGGTLRIYADSLKPNIPYKTILLSTTDPADFAVAEALEKYGLEKENPKDYCIARVMLPPGAQHSDEKGAKEIILDDDECPLQIFREWPSDKGILVFQLKRRPPDHIPKKTKKHLEGKTPKGKERADGSGYGSTLPPEKLPYLVELSPDGSDSRDKPKLYRLQLSVTEVGTEKLDDNSIQLFGPGIQPHHCDLTNMDGVVTVTPRSMDAETYVEGQRISETTMLQSGMKVQFGASHVFKFVDPSQDHALAKRSVDGGLMVKGPRHKPGIVQETTFDLGGDIHSGTALPTSKSTTRLDSDRVSSASSTAERGMVKPMIRVEQQPDYRRQESRTQDASGPELILPASIEFRESSEDSFLSAIINYTNSSTVHFKLSPTYVLYMACRYVLSNQYRPDISPTERTHKVIAVVNKMVSMMEGVIQKQKNIAGALAFWMANASELLNFIKQDRDLSRITLDAQDVLAHLVQMAFKYLVHCLQSELNNYMPAFLDDPEENSLQRPKIDDVLHTLTGAMSLLRRCRVNAALTIQLFSQLFHFINMWLFNRLVTDPDSGLCSHYWGAIIRQQLGHIEAWAEKQGLELAADCHLSRIVQATTLLTMDKYAPDDIPNINSTCFKLNSLQLQALLQNYHCAPDEPFIPTDLIENVVTVAENTADELARSDGREVQLEEDPDLQLPFLLPEDGYSCDVVRNIPNGLQEFLDPLCQRGFCRLIPHTRSPGTWTIYFEGADYESHLLRENTELATSEERT

SEQ ID NO: 4937 - DNA, 6587 bp, Homo sapiens
agggattttagtctttcagttgaagaggaggccaccagaccacatcccaaagaaaaccaagaaacacttggaaggcaagacacccaagggaaaggagagagctgacgggtctggctatggctccacccttcctccggagaagctgccctatttagtagagttaagcccagggagaaggaatcactttgcctactacaactatcacacttacgaagatggttctgactctagagataagccaaagctttaccgccttcagttaagtgttactgaagttgggacagaaaagttggatgacaactctatccagttgtttggcccaggaattcagccccatcactgtgaccttaccaacatggatggagtggtcactgtgacgcccagaagtatggacgcagaaacctacgtggaaggccagcgcatctcagaaaccaccatgctgcagagtggcatgaaagtgcagtttggggcgtcccatgtatttaagtttgtggaccccagtcaggatcatgctcttgcaaaaagatctgtggatggaggcctgatggttaagggcccaagacataaacctggaattgttcaggagacaacttttgatttgggaggagatattcatagtgggacagcattaccgacaagcaagagcaccactaggctggacagcgacagagtgtcgtctgcctctagcacagccgagcggggaatggtgaagccgatgatcagagtagaacagcagccagattatcgcaggcaagaaagcagaacacaggatgcttctgggcctgagctgatactacctgcaagcattgaattcagggaaagttctgaagattcatttttgtctgccattataaattatactaatagctctacagtccactttaagttgtcccctacatatgtattatatatggcatgccggtatgtattgtccaaccagtacagacctgacatcagccctacagagcgcacacataaagtcattgcagtcgtcaacaagatggtgagcatgatggagggtgtcatccagaaacagaagaatattgcaggggcacttgccttctggatggcaaatgcatctgaacttctcaacttcattaagcaagaccgagaccttagtcggatcacactggatgctcaagatgttttagcacatttggttcaaatggcatttaaatacttggttcactgtcttcaatcagaacttaataattacatgccagcctttctagatgaccctgaagagaacagtctgcaacgaccaaaaatagatgatgtgctgcacacgctcacaggagccatgtccttgctacgacgctgcagagtcaatgccgccctgaccatccagctcttctctcagctcttccacttcatcaatatgtggctgttcaatagattggtgaccgacccagattcggggctgtgctcccattactggggtgcgattatccgtcagcagttgggccatattgaagcctgggctgagaagcaggggctggaactggctgcggactgtcatctgagcaggatcgtgcaggcaacgactttgcttaccatggataagtatgcacctgatgacattccaaatataaacagcacctgctttaagttaaattcattacaacttcaagccttattacagaactatcactgtgcacctgatgagccttttatcccaacggatcttatagaaaatgtagtgactgtggctgaaaacactgccgatgagctggcccgcagtgatggaagggaagtgcagttggaggaggatcctgatctgcagctgccgtttcttttgccagaagatggttattcttgtgatgttgtcagaaacattccaaatggtttacaagaatttttagaccctctgtgccagagaggattttgcaggttaattcctcacacacgttcaccaggtacttggacaatatattttgaaggtgcagattatgaaagtcaccttctgcgtgagaacacagagctggcaacctctgaggaaagaacctgaaataatcactgtgaccctaaaaaagcagaatggaatgggccttagcattgttgcagcaaagggtgctggtcaagataaactaggaatctatgtgaagtcggttgtgaaaggaggtgctgcagatgtggatggacgtctagctgcaggtgatcagctcctcagtgtggatggacgaagtctggttggactctctcaggaaagggcggcagaactcatgacaagaacaagctctgtggtgacactggaagtagcaaagcagggtgccatctaccacggtctggccacccttctcaatcagccatcccccatgatgcagagaatttcagatcgtcgtggctcaggtaaaccccgaccaaagagtgaaggctttgagctctataataattcaactcaaaatgggtctcctgagagtcctcagctgccttgggcagaatatagtgaaccaaagaaattgcctggtgatgacagactgatgaaaaatagagctgatcaccgttccagccccaacgtagcaaatcagcctcctagtcctggagggaaaagtgcatatgcctctggaacaacagcgaagataacatctgtctctactggaaacctctgcactgaggagcagacgcctccgcctagacctgaagcctaccccatccccactcagacgtacaccagagagtattttaccttcccagcttccaaatcccaggatcggatggctcctcctcagaaccagtggccaaattatgaggaaaagccacatatgcacacagatagtaatcattccagtattgcaattcagcgtgttacacgttcccaagaagaacttcgagaagataaagcttaccaacttgagcggcatcgaatagaggcagctatggaccgaaagtctgatagtgatatgtggataaatcagagctcctcactggactccagtacctctagccaggagcatctgaaccattcctctaagtcggtcacccctgcttccacactgaccaaaagtggccctggccgttggaaaacaccagcagccataccggccacccctgtggccgtctcccagccaatccgaacagacctgcctccgccacccccgccacctccagtccactatgccggtgatttcgatggaatgtccatggatttgcctctcccaccacccccttccgccaaccagatagggctgccgtctgcgcaggtggctgctgctgaacggagaaagagagaagaacatcagcgttggtatgagaaggagaaggcccgcctggaggaggagcgggagaggaagcggagagagcaggagaggaagttgggccagatgcgcactcagtccttaaaccctgctccgttttctcccctgactgcacagcagatgaagcccgaaaagccttccacactccagcggccacaggaaacagtcattcgggagctgcagcctcagcagcagccccgcacgatcgagcgcagagacttgcagtacattacagtcagcaaagaggagctttcctcgggggacagtctgtcccccgacccgtggaagcgggacgccaaggagaagctggagaagcagcagcagatgcacatcgtggacatgctgagcaaggagatccaggagctccagagcaaaccggaccgcagcgccgaggagagcgaccggctgcgcaagctcatgctggagtggcagttccagaagagactccaggagtcgaagcagaaggacgaagatgacgaggaggaggaggacgatgatgtggacaccatgctgatcatgcagcgcctggaggctgaacgaagagcgaggactgctatgccagcaatctctgttctagatttgttgcaggacgaggagcggaggcggcagcagcagttagaagagatgcgcaagcgggaagcggaagaccgagcgaggcaagaggaagagcgccggcggcaggaggaggagcgaacaaaacgagacgctgaagaaaagaggcgacaggaagaagggtattacagccgcctggaagccgagaggcgcagacagcacgacgaggcggcgcgcaggttgctggagcccgaggcgcccggtctgtgccgccctccgcttccccgggactacgagcccccgtccccgtcccccgcgcccggcgcccctcctcccccgcctcagcgaaacgcctcctacctcaaaacacaggtcctctcccccgactcgctgttcactgccaagtttgttgcatacaatgaggaggaggaggaggaggactgcagcctagcaggaccaaactcttacccaggatctactggagcagctgttggagcccatgacgcctgtcgggatgcaaaagagaagcgctctaaaagccaagatgcagattcacctggaagttctggggcccctgaaaacttgacattcaaggaacgccagcgtcttttttcacaaggtcaagatgtatccaataaagtgaaagcttctcgtaaattaacagaactggagaatgaactgaacacaaagtgaaagaaaatgaggagaacactttgtatttaccccaaaatcttttcagttgtgggtttgtaggtgcgagtttgaagaggaaaagaggaagggggttatatttctaagtgatttacaatttctgtttctaaaattgttgggatttagaaatgtttcaattccaagaaattttattttactttaccatgagattgccatttatgtaatttaaacactgtctagtttcttaattatctaactcacacgagggtaagttttttgttggtttcttttttggagtcctgagttcaaaggggacagaactaagggcaggagaagagaatggatgtgtcttctctcccatcttcccctcatcatcgaccgaggagcacaaagaagttctgtttctgtttttttcagaaactttattttagctgtcaagcagagaatagcttgaactattcagactattgttggcactgtttagtagtgaccacacgctcttctacccgggaaggaacatatgacgacatgctcctcccatgtcccctgatggtgtctgttcccacaatatccttctagtctgcatcgtgaagtggcttaggccaaagcttcctgtgtgatgacgcacgtccgagactgttccatctcattcctcgcaaatttgagctcttctgatcaattctaaatatttgattaattttaattctgaaagaaaattttgaggatttaagcttaggggattttatttttataaataccagattattgttagacttaataaatcactgttaaatttaaagatgacagttaccttggaaagttcactaatacttcgctccaaggcgtctgtaaaagaagatatctttattggagcaatgttcatgtgactgggaatgacagaagaatgggagatgagtagggacccctcaagcacagctgtcactcagaaattttaaatttgaaaaagaaatcgattttcatctgtatgccgtcaaggaaggaattcagttacagggcatctgtaacttaaatattgtaagaataactcatatggaagttcaagctatttttatactataatagagttatttaattttaatttgttgaattattagttaccactgtcatttcttcagctatggatatgtggctgatgttggggagacggacctcagtgtgttttatattgtctggtgttaagatgataaattactttgtgattacaagcaaattttctatttgacaaagcccttggtggagtccaaatgatttttctgtaccatattgttctcttacacatacgtatgttaggaaaataggcacactttcaaagagaatgttctcttacacatacgtatgttaggaaaatagacacattttcaaagagaatgttctcttacatatgttaggaaaataggcacactttcaaagagaggtataggggctttttactgccttcgaaatcacttttaataaaagttgtatgataaatcattaaaaatgcgagtgtaaatatttttttttacctctatcagggtttttatttgaaagtgtgctcttaccatttccttgtttgagtaagagagtgaatggttctgagtgtttaggaaggatttgcttgcttgcagcagaagttctaggaaaagcaggcacctcccaaatatcttgaggacactggcagccttatggtgactaaatccacactttctttaaagagatgcagatgaattacttttctgttaatatatagaaaaatacacaggagaacatgcagatacatgtaaatatctacatacagggatatttgtatgtgtggttgtgaaacccatacacaagtggatttggccatctttgggcagtgaggtcaaatgtgaatatgtgtaaaagtgcttttcagaactgcattactatgagaaaacatcaaaactgctgtagttttccatttctactgtatttcagttgcaacctatttttaataaactttgtatgtatttaagtgtatttgctattgttttgaaagtgctgacaaagtttatatttgtaacatcagccttcctcgcccatctctttccatctgtctcttcttcattaaacacttactgagtatga

SEQ ID NO: 4938 - protein, 849 aa, Homo sapiens
MKVTFCVRTQSWQPLRKEPEIITVTLKKQNGMGLSIVAAKGAGQDKLGIYVKSVVKGGAADVDGRLAAGDQLLSVDGRSLVGLSQERAAELMTRTSSVVTLEVAKQGAIYHGLATLLNQPSPMMQRISDRRGSGKPRPKSEGFELYNNSTQNGSPESPQLPWAEYSEPKKLPGDDRLMKNRADHRSSPNVANQPPSPGGKSAYASGTTAKITSVSTGNLCTEEQTPPPRPEAYPIPTQTYTREYFTFPASKSQDRMAPPQNQWPNYEEKPHMHTDSNHSSIAIQRVTRSQEELREDKAYQLERHRIEAAMDRKSDSDMWINQSSSLDSSTSSQEHLNHSSKSVTPASTLTKSGPGRWKTPAAIPATPVAVSQPIRTDLPPPPPPPPVHYAGDFDGMSMDLPLPPPPSANQIGLPSAQVAAAERRKREEHQRWYEKEKARLEEERERKRREQERKLGQMRTQSLNPAPFSPLTAQQMKPEKPSTLQRPQETVIRELQPQQQPRTIERRDLQYITVSKEELSSGDSLSPDPWKRDAKEKLEKQQQMHIVDMLSKEIQELQSKPDRSAEESDRLRKLMLEWQFQKRLQESKQKDEDDEEEEDDDVDTMLIMQRLEAERRARTAMPAISVLDLLQDEERRRQQQLEEMRKREAEDRARQEEERRRQEEERTKRDAEEKRRQEEGYYSRLEAERRRQHDEAARRLLEPEAPGLCRPPLPRDYEPPSPSPAPGAPPPPPQRNASYLKTQVLSPDSLFTAKFVAYNEEEEEEDCSLAGPNSYPGSTGAAVGAHDACRDAKEKRSKSQDADSPGSSGAPENLTFKERQRLFSQGQDVSNKVKASRKLTELENELNTK

SEQ ID NO: 4939 - DNA, 6080 bp, Homo sapiens
gcaactgagacatgcagtactaaaaccctttttgactgtgcaacctttatcggcatttcataatttctgcttaatgcacttcagtgtggatatgaaatgacaaaagttctgtttcttctctttattatttatccttggttcctattctttggatctcatctgaggttgcctggcctgcacatgtggtcgggagaggatgtgatagatcagtacttgatactgagttgcatggtgtccaagccagtgactacaagtatcagggtggctgtgggtaaccatggatacatgtatgtatactgcacagactaccagataatgcacggtctacaatttggtgttatattatttgatatctccatttctccgctgattccatctataaattgtagctaactgaatccatatgtctatgtgcatgaatcctaagaaatagttgcagtggttatttacttcccattgctatgtatgcacccaaattattttgcaaatatctggtatctgtggtaaataccttggtgaaatgggaaggtactggtctatcttcagcagcttttcaagagcattcctttatatttttattacttttgtttattctctgttgcttatggaagtgtgttctgtctacagaaacagaagaatattgcaggggcacttgccttctggatggcaaatgcatctgaacttctcaacttcattaagcaagaccgagaccttagtcggatcacactggatgctcaagatgttttagcacatttggttcaaatggcatttaaatacttggttcactgtcttcaatcagaacttaataattacatgccagcctttctagatgaccctgaagagaacagtctgcaacgaccaaaaatagatgatgtgctgcacacgctcacaggagccatgtccttgctacgacgctgcagagtcaatgccgccctgaccatccagctcttctctcagctcttccacttcatcaatatgtggctgttcaatagattggtgaccgacccagattcggggctgtgctcccattactggggtgcgattatccgtcagcagttgggccatattgaagcctgggctgagaagcaggggctggaactggctgcggactgtcatctgagcaggatcgtgcaggcaacgactttgcttaccatggataagtatgcacctgatgacattccaaatataaacagcacctgctttaagttaaattcattacaacttcaagccttattacagaactatcactgtgcacctgatgagccttttatcccaacggatcttatagaaaatgtagtgactgtggctgaaaacactgccgatgagctggcccgcagtgatggaagggaagtgcagttggaggaggatcctgatctgcagctgccgtttcttttgccagaagatggttattcttgtgatgttgtcagaaacattccaaatggtttacaagaatttttagaccctctgtgccagagaggattttgcaggttaattcctcacacacgttcaccaggtacttggacaatatattttgaaggtgcagattatgaaagtcaccttctgcgtgagaacacagagctggcaacctctgaggaaagaacctgaaataatcactgtgaccctaaaaaagcagaatggaatgggccttagcattgttgcagcaaagggtgctggtcaagataaactaggaatctatgtgaagtcggttgtgaaaggaggtgctgcagatgtggatggacgtctagctgcaggtgatcagctcctcagtgtggatggacgaagtctggttggactctctcaggaaagggcggcagaactcatgacaagaacaagctctgtggtgacactggaagtagcaaagcagggtgccatctaccacggtctggccacccttctcaatcagccatcccccatgatgcagagaatttcagatcgtcgtggctcaggtaaaccccgaccaaagagtgaaggctttgagctctataataattcaactcaaaatgggtctcctgagagtcctcagctgccttgggcagaatatagtgaaccaaagaaattgcctggtgatgacagactgatgaaaaatagagctgatcaccgttccagccccaacgtagcaaatcagcctcctagtcctggagggaaaagtgcatatgcctctggaacaacagcgaagataacatctgtctctactggaaacctctgcactgaggagcagacgcctccgcctagacctgaagcctaccccatccccactcagacgtacaccagagagtattttaccttcccagcttccaaatcccaggatcggatggctcctcctcagaaccagtggccaaattatgaggaaaagccacatatgcacacagatagtaatcattccagtattgcaattcagcgtgttacacgttcccaagaagaacttcgagaagataaagcttaccaacttgagcggcatcgaatagaggcagctatggaccgaaagtctgatagtgatatgtggataaatcagagctcctcactggactccagtacctctagccaggagcatctgaaccattcctctaagtcggtcacccctgcttccacactgaccaaaagtggccctggccgttggaaaacaccagcagccataccggccacccctgtggccgtctcccagccaatccgaacagacctgcctccgccacccccgccacctccagtccactatgccggtgatttcgatggaatgtccatggatttgcctctcccaccacccccttccgccaaccagatagggctgccgtctgcgcaggtggctgctgctgaacggagaaagagagaagaacatcagcgttggtatgagaaggagaaggcccgcctggaggaggagcgggagaggaagcggagagagcaggagaggaagttgggccagatgcgcactcagtccttaaaccctgctccgttttctcccctgactgcacagcagatgaagcccgaaaagccttccacactccagcggccacaggaaacagtcattcgggagctgcagcctcagcagcagccccgcacgatcgagcgcagagacttgcagtacattacagtcagcaaagaggagctttcctcgggggacagtctgtcccccgacccgtggaagcgggacgccaaggagaagctggagaagcagcagcagatgcacatcgtggacatgctgagcaaggagatccaggagctccagagcaaaccggaccgcagcgccgaggagagcgaccggctgcgcaagctcatgctggagtggcagttccagaagagactccaggagtcgaagcagaaggacgaagatgacgaggaggaggaggacgatgatgtggacaccatgctgatcatgcagcgcctggaggctgaacgaagagcgaggttgcaggacgaggagcggaggcggcagcagcagttagaagagatgcgcaagcgggaagcggaagaccgagcgaggcaagaggaagagcgccggcggcaggaggaggagcgaacaaaacgagacgctgaagaaaaggttatggtcctttaagggcagctagaattttaccaagttagcctgaacgtaatcgattggctggggcagagcgggctggaagttctgtgtttcttaagaagcacgaggcagagcagggcctggctcccccagctttgtgattggacctgcaactttaccccatctggcccacctacctctcttctggactgtctccagatccccttatctgccaagttttgtctccttcaaacttctgaactcttgggcgtgtgtagcagtgagcctctttgcaaagggttcgtttcctcgggcactcatctttactgaacatggcccagcttgtcattgtgaaggtgacattggttcagtgattgcttaaatggcatgtggaccgtgggaagcagtaggagcgtagtaagacagttggctgccattcaacatttcaaatagatggtttactcaaatcactcacttctggttgatggtaaagagagcagatggcttagaaaacatgatacaggaaaatttagtatgtaatccagtaaatatcctaagttatttattttcatgtgtgtgtgtgtgtttaaatcaagtaacccttttaattgaattttaaaatgacagcgaattttgacattctgagaaatggggattttgagatgtttctctccatatctccctttgtcctgtgtgtgtggccgacgccctctggatgaagaggctgtagccgttgagctccctgtgggggcctgtttcatcccgaggggactgcgtgttgctctgtgtggtttgagagaagctgctcttctctgttacttcccttctatgaaggtagaagctttcagtgttacaacttctgatggcggaaaatttagtttttattaataattccttcttggatagtctagtgaactatattaatagaacagtgtactgttcacagaaaagaacttgtagggagttttttgtagtgatatgctctattaggatacagaacaatctaagagtaagcttgatagacatgatgtgacttcacttaaatggagtagagtgaataatgtaaggacactcacctctgttgaaattggtgatttctgcattttgtagacctttgccctctaagtttatcatcatattatctgttgaatctgaacagcatttgaagtcctctcaaagagtttgagctttcaggattaggttcccctgtgagtctttcacttgtgtaatggtaagtcaacattgatgatctttctaaggaaatcagatttacaaaatgctgagccgcttgatgtctaagtgttggtggtttttgctgttgctttgctgttccatgaaagcgctccctggctgcttggagggctgtgcttttccaggtcagtgccagcttggctgtcccaggccgtgcacagtgcccattgctatagctgggcccagtcctggccacgccggagcctcggcgggggcagctgggttgtcacggcagcacagtgcacatgcagagaggaccaggccatgtttttcctgtgctgagaaactcttgggttatttaatttttccaatgtgttttcataactcatgattatttgaaatacacttgtgttagtaactgcttctataattaagtggtcactgtaaaaaggcgaataacctatttttatatcagaatgtccaaaactcatgggtttgctttgttatagaaaaatgtgccattcatttgttgggtagaataaagttgtcttgtaattgtatctgctcttggtataactaaaagaggatattttgatttcttcctaaaatgttaccaagcaactgttcttcatgttaatactaagattcttgatagttccatttaaaagccacaagaagtcattctggtttattcctcactccaagggaacacttactttgtgtagacaagaagatgagagtctttccttcaggatttctaaacacagagcaagaagattcaatgaaaaattgggctcagggcagtaattggggctggcatttattcttaagagttttctccctcaaaaggtgaaggagtgacattgcgtattcactctgtgtgtgtgtgtgtgtgtgtgtgtgtgtgtgtgtgtgtgtgtgtgtagctctagagggagtagggagaaaatacaggatgaaattgaaaacagggactaacaacttttcactgaatgccagcaagctctctaaaattagttttctttggttgaacaaatttacaattcattgtacttcatttcacagcattaaacatttactcgaggcagtttattctgtttgctctttcatcccccttcttatttacttttttcttgtgctctaaaacttttgtcaatctttaacaaaactgtgctgttaccttttttaatgttaaaagaattttaacactgtcaactgtagtttgtgcagatgtatgtcagaaaaaaatgtacagtatgtgtcaaaatatatttgaatatcttgttgctgttgctgttagttcctggctctctaattttctgtctgttagggagtttcttaagatttgaaatacaagttaagaactatggaaagc

SEQ ID NO: 4940 - protein, 667 aa, Homo sapiens
MKVTFCVRTQSWQPLRKEPEIITVTLKKQNGMGLSIVAAKGAGQDKLGIYVKSVVKGGAADVDGRLAAGDQLLSVDGRSLVGLSQERAAELMTRTSSVVTLEVAKQGAIYHGLATLLNQPSPMMQRISDRRGSGKPRPKSEGFELYNNSTQNGSPESPQLPWAEYSEPKKLPGDDRLMKNRADHRSSPNVANQPPSPGGKSAYASGTTAKITSVSTGNLCTEEQTPPPRPEAYPIPTQTYTREYFTFPASKSQDRMAPPQNQWPNYEEKPHMHTDSNHSSIAIQRVTRSQEELREDKAYQLERHRIEAAMDRKSDSDMWINQSSSLDSSTSSQEHLNHSSKSVTPASTLTKSGPGRWKTPAAIPATPVAVSQPIRTDLPPPPPPPPVHYAGDFDGMSMDLPLPPPPSANQIGLPSAQVAAAERRKREEHQRWYEKEKARLEEERERKRREQERKLGQMRTQSLNPAPFSPLTAQQMKPEKPSTLQRPQETVIRELQPQQQPRTIERRDLQYITVSKEELSSGDSLSPDPWKRDAKEKLEKQQQMHIVDMLSKEIQELQSKPDRSAEESDRLRKLMLEWQFQKRLQESKQKDEDDEEEEDDDVDTMLIMQRLEAERRARLQDEERRRQQQLEEMRKREAEDRARQEEERRRQEEERTKRDAEEKVMVL

SEQ ID NO: 4941 - DNA, 5752 bp, Homo sapiens
aagtggcttcagagatgcagccctcactgcttaacgtcctagttattgtccttgaaacccgagccatctcaccgctcgcccccaaccctgggctctggctgtttaaaagctggagaggaagtgaaagcgtcaagtacatcccgttaggtgcaaagcaagtctcgttgatcgccattgctagttttgcacacgtttgcgaatcagagctgcccggggtacaccgaccgcgcagggaaacatcgagagtgtaaataaatacatcgcctcttgttcggatttttgctactaccgaaaatatgtaaattgtgaactctgttggctctctttggatccaggttgatagaagtccagatcctgaggaaatctccagctaaatgctcaaaatataaaatactgagctgagatttgcgaagagcagcagcatggatggattttatgaccagcaagtgccttacatggtcaccaatagtcagcgtgggagaaattgtaacgagaaaccaacaaatgtcaggaaaagaaaattcattaacagagatctggctcatgattcagaagaactctttcaagatctaagtcaattacaggaaacatggcttgcagaagctcaggtacctgacaatgatgagcagtttgtaccagactatcaggctgaaagtttggcttttcatggcctgccactgaaaatcaagaaagaaccccacagtccatgttcagaaatcagctctgcctgcagtcaagaacagccctttaaattcagctatggagaaaagtgcctgtacaatgtcagtgcctatgatcagaagccacaagtgggaatgaggccctccaacccccccacaccatccagcacgccagtgtccccactgcatcatgcatctccaaactcaactcatacaccgaaacctgaccgggccttcccagctcacctccctccatcgcagtccataccagatagcagctaccccatggaccacagatttcgccgccagctttctgaaccctgtaactcctttcctcctttgccgacgatgccaagggaaggacgtcctatgtaccaacgccagatgtctgagccaaacatccccttcccaccacaaggctttaagcaggagtaccacgacccagtgtatgaacacaacaccatggttggcagtgcggccagccaaagctttccccctcctctgatgattaaacaggaacccagagattttgcatatgactcagaagtgcctagctgccactccatttatatgaggcaagaaggcttcctggctcatcccagcagaacagaagctgtatgtttgaaaagggccccaggcagttttatgatgacacctgtgttgtcccagaaaaattcgatggtttttcaaatgttgccctttctgtaattattttaagaggtatatgtctctctactgaccataggagacatcaaacaagagccaggaatgtatcgggaaggacccacataccaacggcgaggatcacttcagctctggcagtttttggtagctcttctggatgacccttcaaattctcattttattgcctggactggtcgaggcatggaatttaaactgattgagcctgaagaggtggcccgacgttggggcattcagaaaaacaggccagctatgaactatgataaacttagccgttcactccgctattactatgagaaaggaattatgcaaaaggtggctggagagagatatgtctacaagtttgtgtgtgatccagaagcccttttctccatggcctttccagataatcagcgtccactgctgaagacagacatggaacgtcacatcaacgaggaggacacagtgcctctttctcactttgatgagagcatggcctacatgccggaagggggctgctgcaacccccacccctacaacgaaggctacgtgtattaacacaagtgacagtcaagcagggcgtttttgcgcttttccttttttctgcaagatacagagaattgctgaatctttgttttatttctgttgtttgtattttatttttaaataataatacacaaaaaggggcttttcctgttgcattattctatggtctgccatggactgtgcactttatttgagggtgggtgggagtaatctaaacatttattctgtgtaacaggaagctaatgggtgaatgggcagagggatttggggattactttttacttaggcttgggatggggtcctacaagttttgagtatgatgaaactatatcatgtctgtttgatttcataacaacataagataatgtttattttatcggggtatctatggtacagttaatttcacgttgtgtaaatatccacttggagactatttgccttgggcattttcccctgtcatttatgagtctctgcaggtgtacaaaaaaaccccaatctactgtaaatggcagtttaattgttagaaatgactgtttttgcaccacttgtaaaaaggtatttagcgattgcatttgctgtttgttgttttattttgctttatatatgacttgcagaggataaccataaaatgggtaattctctctgaagttgaataatcaccatgactgtaaatgaggggcacaattttggactctggcgccaaactgagtcataggccagtagcattacgtgtatctggtgccaccttgctgtttagatacaaatcataccgtcttttaaatattttgaagcccatttcagttaaataatgacatgtcatggtcctttggaatcttcatttaaatgttaaatctggaatcaaaatgaagcaaaaaatatctgtctccttttcactttcttcagtacataaatacattatttaatcaataagaattaactgtactaaatcatgtattatgctgttctagttacagcaaacactctttaagaaaaatatccaatacactaaataggtactatagtaatttttagacatggtacccattgatatgcatttaaaccttttactgctgtgttatgttgataacatatataaatattagataatgctaatgcttctgctgctgtcttttctgtaatattctctttcatgctgaatttactatgaccatttataagcagtgcagttaactacagatagcatttcaggacaaaatagatgactcaaaccatttattgcttaaaaaatagcttacgccatgctatgctataagcagcttttatgcacattgacaaatgaagagtaagcttcagcttgctaaaggaaactgtggaaccttttgtaacttttggtgatatggaaaattatttacaaaccgtcaaagaatatgaggaagttgctgtatgacatagtgctggcactgatattatccatcatctctttttggacacttctgtaaatgtgattggattgtttgaaagaagatttaaagtttcaaagttttttgttctgtttttgctttgcatttggagaaaatattgaaagcagggtatgttgtttcattcaccttgaaaaaaccatgagtaaatggggatatagaatctctgaatagctcgctaaaagattcaagcaagggacatgaattttgttccatctatcaataatatccagaagaacaacttttttaaagagtctatagcaaaaagcaaaaaaaaaaaaaaattctaaacacaaagtcaaaataaacctattgtaaaagcatttcgtgatgagcatgaaaaagattgtttaaagatgatccccccagctacccattttccaaaactacacagatcacagctcatttctctaagtggagcagttatcaagaaacccaaacaccaaaattgctactcttcacatttaatcctacaaaaagtactccaatttcaaaatatgtatgtaacctgcgatttcaatgattgttgttcatatacatcatgtattattttggcccattttgggcctaaaaaagaaaactatgccttaaaaatcagaaccttttctccccactatgcttatgtggccatctacagcacttagaataaaaacagatgttaaaatattcagtgaaagttttattggaaaaaggaattgagatatataattgagatttggtgaaattgaaggagaaaatttaagtgagtctttaaaatatattctgaatgaaaactgtattgaggattcatttttgttccttttttttctttttctcttttctcctttttcttctttttaatagtctagttttagtcagtcagtgaggaagaattgggccatgctaacgttatcacaagagaacaatggcagaaatggtattagttatataatatttaaggacaaactatatgttttgctgttttaacgtagtgactcactgaactaaatacataattgaccaacattaagtgtatttccaatacagaagggttgaaaatattacattataaactcttttgaaaaatgtatctaaaattttttaagttctgttttgattccactttttggttgagtttttatgtttttgttttcaggtagattaataaatctggcagctgatttctgcaagattcttgtgttttgaatttctcattgaattggctactcaaacatagaaatcatttgttaatgatgtaatgtcttctctcagcttttatcttcactgctgtttgctgtctcttgatgatgacatgttaatacccaatagattaattgcaacaaacacttatactcaaataactaagtaaaaataatttttcttgttatgtccatgaaaagtgcttcagaataaaaatccacaagactgacagtgcagaacatttttctcaaatcatgggcggatcttggaggtctagtttcccgtagatgctgtaaccaattaccacaacttcagtaatttacacaaatttatcttatagttctggaggcagaagttcaaaagaagccttaagagactaaaaccaagatgtccttaggtctggttccttctggaggctccaggggagattcttccagctttcacttctagagtctgctgacattccttggctcctggctacatcacttcaatctctgcttccatggtcacatactcttctactatagtcaaatttccttcctgcctcttataaggatgcttgtgattacatttaggggatgctcagataatccaggacaatctctccatctcaagatccttaacttaatgacgtgtgccaagtccctttggctagataattattcataggtcccagggattaggacatggatgtaaggggtgagggcagggctgttattcagaacaccgcacggaggaggaagactgtgtagcaaagactctaattgatttactcaggaacagtggagttctgctgagggatctaggatttgaaagtactagagtttgcttttatttaccactgagatattttccccttattctgcataaataattttgaaaactttctatattaaatttcaactattccactaaaatgtctggtaatcacatcaagcctttagattattcaaatccttccccagcccccaggaaaacactaagtcatgaaacagaaaaacagaaggtatgataataatagtaataacagttaaatcagtggtctaatccagattttattttttaatacatttcttttggtgttaatatgggttactatgtgatcttatcatttgctagtgattattacttattaggtaagaacaatgtgtaaaatatgtctattactcaaaagaacaattgcaaaatgagtcaacttatctttatataaccaggaaagaaatatat

SEQ ID NO: 4942 - protein, 321 aa, Homo sapiens
MDGFYDQQVPYMVTNSQRGRNCNEKPTNVRKRKFINRDLAHDSEELFQDLSQLQETWLAEAQVPDNDEQFVPDYQAESLAFHGLPLKIKKEPHSPCSEISSACSQEQPFKFSYGEKCLYNVSAYDQKPQVGMRPSNPPTPSSTPVSPLHHASPNSTHTPKPDRAFPAHLPPSQSIPDSSYPMDHRFRRQLSEPCNSFPPLPTMPREGRPMYQRQMSEPNIPFPPQGFKQEYHDPVYEHNTMVGSAASQSFPPPLMIKQEPRDFAYDSEVPSCHSIYMRQEGFLAHPSRTEAVCLKRAPGSFMMTPVLSQKNSMVFQMLPFL

SEQ ID NO: 4943 - DNA, 5688 bp, Homo sapiens
aagtggcttcagagatgcagccctcactgcttaacgtcctagttattgtccttgaaacccgagccatctcaccgctcgcccccaaccctgggctctggctgtttaaaagctggagaggaagtgaaagcgtcaagtacatcccgttaggtgcaaagcaagtctcgttgatcgccattgctagttttgcacacgtttgcgaatcagagctgcccggggtacaccgaccgcgcagggaaacatcgagagtgtaaataaatacatcgcctcttgttcggatttttgctactaccgaaaatatgtaaattgtgaactctgttggctctctttggatccaggttgatagaagtccagatcctgaggaaatctccagctaaatgctcaaaatataaaatactgagctgagatttgcgaagagcagcagcatggatggattttatgaccagcaagtgccttacatggtcaccaatagtcagcgtgggagaaattgtaacgagaaaccaacaaatgtcaggaaaagaaaattcattaacagagatctggctcatgattcagaagaactctttcaagatctaagtcaattacaggaaacatggcttgcagaagctcaggtacctgacaatgatgagcagtttgtaccagactatcaggctgaaagtttggcttttcatggcctgccactgaaaatcaagaaagaaccccacagtccatgttcagaaatcagctctgcctgcagtcaagaacagccctttaaattcagctatggagaaaagtgcctgtacaatgtcagtgcctatgatcagaagccacaagtgggaatgaggccctccaacccccccacaccatccagcacgccagtgtccccactgcatcatgcatctccaaactcaactcatacaccgaaacctgaccgggccttcccagctcacctccctccatcgcagtccataccagatagcagctaccccatggaccacagatttcgccgccagctttctgaaccctgtaactcctttcctcctttgccgacgatgccaagggaaggacgtcctatgtaccaacgccagatgtctgagccaaacatccccttcccaccacaaggctttaagcaggagtaccacgacccagtgtatgaacacaacaccatggttggcagtgcggccagccaaagctttccccctcctctgatgattaaacaggaacccagagattttgcatatgactcagaagtgcctagctgccactccatttatatgaggcaagaaggcttcctggctcatcccagcagaacagaagctgtatgtttgaaaagggccccaggcagttttatgatgacacctgtgttgtcccagaaaaattcgatggagacatcaaacaagagccaggaatgtatcgggaaggacccacataccaacggcgaggatcacttcagctctggcagtttttggtagctcttctggatgacccttcaaattctcattttattgcctggactggtcgaggcatggaatttaaactgattgagcctgaagaggtggcccgacgttggggcattcagaaaaacaggccagctatgaactatgataaacttagccgttcactccgctattactatgagaaaggaattatgcaaaaggtggctggagagagatatgtctacaagtttgtgtgtgatccagaagcccttttctccatggcctttccagataatcagcgtccactgctgaagacagacatggaacgtcacatcaacgaggaggacacagtgcctctttctcactttgatgagagcatggcctacatgccggaagggggctgctgcaacccccacccctacaacgaaggctacgtgtattaacacaagtgacagtcaagcagggcgtttttgcgcttttccttttttctgcaagatacagagaattgctgaatctttgttttatttctgttgtttgtattttatttttaaataataatacacaaaaaggggcttttcctgttgcattattctatggtctgccatggactgtgcactttatttgagggtgggtgggagtaatctaaacatttattctgtgtaacaggaagctaatgggtgaatgggcagagggatttggggattactttttacttaggcttgggatggggtcctacaagttttgagtatgatgaaactatatcatgtctgtttgatttcataacaacataagataatgtttattttatcggggtatctatggtacagttaatttcacgttgtgtaaatatccacttggagactatttgccttgggcattttcccctgtcatttatgagtctctgcaggtgtacaaaaaaaccccaatctactgtaaatggcagtttaattgttagaaatgactgtttttgcaccacttgtaaaaaggtatttagcgattgcatttgctgtttgttgttttattttgctttatatatgacttgcagaggataaccataaaatgggtaattctctctgaagttgaataatcaccatgactgtaaatgaggggcacaattttggactctggcgccaaactgagtcataggccagtagcattacgtgtatctggtgccaccttgctgtttagatacaaatcataccgtcttttaaatattttgaagcccatttcagttaaataatgacatgtcatggtcctttggaatcttcatttaaatgttaaatctggaatcaaaatgaagcaaaaaatatctgtctccttttcactttcttcagtacataaatacattatttaatcaataagaattaactgtactaaatcatgtattatgctgttctagttacagcaaacactctttaagaaaaatatccaatacactaaataggtactatagtaatttttagacatggtacccattgatatgcatttaaaccttttactgctgtgttatgttgataacatatataaatattagataatgctaatgcttctgctgctgtcttttctgtaatattctctttcatgctgaatttactatgaccatttataagcagtgcagttaactacagatagcatttcaggacaaaatagatgactcaaaccatttattgcttaaaaaatagcttacgccatgctatgctataagcagcttttatgcacattgacaaatgaagagtaagcttcagcttgctaaaggaaactgtggaaccttttgtaacttttggtgatatggaaaattatttacaaaccgtcaaagaatatgaggaagttgctgtatgacatagtgctggcactgatattatccatcatctctttttggacacttctgtaaatgtgattggattgtttgaaagaagatttaaagtttcaaagttttttgttctgtttttgctttgcatttggagaaaatattgaaagcagggtatgttgtttcattcaccttgaaaaaaccatgagtaaatggggatatagaatctctgaatagctcgctaaaagattcaagcaagggacatgaattttgttccatctatcaataatatccagaagaacaacttttttaaagagtctatagcaaaaagcaaaaaaaaaaaaaaattctaaacacaaagtcaaaataaacctattgtaaaagcatttcgtgatgagcatgaaaaagattgtttaaagatgatccccccagctacccattttccaaaactacacagatcacagctcatttctctaagtggagcagttatcaagaaacccaaacaccaaaattgctactcttcacatttaatcctacaaaaagtactccaatttcaaaatatgtatgtaacctgcgatttcaatgattgttgttcatatacatcatgtattattttggcccattttgggcctaaaaaagaaaactatgccttaaaaatcagaaccttttctccccactatgcttatgtggccatctacagcacttagaataaaaacagatgttaaaatattcagtgaaagttttattggaaaaaggaattgagatatataattgagatttggtgaaattgaaggagaaaatttaagtgagtctttaaaatatattctgaatgaaaactgtattgaggattcatttttgttccttttttttctttttctcttttctcctttttcttctttttaatagtctagttttagtcagtcagtgaggaagaattgggccatgctaacgttatcacaagagaacaatggcagaaatggtattagttatataatatttaaggacaaactatatgttttgctgttttaacgtagtgactcactgaactaaatacataattgaccaacattaagtgtatttccaatacagaagggttgaaaatattacattataaactcttttgaaaaatgtatctaaaattttttaagttctgttttgattccactttttggttgagtttttatgtttttgttttcaggtagattaataaatctggcagctgatttctgcaagattcttgtgttttgaatttctcattgaattggctactcaaacatagaaatcatttgttaatgatgtaatgtcttctctcagcttttatcttcactgctgtttgctgtctcttgatgatgacatgttaatacccaatagattaattgcaacaaacacttatactcaaataactaagtaaaaataatttttcttgttatgtccatgaaaagtgcttcagaataaaaatccacaagactgacagtgcagaacatttttctcaaatcatgggcggatcttggaggtctagtttcccgtagatgctgtaaccaattaccacaacttcagtaatttacacaaatttatcttatagttctggaggcagaagttcaaaagaagccttaagagactaaaaccaagatgtccttaggtctggttccttctggaggctccaggggagattcttccagctttcacttctagagtctgctgacattccttggctcctggctacatcacttcaatctctgcttccatggtcacatactcttctactatagtcaaatttccttcctgcctcttataaggatgcttgtgattacatttaggggatgctcagataatccaggacaatctctccatctcaagatccttaacttaatgacgtgtgccaagtccctttggctagataattattcataggtcccagggattaggacatggatgtaaggggtgagggcagggctgttattcagaacaccgcacggaggaggaagactgtgtagcaaagactctaattgatttactcaggaacagtggagttctgctgagggatctaggatttgaaagtactagagtttgcttttatttaccactgagatattttccccttattctgcataaataattttgaaaactttctatattaaatttcaactattccactaaaatgtctggtaatcacatcaagcctttagattattcaaatccttccccagcccccaggaaaacactaagtcatgaaacagaaaaacagaaggtatgataataatagtaataacagttaaatcagtggtctaatccagattttattttttaatacatttcttttggtgttaatatgggttactatgtgatcttatcatttgctagtgattattacttattaggtaagaacaatgtgtaaaatatgtctattactcaaaagaacaattgcaaaatgagtcaacttatctttatataaccaggaaagaaatatat

SEQ ID NO: 4944 - protein, 341 aa, Homo sapiens
MDGFYDQQVPYMVTNSQRGRNCNEKPTNVRKRKFINRDLAHDSEELFQDLSQLQETWLAEAQVPDNDEQFVPDYQAESLAFHGLPLKIKKEPHSPCSEISSACSQEQPFKFSYGEKCLYNVSAYDQKPQVGMRPSNPPTPSSTPVSPLHHASPNSTHTPKPDRAFPAHLPPSQSIPDSSYPMDHRFRRQLSEPCNSFPPLPTMPREGRPMYQRQMSEPNIPFPPQGFKQEYHDPVYEHNTMVGSAASQSFPPPLMIKQEPRDFAYDSEVPSCHSIYMRQEGFLAHPSRTEAVCLKRAPGSFMMTPVLSQKNSMETSNKSQECIGKDPHTNGEDHFSSGSFW

SEQ ID NO: 4945 - DNA, 5418 bp, Homo sapiens
ttggttgcaccctcagatagtacccatgagcttcactgttcagcctcggggcccaggcgcttcctggaatctctccttggccggggttaaaatgcagttcccgctcaaaatgcttataggttgatagaagtccagatcctgaggaaatctccagctaaatgctcaaaatataaaatactgagctgagatttgcgaagagcagcagcatggatggattttatgaccagcaagtgccttacatggtcaccaatagtcagcgtgggagaaattgtaacgagaaaccaacaaatgtcaggaaaagaaaattcattaacagagatctggctcatgattcagaagaactctttcaagatctaagtcaattacaggaaacatggcttgcagaagtggcttttcatggcctgccactgaaaatcaagaaagaaccccacagtccatgttcagaaatcagctctgcctgcagtcaagaacagccctttaaattcagctatggagaaaagtgcctgtacaatgtcagtgcctatgatcagaagccacaagtgggaatgaggccctccaacccccccacaccatccagcacgccagtgtccccactgcatcatgcatctccaaactcaactcatacaccgaaacctgaccgggccttcccagctcacctccctccatcgcagtccataccagatagcagctaccccatggaccacagatttcgccgccagctttctgaaccctgtaactcctttcctcctttgccgacgatgccaagggaaggacgtcctatgtaccaacgccagatgtctgagccaaacatccccttcccaccacaaggctttaagcaggagtaccacgacccagtgtatgaacacaacaccatggttggcagtgcggccagccaaagctttccccctcctctgatgattaaacaggaacccagagattttgcatatgactcagaagtgcctagctgccactccatttatatgaggcaagaaggcttcctggctcatcccagcagaacagaagctgtatgtttgaaaagggccccaggcagttttatgatgacacctgtgttgtcccagaaaaattcgatggagacatcaaacaagagccaggaatgtatcgggaaggacccacataccaacggcgaggatcacttcagctctggcagtttttggtagctcttctggatgacccttcaaattctcattttattgcctggactggtcgaggcatggaatttaaactgattgagcctgaagaggtggcccgacgttggggcattcagaaaaacaggccagctatgaactatgataaacttagccgttcactccgctattactatgagaaaggaattatgcaaaaggtggctggagagagatatgtctacaagtttgtgtgtgatccagaagcccttttctccatggcctttccagataatcagcgtccactgctgaagacagacatggaacgtcacatcaacgaggaggacacagtgcctctttctcactttgatgagagcatggcctacatgccggaagggggctgctgcaacccccacccctacaacgaaggctacgtgtattaacacaagtgacagtcaagcagggcgtttttgcgcttttccttttttctgcaagatacagagaattgctgaatctttgttttatttctgttgtttgtattttatttttaaataataatacacaaaaaggggcttttcctgttgcattattctatggtctgccatggactgtgcactttatttgagggtgggtgggagtaatctaaacatttattctgtgtaacaggaagctaatgggtgaatgggcagagggatttggggattactttttacttaggcttgggatggggtcctacaagttttgagtatgatgaaactatatcatgtctgtttgatttcataacaacataagataatgtttattttatcggggtatctatggtacagttaatttcacgttgtgtaaatatccacttggagactatttgccttgggcattttcccctgtcatttatgagtctctgcaggtgtacaaaaaaaccccaatctactgtaaatggcagtttaattgttagaaatgactgtttttgcaccacttgtaaaaaggtatttagcgattgcatttgctgtttgttgttttattttgctttatatatgacttgcagaggataaccataaaatgggtaattctctctgaagttgaataatcaccatgactgtaaatgaggggcacaattttggactctggcgccaaactgagtcataggccagtagcattacgtgtatctggtgccaccttgctgtttagatacaaatcataccgtcttttaaatattttgaagcccatttcagttaaataatgacatgtcatggtcctttggaatcttcatttaaatgttaaatctggaatcaaaatgaagcaaaaaatatctgtctccttttcactttcttcagtacataaatacattatttaatcaataagaattaactgtactaaatcatgtattatgctgttctagttacagcaaacactctttaagaaaaatatccaatacactaaataggtactatagtaatttttagacatggtacccattgatatgcatttaaaccttttactgctgtgttatgttgataacatatataaatattagataatgctaatgcttctgctgctgtcttttctgtaatattctctttcatgctgaatttactatgaccatttataagcagtgcagttaactacagatagcatttcaggacaaaatagatgactcaaaccatttattgcttaaaaaatagcttacgccatgctatgctataagcagcttttatgcacattgacaaatgaagagtaagcttcagcttgctaaaggaaactgtggaaccttttgtaacttttggtgatatggaaaattatttacaaaccgtcaaagaatatgaggaagttgctgtatgacatagtgctggcactgatattatccatcatctctttttggacacttctgtaaatgtgattggattgtttgaaagaagatttaaagtttcaaagttttttgttctgtttttgctttgcatttggagaaaatattgaaagcagggtatgttgtttcattcaccttgaaaaaaccatgagtaaatggggatatagaatctctgaatagctcgctaaaagattcaagcaagggacatgaattttgttccatctatcaataatatccagaagaacaacttttttaaagagtctatagcaaaaagcaaaaaaaaaaaaaaattctaaacacaaagtcaaaataaacctattgtaaaagcatttcgtgatgagcatgaaaaagattgtttaaagatgatccccccagctacccattttccaaaactacacagatcacagctcatttctctaagtggagcagttatcaagaaacccaaacaccaaaattgctactcttcacatttaatcctacaaaaagtactccaatttcaaaatatgtatgtaacctgcgatttcaatgattgttgttcatatacatcatgtattattttggcccattttgggcctaaaaaagaaaactatgccttaaaaatcagaaccttttctccccactatgcttatgtggccatctacagcacttagaataaaaacagatgttaaaatattcagtgaaagttttattggaaaaaggaattgagatatataattgagatttggtgaaattgaaggagaaaatttaagtgagtctttaaaatatattctgaatgaaaactgtattgaggattcatttttgttccttttttttctttttctcttttctcctttttcttctttttaatagtctagttttagtcagtcagtgaggaagaattgggccatgctaacgttatcacaagagaacaatggcagaaatggtattagttatataatatttaaggacaaactatatgttttgctgttttaacgtagtgactcactgaactaaatacataattgaccaacattaagtgtatttccaatacagaagggttgaaaatattacattataaactcttttgaaaaatgtatctaaaattttttaagttctgttttgattccactttttggttgagtttttatgtttttgttttcaggtagattaataaatctggcagctgatttctgcaagattcttgtgttttgaatttctcattgaattggctactcaaacatagaaatcatttgttaatgatgtaatgtcttctctcagcttttatcttcactgctgtttgctgtctcttgatgatgacatgttaatacccaatagattaattgcaacaaacacttatactcaaataactaagtaaaaataatttttcttgttatgtccatgaaaagtgcttcagaataaaaatccacaagactgacagtgcagaacatttttctcaaatcatgggcggatcttggaggtctagtttcccgtagatgctgtaaccaattaccacaacttcagtaatttacacaaatttatcttatagttctggaggcagaagttcaaaagaagccttaagagactaaaaccaagatgtccttaggtctggttccttctggaggctccaggggagattcttccagctttcacttctagagtctgctgacattccttggctcctggctacatcacttcaatctctgcttccatggtcacatactcttctactatagtcaaatttccttcctgcctcttataaggatgcttgtgattacatttaggggatgctcagataatccaggacaatctctccatctcaagatccttaacttaatgacgtgtgccaagtccctttggctagataattattcataggtcccagggattaggacatggatgtaaggggtgagggcagggctgttattcagaacaccgcacggaggaggaagactgtgtagcaaagactctaattgatttactcaggaacagtggagttctgctgagggatctaggatttgaaagtactagagtttgcttttatttaccactgagatattttccccttattctgcataaataattttgaaaactttctatattaaatttcaactattccactaaaatgtctggtaatcacatcaagcctttagattattcaaatccttccccagcccccaggaaaacactaagtcatgaaacagaaaaacagaaggtatgataataatagtaataacagttaaatcagtggtctaatccagattttattttttaatacatttcttttggtgttaatatgggttactatgtgatcttatcatttgctagtgattattacttattaggtaagaacaatgtgtaaaatatgtctattactcaaaagaacaattgcaaaatgagtcaacttatctttatataaccaggaaagaaatatat

SEQ ID NO: 4946 - protein, 323 aa, Homo sapiens
MDGFYDQQVPYMVTNSQRGRNCNEKPTNVRKRKFINRDLAHDSEELFQDLSQLQETWLAEVAFHGLPLKIKKEPHSPCSEISSACSQEQPFKFSYGEKCLYNVSAYDQKPQVGMRPSNPPTPSSTPVSPLHHASPNSTHTPKPDRAFPAHLPPSQSIPDSSYPMDHRFRRQLSEPCNSFPPLPTMPREGRPMYQRQMSEPNIPFPPQGFKQEYHDPVYEHNTMVGSAASQSFPPPLMIKQEPRDFAYDSEVPSCHSIYMRQEGFLAHPSRTEAVCLKRAPGSFMMTPVLSQKNSMETSNKSQECIGKDPHTNGEDHFSSGSFW

SEQ ID NO: 4947 - DNA, 4513 bp, Homo sapiens
aagtggcttcagagatgcagccctcactgcttaacgtcctagttattgtccttgaaacccgagccatctcaccgctcgcccccaaccctgggctctggctgtttaaaagctggagaggaagtgaaagcgtcaagtacatcccgttaggtgcaaagcaagtctcgttgatcgccattgctagttttgcacacgtttgcgaatcagagctgcccggggtacaccgaccgcgcagggaaacatcgagagtgtaaataaatacatcgcctcttgttcggatttttgctactaccgaaaatatgtaaattgtgaactctgttggctctctttggatccaggttgatagaagtccagatcctgaggaaatctccagctaaatgctcaaaatataaaatactgagctgagatttgcgaagagcagcagcatggatggattttatgaccagcaagtgccttacatggtcaccaatagtcagcgtgggagaaattgtaacgagaaaccaacaaatgtcaggaaaagaaaattcattaacagagatctggctcatgattcagaagaactctttcaagatctaagtcaattacaggaaacatggcttgcagaagctcaggtacctgacaatgatgagcagtttgtaccagactatcaggctgaaagtttggcttttcatggcctgccactgaaaatcaagaaagaaccccacagtccatgttcagaaatcagctctgcctgcagtcaagaacagccctttaaattcagctatggagaaaagtgcctgtacaatgtcagtgcctatgatcagaagccacaagtgggaatgaggccctccaacccccccacaccatccagcacgccagtgtccccactgcatcatgcatctccaaactcaactcatacaccgaaacctgaccgggccttcccagctcacctccctccatcgcagtccataccagatagcagctaccccatggaccacagatttcgccgccagctttctgaaccctgtaactcctttcctcctttgccgacgatgccaagggaaggacgtcctatgtaccaacgccagatgtctgagccaaacatccccttcccaccacaaggctttaagcaggagtaccacgacccagtgtatgaacacaacaccatggttggcagtgcggccagccaaagctttccccctcctctgatgattaaacaggaacccagagattttgcatatgactcagaagtgcctagctgccactccatttatatgaggcaagaaggcttcctggctcatcccagcagaacagaagctgtatgtttgaaaagggccccaggcagttttatgatgacacctgtgttgtcccagaaaaattcgatggtttttcaaatgttgccctttctgtaattattttaagaggtatatgtctctctactgaccataggagacatcaaacaagagccaggaatgtatcgggaaggacccacataccaacggcgaggatcacttcagctctggcagtttttggtagctcttctggatgacccttcaaattctcattttattgcctggactggtcgaggcatggaatttaaactgattgagcctgaagaggtggcccgacgttggggcattcagaaaaacaggccagctatgaactatgataaacttagccgttcactccgctattactatgagaaaggaattatgcaaaaggtggctggagagagatatgtctacaagtttgtgtgtgatccagaagcccttttctccatggcctttccagataatcagcgtccactgctgaagacagacatggaacgtcacatcaacgaggaggacacagtgcctctttctcactttgatgagagcatggcctacatgccggaagggggctgctgcaacccccacccctacaacgaaggctacgtgtattaacacaagtgacagtcaagcagggcgtttttgcgcttttccttttttctgcaagatacagagaattgctgaatctttgttttatttctgttgtttgtattttatttttaaataataatacacaaaaaggggcttttcctgttgcattattctatggtctgccatggactgtgcactttatttgagggtgggtgggagtaatctaaacatttattctgtgtaacaggaagctaatgggtgaatgggcagagggatttggggattactttttacttaggcttgggatggggtcctacaagttttgagtatgatgaaactatatcatgtctgtttgatttcataacaacataagataatgtttattttatcggggtatctatggtacagttaatttcacgttgtgtaaatatccacttggagactatttgccttgggcattttcccctgtcatttatgagtctctgcaggtgtacaaaaaaaccccaatctactgtaaatggcagtttaattgttagaaatgactgtttttgcaccacttgtaaaaaggtatttagcgattgcatttgctgtttgttgttttattttgctttatatatgacttgcagaggataaccataaaatgggtaattctctctgaagttgaataatcaccatgactgtaaatgaggggcacaattttggactctggcgccaaactgagtcataggccagtagcattacgtgtatctggtgccaccttgctgtttagatacaaatcataccgtcttttaaatattttgaagcccatttcagttaaataatgacatgtcatggtcctttggaatcttcatttaaatgttaaatctggaatcaaaatgaagcaaaaaatatctgtctccttttcactttcttcagtacataaatacattatttaatcaataagaattaactgtactaaatcatgtattatgctgttctagttacagcaaacactctttaagaaaaatatccaatacactaaataggtactatagtaatttttagacatggtacccattgatatgcatttaaaccttttactgctgtgttatgttgataacatatataaatattagataatgctaatgcttctgctgctgtcttttctgtaatattctctttcatgctgaatttactatgaccatttataagcagtgcagttaactacagatagcatttcaggacaaaatagatgactcaaaccatttattgcttaaaaaatagcttacgccatgctatgctataagcagcttttatgcacattgacaaatgaagagtaagcttcagcttgctaaaggaaactgtggaaccttttgtaacttttggtgatatggaaaattatttacaaaccgtcaaagaatatgaggaagttgctgtatgacatagtgctggcactgatattatccatcatctctttttggacacttctgtaaatgtgattggattgtttgaaagaagatttaaagtttcaaagttttttgttctgtttttgctttgcatttggagaaaatattgaaagcagggtatgttgtttcattcaccttgaaaaaaccatgagtaaatggggatatagaatctctgaatagctcgctaaaagattcaagcaagggacatgaattttgttccatctatcaataatatccagaagaacaacttttttaaagagtctatagcaaaaagcaaaaaaaaaaaaaaattctaaacacaaagtcaaaataaacctattgtaaaagcatttcgtgatgagcatgaaaaagattgtttaaagatgatccccccagctacccattttccaaaactacacagatcacagctcatttctctaagtggagcagttatcaagaaacccaaacaccaaaattgctactcttcacatttaatcctacaaaaagtactccaatttcaaaatatgtatgtaacctgcgatttcaatgattgttgttcatatacatcatgtattattttggcccattttgggcctaaaaaagaaaactatgccttaaaaatcagaaccttttctccccactatgcttatgtggccatctacagcacttagaataaaaacagatgttaaaatattcagtgaaagttttattggaaaaaggaattgagatatataattgagatttggtgaaattgaaggagaaaatttaagtgagtctttaaaatatattctgaatgaaaactgtattgaggattcatttttgttccttttttttctttttctcttttctcctttttcttctttttaatagtctagttttagtcagtcagtgaggaagaattgggccatgctaacgttatcacaagagaacaatggcagaaatggtattagttatataatatttaaggacaaactatatgttttgctgttttaacgtagtgactcactgaactaaatacataattgaccaacattaagtgtatttccaatacagaagggttgaaaatattacattataaactcttttgaaaaatgtatctaaaattttttaagttctgttttgattccactttttggttgagtttttatgtttttgttttcaggtagattaataaatctggcagctgatttctgc

SEQ ID NO: 4948 - protein, 321 aa, Homo sapiens; identical to SEQ ID NO: 4942

SEQ ID NO: 4949 - DNA, 4449 bp, Homo sapiens
aagtggcttcagagatgcagccctcactgcttaacgtcctagttattgtccttgaaacccgagccatctcaccgctcgcccccaaccctgggctctggctgtttaaaagctggagaggaagtgaaagcgtcaagtacatcccgttaggtgcaaagcaagtctcgttgatcgccattgctagttttgcacacgtttgcgaatcagagctgcccggggtacaccgaccgcgcagggaaacatcgagagtgtaaataaatacatcgcctcttgttcggatttttgctactaccgaaaatatgtaaattgtgaactctgttggctctctttggatccaggttgatagaagtccagatcctgaggaaatctccagctaaatgctcaaaatataaaatactgagctgagatttgcgaagagcagcagcatggatggattttatgaccagcaagtgccttacatggtcaccaatagtcagcgtgggagaaattgtaacgagaaaccaacaaatgtcaggaaaagaaaattcattaacagagatctggctcatgattcagaagaactctttcaagatctaagtcaattacaggaaacatggcttgcagaagctcaggtacctgacaatgatgagcagtttgtaccagactatcaggctgaaagtttggcttttcatggcctgccactgaaaatcaagaaagaaccccacagtccatgttcagaaatcagctctgcctgcagtcaagaacagccctttaaattcagctatggagaaaagtgcctgtacaatgtcagtgcctatgatcagaagccacaagtgggaatgaggccctccaacccccccacaccatccagcacgccagtgtccccactgcatcatgcatctccaaactcaactcatacaccgaaacctgaccgggccttcccagctcacctccctccatcgcagtccataccagatagcagctaccccatggaccacagatttcgccgccagctttctgaaccctgtaactcctttcctcctttgccgacgatgccaagggaaggacgtcctatgtaccaacgccagatgtctgagccaaacatccccttcccaccacaaggctttaagcaggagtaccacgacccagtgtatgaacacaacaccatggttggcagtgcggccagccaaagctttccccctcctctgatgattaaacaggaacccagagattttgcatatgactcagaagtgcctagctgccactccatttatatgaggcaagaaggcttcctggctcatcccagcagaacagaagctgtatgtttgaaaagggccccaggcagttttatgatgacacctgtgttgtcccagaaaaattcgatggagacatcaaacaagagccaggaatgtatcgggaaggacccacataccaacggcgaggatcacttcagctctggcagtttttggtagctcttctggatgacccttcaaattctcattttattgcctggactggtcgaggcatggaatttaaactgattgagcctgaagaggtggcccgacgttggggcattcagaaaaacaggccagctatgaactatgataaacttagccgttcactccgctattactatgagaaaggaattatgcaaaaggtggctggagagagatatgtctacaagtttgtgtgtgatccagaagcccttttctccatggcctttccagataatcagcgtccactgctgaagacagacatggaacgtcacatcaacgaggaggacacagtgcctctttctcactttgatgagagcatggcctacatgccggaagggggctgctgcaacccccacccctacaacgaaggctacgtgtattaacacaagtgacagtcaagcagggcgtttttgcgcttttccttttttctgcaagatacagagaattgctgaatctttgttttatttctgttgtttgtattttatttttaaataataatacacaaaaaggggcttttcctgttgcattattctatggtctgccatggactgtgcactttatttgagggtgggtgggagtaatctaaacatttattctgtgtaacaggaagctaatgggtgaatgggcagagggatttggggattactttttacttaggcttgggatggggtcctacaagttttgagtatgatgaaactatatcatgtctgtttgatttcataacaacataagataatgtttattttatcggggtatctatggtacagttaatttcacgttgtgtaaatatccacttggagactatttgccttgggcattttcccctgtcatttatgagtctctgcaggtgtacaaaaaaaccccaatctactgtaaatggcagtttaattgttagaaatgactgtttttgcaccacttgtaaaaaggtatttagcgattgcatttgctgtttgttgttttattttgctttatatatgacttgcagaggataaccataaaatgggtaattctctctgaagttgaataatcaccatgactgtaaatgaggggcacaattttggactctggcgccaaactgagtcataggccagtagcattacgtgtatctggtgccaccttgctgtttagatacaaatcataccgtcttttaaatattttgaagcccatttcagttaaataatgacatgtcatggtcctttggaatcttcatttaaatgttaaatctggaatcaaaatgaagcaaaaaatatctgtctccttttcactttcttcagtacataaatacattatttaatcaataagaattaactgtactaaatcatgtattatgctgttctagttacagcaaacactctttaagaaaaatatccaatacactaaataggtactatagtaatttttagacatggtacccattgatatgcatttaaaccttttactgctgtgttatgttgataacatatataaatattagataatgctaatgcttctgctgctgtcttttctgtaatattctctttcatgctgaatttactatgaccatttataagcagtgcagttaactacagatagcatttcaggacaaaatagatgactcaaaccatttattgcttaaaaaatagcttacgccatgctatgctataagcagcttttatgcacattgacaaatgaagagtaagcttcagcttgctaaaggaaactgtggaaccttttgtaacttttggtgatatggaaaattatttacaaaccgtcaaagaatatgaggaagttgctgtatgacatagtgctggcactgatattatccatcatctctttttggacacttctgtaaatgtgattggattgtttgaaagaagatttaaagtttcaaagttttttgttctgtttttgctttgcatttggagaaaatattgaaagcagggtatgttgtttcattcaccttgaaaaaaccatgagtaaatggggatatagaatctctgaatagctcgctaaaagattcaagcaagggacatgaattttgttccatctatcaataatatccagaagaacaacttttttaaagagtctatagcaaaaagcaaaaaaaaaaaaaaattctaaacacaaagtcaaaataaacctattgtaaaagcatttcgtgatgagcatgaaaaagattgtttaaagatgatccccccagctacccattttccaaaactacacagatcacagctcatttctctaagtggagcagttatcaagaaacccaaacaccaaaattgctactcttcacatttaatcctacaaaaagtactccaatttcaaaatatgtatgtaacctgcgatttcaatgattgttgttcatatacatcatgtattattttggcccattttgggcctaaaaaagaaaactatgccttaaaaatcagaaccttttctccccactatgcttatgtggccatctacagcacttagaataaaaacagatgttaaaatattcagtgaaagttttattggaaaaaggaattgagatatataattgagatttggtgaaattgaaggagaaaatttaagtgagtctttaaaatatattctgaatgaaaactgtattgaggattcatttttgttccttttttttctttttctcttttctcctttttcttctttttaatagtctagttttagtcagtcagtgaggaagaattgggccatgctaacgttatcacaagagaacaatggcagaaatggtattagttatataatatttaaggacaaactatatgttttgctgttttaacgtagtgactcactgaactaaatacataattgaccaacattaagtgtatttccaatacagaagggttgaaaatattacattataaactcttttgaaaaatgtatctaaaattttttaagttctgttttgattccactttttggttgagtttttatgtttttgttttcaggtagattaataaatctggcagctgatttctgc

SEQ ID NO: 4950 - protein, 341 aa, Homo sapiens; identical to SEQ ID NO: 4944

SEQ ID NO: 4951 - DNA, 4179 bp, Homo sapiens
ttggttgcaccctcagatagtacccatgagcttcactgttcagcctcggggcccaggcgcttcctggaatctctccttggccggggttaaaatgcagttcccgctcaaaatgcttataggttgatagaagtccagatcctgaggaaatctccagctaaatgctcaaaatataaaatactgagctgagatttgcgaagagcagcagcatggatggattttatgaccagcaagtgccttacatggtcaccaatagtcagcgtgggagaaattgtaacgagaaaccaacaaatgtcaggaaaagaaaattcattaacagagatctggctcatgattcagaagaactctttcaagatctaagtcaattacaggaaacatggcttgcagaagtggcttttcatggcctgccactgaaaatcaagaaagaaccccacagtccatgttcagaaatcagctctgcctgcagtcaagaacagccctttaaattcagctatggagaaaagtgcctgtacaatgtcagtgcctatgatcagaagccacaagtgggaatgaggccctccaacccccccacaccatccagcacgccagtgtccccactgcatcatgcatctccaaactcaactcatacaccgaaacctgaccgggccttcccagctcacctccctccatcgcagtccataccagatagcagctaccccatggaccacagatttcgccgccagctttctgaaccctgtaactcctttcctcctttgccgacgatgccaagggaaggacgtcctatgtaccaacgccagatgtctgagccaaacatccccttcccaccacaaggctttaagcaggagtaccacgacccagtgtatgaacacaacaccatggttggcagtgcggccagccaaagctttccccctcctctgatgattaaacaggaacccagagattttgcatatgactcagaagtgcctagctgccactccatttatatgaggcaagaaggcttcctggctcatcccagcagaacagaagctgtatgtttgaaaagggccccaggcagttttatgatgacacctgtgttgtcccagaaaaattcgatggagacatcaaacaagagccaggaatgtatcgggaaggacccacataccaacggcgaggatcacttcagctctggcagtttttggtagctcttctggatgacccttcaaattctcattttattgcctggactggtcgaggcatggaatttaaactgattgagcctgaagaggtggcccgacgttggggcattcagaaaaacaggccagctatgaactatgataaacttagccgttcactccgctattactatgagaaaggaattatgcaaaaggtggctggagagagatatgtctacaagtttgtgtgtgatccagaagcccttttctccatggcctttccagataatcagcgtccactgctgaagacagacatggaacgtcacatcaacgaggaggacacagtgcctctttctcactttgatgagagcatggcctacatgccggaagggggctgctgcaacccccacccctacaacgaaggctacgtgtattaacacaagtgacagtcaagcagggcgtttttgcgcttttccttttttctgcaagatacagagaattgctgaatctttgttttatttctgttgtttgtattttatttttaaataataatacacaaaaaggggcttttcctgttgcattattctatggtctgccatggactgtgcactttatttgagggtgggtgggagtaatctaaacatttattctgtgtaacaggaagctaatgggtgaatgggcagagggatttggggattactttttacttaggcttgggatggggtcctacaagttttgagtatgatgaaactatatcatgtctgtttgatttcataacaacataagataatgtttattttatcggggtatctatggtacagttaatttcacgttgtgtaaatatccacttggagactatttgccttgggcattttcccctgtcatttatgagtctctgcaggtgtacaaaaaaaccccaatctactgtaaatggcagtttaattgttagaaatgactgtttttgcaccacttgtaaaaaggtatttagcgattgcatttgctgtttgttgttttattttgctttatatatgacttgcagaggataaccataaaatgggtaattctctctgaagttgaataatcaccatgactgtaaatgaggggcacaattttggactctggcgccaaactgagtcataggccagtagcattacgtgtatctggtgccaccttgctgtttagatacaaatcataccgtcttttaaatattttgaagcccatttcagttaaataatgacatgtcatggtcctttggaatcttcatttaaatgttaaatctggaatcaaaatgaagcaaaaaatatctgtctccttttcactttcttcagtacataaatacattatttaatcaataagaattaactgtactaaatcatgtattatgctgttctagttacagcaaacactctttaagaaaaatatccaatacactaaataggtactatagtaatttttagacatggtacccattgatatgcatttaaaccttttactgctgtgttatgttgataacatatataaatattagataatgctaatgcttctgctgctgtcttttctgtaatattctctttcatgctgaatttactatgaccatttataagcagtgcagttaactacagatagcatttcaggacaaaatagatgactcaaaccatttattgcttaaaaaatagcttacgccatgctatgctataagcagcttttatgcacattgacaaatgaagagtaagcttcagcttgctaaaggaaactgtggaaccttttgtaacttttggtgatatggaaaattatttacaaaccgtcaaagaatatgaggaagttgctgtatgacatagtgctggcactgatattatccatcatctctttttggacacttctgtaaatgtgattggattgtttgaaagaagatttaaagtttcaaagttttttgttctgtttttgctttgcatttggagaaaatattgaaagcagggtatgttgtttcattcaccttgaaaaaaccatgagtaaatggggatatagaatctctgaatagctcgctaaaagattcaagcaagggacatgaattttgttccatctatcaataatatccagaagaacaacttttttaaagagtctatagcaaaaagcaaaaaaaaaaaaaaattctaaacacaaagtcaaaataaacctattgtaaaagcatttcgtgatgagcatgaaaaagattgtttaaagatgatccccccagctacccattttccaaaactacacagatcacagctcatttctctaagtggagcagttatcaagaaacccaaacaccaaaattgctactcttcacatttaatcctacaaaaagtactccaatttcaaaatatgtatgtaacctgcgatttcaatgattgttgttcatatacatcatgtattattttggcccattttgggcctaaaaaagaaaactatgccttaaaaatcagaaccttttctccccactatgcttatgtggccatctacagcacttagaataaaaacagatgttaaaatattcagtgaaagttttattggaaaaaggaattgagatatataattgagatttggtgaaattgaaggagaaaatttaagtgagtctttaaaatatattctgaatgaaaactgtattgaggattcatttttgttccttttttttctttttctcttttctcctttttcttctttttaatagtctagttttagtcagtcagtgaggaagaattgggccatgctaacgttatcacaagagaacaatggcagaaatggtattagttatataatatttaaggacaaactatatgttttgctgttttaacgtagtgactcactgaactaaatacataattgaccaacattaagtgtatttccaatacagaagggttgaaaatattacattataaactcttttgaaaaatgtatctaaaattttttaagttctgttttgattccactttttggttgagtttttatgtttttgttttcaggtagattaataaatctggcagctgatttctgc

SEQ ID NO: 4952 - protein, 323 aa, Homo sapiens; identical to SEQ ID NO: 4946

SEQ ID NO: 4953 - DNA, 1714 bp, Homo sapiens
ttggttgcaccctcagatagtacccatgagcttcactgttcagcctcggggcccaggcgcttcctggaatctctccttggccggggttaaaatgcagttcccgctcaaaatgcttataggttgatagaagtccagatcctgaggaaatctccagctaaatgctcaaaatataaaatactgagctgagatttgcgaagagcagcagcatggatggattttatgaccagcaagtgccttacatggtcaccaatagtcagcgtgggagaaattgtaacgagaaaccaacaaatgtcaggaaaagaaaattcattaacagagatctggctcatgattcagaagaactctttcaagatctaagtcaattacaggaaacatggcttgcagaagtggcttttcatggcctgccactgaaaatcaagaaagaaccccacagtccatgttcagaaatcagctctgcctgcagtcaagaacagccctttaaattcagctatggagaaaagtgcctgtacaatgtcagtgcctatgatcagaagccacaagtgggaatgaggccctccaacccccccacaccatccagcacgccagtgtccccactgcatcatgcatctccaaactcaactcatacaccgaaacctgaccgggccttcccagctcacctccctccatcgcagtccataccagatagcagctaccccatggaccacagatttcgccgccagctttctgaaccctgtaactcctttcctcctttgccgacgatgccaagggaaggacgtcctatgtaccaacgccagatgtctgagccaaacatccccttcccaccacaaggctttaagcaggagtaccacgacccagtgtatgaacacaacaccatggttggcagtgcggccagccaaagctttccccctcctctgatgattaaacaggaacccagagattttgcatatgactcagaagtgcctagctgccactccatttatatgaggcaagaaggcttcctggctcatcccagcagaacagaagctgtatgtttgaaaagggccccaggcagttttatgatgacacctgtgttgtcccagaaaaattcgatggagacatcaaacaagagccaggaatgtatcgggaaggacccacataccaacggcgaggatcacttcagctctggcagtttttggtagctcttctggatgacccttcaaattctcattttattgcctggactggtcgaggcatggaatttaaactgattgagcctgaagaggtggcccgacgttggggcattcagaaaaacaggccagctatgaactatgataaacttagccgttcactccgctattactatgagaaaggaattatgcaaaaggtggctggagagagatatgtctacaagtttgtgtgtgatccagaagcccttttctccatggcctttccagataatcagcgtccactgctgaagacagacatggaacgtcacatcaacgaggaggacacagtgcctctttctcactttgatgagagcatggcctacatgccggaagggggctgctgcaacccccacccctacaacgaaggctacgtgtattaacacaagtgacagtcaagcagggcgtttttgcgcttttccttttttctgcaagatacagagaattgctgaatctttgttttatttctgttgtttgtattttatttttaaataataatacacaaaaagggg

SEQ ID NO: 4954 - protein, 323 aa, Homo sapiens; identical to SEQ ID NO: 4946

SEQ ID NO: 4955 - DNA, 797 bp, Homo sapiens
agctcaggtacctgacaatgatgagcagtttgtaccagactatcaggctgaaagttacatgtctggatactggctactggctactgtattggtcagcacagctttgaacagcgatgtcttccacattgttgtctccagcctggttcttccctccgaagctgtccattggacatcctcacctgatccctgctagtgtccctgtgcagattagaaaaaggcaacacctctggacttgctcccttagcccttggctgtgcattgcacaaaacaccatctacacgccaactccaatctttaacgcaacactccacagacaatttacactcagcaagtccaacagtgaaatcatgatttttcctgaccaacgttgctcttttacttctgttgcctttctaagttactggcatcaccatccaaactgaaatcctgatatttatccttagagacctcggttctttacaataaacctcaaattgctaaccaagttgttgatcctagctttcaaaaatatcttaatttcatggcctctccttcatccctatttcattgttttagttcacacacctacattctgccttgactgaacttctgagtcagccttttggttggttttcttgtcttttgattttccctctttgcaagccaccctgtgcaatagcattaacacacagctatttggccttgttacttttcttcttaaactgtctgcaggacagagtcctatttctttagctgtacggaaaattcttctacaaccgaagccttgactgtcctttcggtttaaactcttgctactc

SEQ ID NO: 4956 - protein, 102 aa, Homo sapiens
MSSTLLSPAWFFPPKLSIGHPHLIPASVPVQIRKRQHLWTCSLSPWLCIAQNTIYTPTPIFNATLHRQFTLSKSNSEIMIFPDQRCSFTSVAFLSYWHHHPN

SEQ ID NO: 4957 - DNA, 611 bp, Homo sapiens
agtaactctgccaacaccttgatctcagatttctagcctccaaagacaatgtcaagagaatgagaagacaagcctcagaatgagaagaaacatttgtaaaagatacatctaataaagcagttttatccaaaatatataatacaaagatctcttgagactcaacattaaggaagcaaacaaccagaataaaaaatgagctccagatactaacagccacctcatcaaagacaatacacagataacaaattaccatatgaaaatgtggtctctatcatatgtcatcatggaaattcaaattaaagccacagtgagataccactacacacctataagaatagccaaaatccagaatacagacaacaccatacgctaatgaggattaggagcaacaggaactcgtattcatgctggtgggaatgcagcaaggaacatttccctctctggatacatgtgtttcagatcacaaagccatagatgagaggagtctctctttctaaatcactttttgaagaacacctactcaagagagtcacctgaccccgttggaatataagatgtgtgggaaatctaccttattgcattaaactactcagatttttgtgtggttggtt

SEQ ID NO: 4958 - protein, 33 aa, Homo sapiens
MRIRSNRNSYSCWWECSKEHFPLWIHVFQITKP

SEQ ID NO: 4959 - DNA, 5333 bp, Homo sapiens; identical to SEQ ID NO: 631

SEQ ID NO: 4960 - protein, 630 aa, Homo sapiens; identical to SEQ ID NO: 632

SEQ ID NO: 4961 - DNA, 900 bp, Homo sapiens
aaggaattaatttgatctaaattgaactttaaaattctggtttttcttttttctttttttaagacggagtctccccctgtcacccaggctggaatgcagtggcacaatctcagctcattgcaacctccacctcccgagttcaagcaattctcctgcctcagactcctgagtagctgagattacaggcatgcaccaggacacctggctattttttttttttctttttttagtagagatggggtttcaccagttgatgaggctggtcttggactcctgacctcaagtgatccacccccctcagcctcccaaagtgctaggattacaggcatgagtcactgcgtcaggccaaaattctgtattttcaattagagtcaaagcccaaggatgtctctaccatcttgtagcccttgccaatagcctactcttgtcttccagggttcctccaaatctctctccaaatatttgttatctactcattcaatacccttcttcaaccatcctcttgctttggaattgacatgaaccaactaggcccgccttattggtaggaattcatttgccctgcctgccagcccccatagagacagaaccattgcctagtgaaagaagattttaatgacgtgatgaaaatattttagaaagcaccttgaagattagtatttttatgtaacttctgttggagagatgtcttcaggagactgaagtagaagagcgactgtcaaaatggaaagtcccagagacatccaatttatgtaaatcaacatcacctgaattcagaatctcatccagatttcaacaaagacttctgaatgccaacaaagaagaggactgaatttacagactctcactctaacaatatatgctgttcaatttgaaaacagaataaaattattttggcag

SEQ ID NO: 4962 - protein, 53 aa, Homo sapiens
LLLERCLQETEVEERLSKWKVPETSNLCKSTSPEFRISSRFQQRLLNANKEED

SEQ ID NO: 4963 - DNA, 2351 bp, Homo sapiens
gcgagtttactgtgcgacttcattcatccggatagttgctcttttcttttcccagcaggtgttatctgaagccggtttggaacttttgggaatcgctgccgttttgcccttgggagtaggatgtggtgaaaggatggggcttctcccttacggggctcacaatggccagagaagattccgtgaagtgtctgcgctgcctgctctacgccctcaatctgctcttttggttaatgtccatcagtgtgttggcagtttctgcttggatgagggactacctaaataatgttctcactttaactgcagaaacgagggtagaggaagcagtcattttgacttactttcctgtggttcatccggtcatgattgctgtttgctgtttccttatcattgtggggatgttaggatattgtggaacggtgaaaagaaatctgttgcttcttgcatggtactttggaagtttgcttgtcattttctgtgtagaactggcttgtggcgtttggacatatgaacaggaacttatggttccagtacaatggtcagatatggtcactttgaaagccaggatgacaaattatggattacctagatatcggtggcttactcatgcttggaatttttttcagagagagtttaagtgctgtggagtagtatatttcactgactggttggaaatgacagagatggactggcccccagattcctgctgtgttagagaattcccaggatgttccaaacaggcccaccaggaagatctcagtgacctttatcaagagggttgtgggaagaaaatgtattcctttttgagaggaaccaaacaactgcaggtgctgaggtttctgggaatctccattggggtgacacaaatcctggccatgattctcaccattactctgctctgggctctgtattatgatagaagggagccggggacagaccaaatgatgtccttgaagaatgacaactctcagcacctgtcatgtccctcagtagaactgttgaaaccaagcctgtcaagaatctttgaacacacatccatggcaaacagctttaatacacactttgagatggaggagttataaaaagaaatgtcacagaagaaaaccacaaacttgttttactggacttgtgaatttttgagtacatactatgtgtttcagaaatatgtagaaataaaaatgttgccataaaataacacctaagcatatactattctatgctttaaaatgaggatggaaaagtttcatgtcataagtcaccacctggacaataattgatgcccttaaaatgctgaagacagatgtcatacccactgtgtagcctgtgtatgacttttactgaacacagttatgttttgaggcagcatggtttgattagcatttccgcatccatgcaaacgagtcacatatggtgggactggagccatagtaaaggttgatttacttctaccaactagtatataaagtactaattaaatgctaacataggaagttagaaaatactaataacttttattactcagcgatctattcttctgatgctaaataaattatatatcagaaaactttcaatattggtgactacctaaatgtgatttttgctggttactaaaatattcttaccacttaaaagagcaagctaacacattgtcttaagctgatcagggattttttgtatataagtctgtgttaaatctgtataattcagtcgatttcagttctgataatgttaagaataaccattatgaaaaggaaaatttgtcctgtatagcatcattatttttagcctttcctgttaataaagctttactattctgtcctgggcttatattacacatataactgttatttaaatacttaaccactaattttgaaaattaccagtgtgatacataggaatcattattcagaatgtagtctggtctttaggaagtattaataagaaaatttgcacataacttagttgattcagaaaggacttgtatgctgtttttctcccaaatgaagactctttttgacactaaacactttttaaaaagcttatctttgccttctccaaacaagaagcaatagtctccaagtcaatataaattctacagaaaatagtgttctttttctccagaaaaatgcttgtgagaatcattaaaacatgtgacaatttagagattctttgttttatttcactgattaatatactgtggcaaattacacagattattaaatttttttacaagagtatagtatatttatttgaaatgggaaaagtgcattttactgtattttgtgtattttgtttatttctcagaatatggaaagaaaattaaaatgtgtcaataaatattttctagagagtaa

SEQ ID NO: 4964 - protein, 305 aa, Homo sapiens; identical to SEQ ID NO: 634

SEQ ID NO: 4965 - DNA, 2570 bp, Homo sapiens
gcagctggccctggctgccgccgctgcctcgtccggactcggagaggacttgggagggacagcggcgctgggaggtggcttagcagagactttccagcaactgctgcccaggacttttttttttttttttctttttcccaggaggcggcgacggcggcggcggggggagaggaagagaaagaagcgtctccagctgaagccaatgcagccctccggctctccgcgaagaagttccctgccccgatgagcccccgccgtgcgtccccgactatccccaggcgggcgtggggcaccgggcccagcgccgacgatcgctgccgttttgcccttgggagtaggatgtggtgaaaggatggggcttctcccttacggggctcacaatggccagagaagattccgtgaagtgtctgcgctgcctgctctacgccctcaatctgctcttttggttaatgtccatcagtgtgttggcagtttctgcttggatgagggactacctaaataatgttctcactttaactgcagaaacgagggtagaggaagcagtcattttgacttactttcctgtggttcatccggtcatgattgctgtttgctgtttccttatcattgtggggatgttaggatattgtggaacggtgaaaagaaatctgttgcttcttgcatggtactttggaagtttgcttgtcattttctgtgtagaactggcttgtggcgtttggacatatgaacaggaacttatggttccagtacaatggtcagatatggtcactttgaaagccaggatgacaaattatggattacctagatatcggtggcttactcatgcttggaatttttttcagagagagtttaagtgctgtggagtagtatatttcactgactggttggaaatgacagagatggactggcccccagattcctgctgtgttagagaattcccaggatgttccaaacaggcccaccaggaagatctcagtgacctttatcaagagggttgtgggaagaaaatgtattcctttttgagaggaaccaaacaactgcaggtgctgaggtttctgggaatctccattggggtgacacaaatcctggccatgattctcaccattactctgctctgggctctgtattatgatagaagggagccggggacagaccaaatgatgtccttgaagaatgacaactctcagcacctgtcatgtccctcagtagaactgttgaaaccaagcctgtcaagaatctttgaacacacatccatggcaaacagctttaatacacactttgagatggaggagttataaaaagaaatgtcacagaagaaaaccacaaacttgttttactggacttgtgaatttttgagtacatactatgtgtttcagaaatatgtagaaataaaaatgttgccataaaataacacctaagcatatactattctatgctttaaaatgaggatggaaaagtttcatgtcataagtcaccacctggacaataattgatgcccttaaaatgctgaagacagatgtcatacccactgtgtagcctgtgtatgacttttactgaacacagttatgttttgaggcagcatggtttgattagcatttccgcatccatgcaaacgagtcacatatggtgggactggagccatagtaaaggttgatttacttctaccaactagtatataaagtactaattaaatgctaacataggaagttagaaaatactaataacttttattactcagcgatctattcttctgatgctaaataaattatatatcagaaaactttcaatattggtgactacctaaatgtgatttttgctggttactaaaatattcttaccacttaaaagagcaagctaacacattgtcttaagctgatcagggattttttgtatataagtctgtgttaaatctgtataattcagtcgatttcagttctgataatgttaagaataaccattatgaaaaggaaaatttgtcctgtatagcatcattatttttagcctttcctgttaataaagctttactattctgtcctgggcttatattacacatataactgttatttaaatacttaaccactaattttgaaaattaccagtgtgatacataggaatcattattcagaatgtagtctggtctttaggaagtattaataagaaaatttgcacataacttagttgattcagaaaggacttgtatgctgtttttctcccaaatgaagactctttttgacactaaacactttttaaaaagcttatctttgccttctccaaacaagaagcaatagtctccaagtcaatataaattctacagaaaatagtgttctttttctccagaaaaatgcttgtgagaatcattaaaacatgtgacaatttagagattctttgttttatttcactgattaatatactgtggcaaattacacagattattaaatttttttacaagagtatagtatatttatttgaaatgggaaaagtgcattttactgtattttgtgtattttgtttatttctcagaatatggaaagaaaattaaaatgtgtcaataaatattttctagagagtaa

SEQ ID NO: 4966 - protein, 305 aa, Homo sapiens; identical to SEQ ID NO: 634

SEQ ID NO: 4967 - DNA, 2497 bp, Homo sapiens
aaagggatttactgcacggacttctcccaagttcctaggcattatcttctggaccctatcctgcagaggaggcggcgacggcggcggcggggggagaggaagagaaagaagcgtctccagctgaagccaatgcagccctccggctctccgcgaagaagttccctgccccgatgagcccccgccgtgcgtccccgactatccccaggcgggcgtggggcaccgggcccagcgccgacgatcgctgccgttttgcccttgggagtaggatgtggtgaaaggatggggcttctcccttacggggctcacaatggccagagaagattccgtgaagtgtctgcgctgcctgctctacgccctcaatctgctcttttggttaatgtccatcagtgtgttggcagtttctgcttggatgagggactacctaaataatgttctcactttaactgcagaaacgagggtagaggaagcagtcattttgacttactttcctgtggttcatccggtcatgattgctgtttgctgtttccttatcattgtggggatgttaggatattgtggaacggtgaaaagaaatctgttgcttcttgcatggtactttggaagtttgcttgtcattttctgtgtagaactggcttgtggcgtttggacatatgaacaggaacttatggttccagtacaatggtcagatatggtcactttgaaagccaggatgacaaattatggattacctagatatcggtggcttactcatgcttggaatttttttcagagagagtttaagtgctgtggagtagtatatttcactgactggttggaaatgacagagatggactggcccccagattcctgctgtgttagagaattcccaggatgttccaaacaggcccaccaggaagatctcagtgacctttatcaagagggttgtgggaagaaaatgtattcctttttgagaggaaccaaacaactgcaggtgctgaggtttctgggaatctccattggggtgacacaaatcctggccatgattctcaccattactctgctctgggctctgtattatgatagaagggagccggggacagaccaaatgatgtccttgaagaatgacaactctcagcacctgtcatgtccctcagtagaactgttgaaaccaagcctgtcaagaatctttgaacacacatccatggcaaacagctttaatacacactttgagatggaggagttataaaaagaaatgtcacagaagaaaaccacaaacttgttttactggacttgtgaatttttgagtacatactatgtgtttcagaaatatgtagaaataaaaatgttgccataaaataacacctaagcatatactattctatgctttaaaatgaggatggaaaagtttcatgtcataagtcaccacctggacaataattgatgcccttaaaatgctgaagacagatgtcatacccactgtgtagcctgtgtatgacttttactgaacacagttatgttttgaggcagcatggtttgattagcatttccgcatccatgcaaacgagtcacatatggtgggactggagccatagtaaaggttgatttacttctaccaactagtatataaagtactaattaaatgctaacataggaagttagaaaatactaataacttttattactcagcgatctattcttctgatgctaaataaattatatatcagaaaactttcaatattggtgactacctaaatgtgatttttgctggttactaaaatattcttaccacttaaaagagcaagctaacacattgtcttaagctgatcagggattttttgtatataagtctgtgttaaatctgtataattcagtcgatttcagttctgataatgttaagaataaccattatgaaaaggaaaatttgtcctgtatagcatcattatttttagcctttcctgttaataaagctttactattctgtcctgggcttatattacacatataactgttatttaaatacttaaccactaattttgaaaattaccagtgtgatacataggaatcattattcagaatgtagtctggtctttaggaagtattaataagaaaatttgcacataacttagttgattcagaaaggacttgtatgctgtttttctcccaaatgaagactctttttgacactaaacactttttaaaaagcttatctttgccttctccaaacaagaagcaatagtctccaagtcaatataaattctacagaaaatagtgttctttttctccagaaaaatgcttgtgagaatcattaaaacatgtgacaatttagagattctttgttttatttcactgattaatatactgtggcaaattacacagattattaaatttttttacaagagtatagtatatttatttgaaatgggaaaagtgcattttactgtattttgtgtattttgtttatttctcagaatatggaaagaaaattaaaatgtgtcaataaatattttctagagagtaa

SEQ ID NO: 4968 - protein, 305 aa, Homo sapiens; identical to SEQ ID NO: 634

SEQ ID NO: 4969 - DNA, 694 bp, Homo sapiens
ttatctgaagccggtttggaacttttgggagtttagttaccattatgattttaacaaatgatttttgatgaggcgatgtctcgaatgcactgggcctcgggaccctctggaccctgctgagggcgggtggaggagggacgggcaggctgtgggaagcgtgatggtgagatgtcccgtgttctctctcccccgccccctgcagatcgctgccgttttgcccttgggagtaggatgtggtgaaaggatggggcttctcccttacggggctcacaatggccagagaagattccgtgaagtgtctgcgctgcctgctctacgccctcaatctgctcttttggaatcatcacattccacttctaaaaggagctttaaagatggcctggttgaacgtccttcctttgtgagtgaggaaattaagtgcagattaagtgacttgccaaagatcagatagtccaatggtggcagtgccaggaacagaattcagctttcttgcccctagacagtgtctttcacttgacccttactgagttttgaaccttagaattactaagattgttgttgttgttgtttaataaagaataaagctttgaaaaatttgttaatactttacattgtgtgggaaaaaagaaccaaatcattcaacaaaaatatcactcctcttggaaatgaaatttgcataaaagcacctattcct

SEQ ID NO: 4970 - protein, 127 aa, Homo sapiens
MRRCLECTGPRDPLDPAEGGWRRDGQAVGSVMVRCPVFSLPRPLQIAAVLPLGVGCGERMGLLPYGAHNGQRRFREVSALPALRPQSALLESSHSTSKRSFKDGLVERPSFVSEEIKCRLSDLPKIR

SEQ ID NO: 4971 - DNA, 1222 bp, Homo sapiens
tttttttttttttgccggagtcgagcgggtgctgctagcggaggcgccatattggaggggacaaaactccggcgacagcgagtgacacaaataaacccctggacccccttgttccctcagctctaagggccgcgatgttgtacctagaagactatctggaaatgattgagcagcttcctatggatctgcgggaccgcttcacggaaatgcgcgagatggacctgcaggtgcagaatgcaatggatcaactagaacaaagagtcagtgaattctttatgaatgcaaagaaaaataaacctgagtggagggaagagcaaatggcatccatcaaaaaagactactataaagctttggaagatgcagatgagaaggttcagttggcaaaccagatatatgacttgcagcacttctaaaagattgaaaacaccaagaagatagatagaatattcactatttctcatattgatgcaattgtggtgctctttttcatttgaaacatcttctcctaaaatatacactttaagaaatagtcatttctgtttttgcattaaagtaaattaaagcagaaaacacatgctcacttttggctaacttcagtgtatagatttcatacttatgttgtctttcctgggtacagatttattactgaacaagtacgtgtaagtaaaatgtcattggtgagcaggacacaagataaaaggtgaacaccacatatggtgtgaattgtaaatgcttataccacaaacttgaaaatgtgtcatgtagagccatggaaaatgtctagttgtttttatgtagtacacacattttaatggtgctaacaacctgggctcttttgttcatagagttattctgaaaaaaatttcataaaagacactgcctaaagataggtagaataggctgtagcttgatttactgtggaataaaaaccaaaaaaaaaaaggtcttaattgtttcagtctttaattatgtctataaacttagaaaaaggcatttacatttgaatctagactaatttgtttagtaacattcttcctcatattcaatgactgtatgtatcagtccttatttagagactgcctgctttttaattcatatagctctttggttctattctttgttttgtttattattttgttgttttattgcttgttagacctttactaaagatattttgtgtatttagaaaaaatataacataaatatatgctttttaaatatg

SEQ ID NO: 4972 - protein, 92 aa, Homo sapiens; identical to SEQ ID NO: 638

SEQ ID NO: 4973 - DNA, 2106 bp, Homo sapiens
tttttttttttttgccggagtcgagcgggtgctgctagcggaggcgccatattggaggggacaaaactccggcgacagcgagtgacacaaataaacccctggacccccttgttccctcagctctaagggccgcgatgttgtacctagaagactatctggaaatgattgagcagcttcctatggatctgcgggaccgcttcacggaaatgcgcgagatggacctgcaggtgcagaatgcaatggatcaactagaacaaagagtcagtgaattctttatgaatgcaaagaaaaataaacctgagtggagggaagagcaaatggcatccatcaaaaaagactactataaagctttggaagatgcagatgagaaggttcagttggcaaaccagatatatgacttggatctttggaattagacactccttcacagccagtgaacaatcaccatgctcattcacatactccagtggaaaaaaggaaatataatccaacttctcaccatacgacaacagatcatattcctgaaaagaaatttaaatctgaagctcttctatccacccttacgtcagatgcctctaaggaaaatacactaggttgtcgaaataataattccacagcctcttctaacaatgcctacaatgtgaattcctcccaacctctgggatcctataacattggctcgttatcttcaggaactggtgcaggggcaattaccatggcagctgctcaagcagttcaggctacagctcagatgaaggagggacgaagaacatcaagtttaaaagccagttatgaagcatttaagaataatgactttcagttgggaaaagaattttcaatggccagggaaacagttggctattcatcatcttcggcacttatgacaacattaacacagaatgccagttcatcagcagccgactcacggagtggtcgaaagagcaaaaacaacaacaagtcttcaagccagcagtcatcatcttcctcctcctcttcttccttatcatcgtgttcttcatcatcaactgttgtacaagaaatctctcaacaaacaactgtagtgccagaatctgattcaaatagtcaggttgattggacttacgacccaaatgaacctcgatactgcatttgtaatcaggtatcttatggtgagatggtgggatgtgataaccaagattgccctatagaatggttccattatggctgcgttggattgacagaggcaccaaaaggcaaatggtactgtccacagtgcactgctgcaatgaagagaagaggcagcagacacaaataaaggtggtccttttgtttgatgaagaaataaacttcagctgaagattttatataggactttaaaaagaagagaagagaaagaagaaacaatgcatttccaggcaaccacttaaaggatttacatagacaatcctataagatcttgaacttgaattttatgggttgtattttaataatgtaagtaaattatttatgcactcctggtgtgctatgaatattattccagttagccttggattatttcagtggccaacatatgcagacatttgtactcctcaaccattttctcaaagtaatgggcattctatgatttagacttcaaggaattccaatgatgaagattttaaggaaagtattttatattcaacaggtatattctgctgcatgtactgtactccagagctgttatgtaacactgtatataaatggttgcaaaaaaaaaaaaaagtcagtgcttctaaaaagaatttaagataatggtttttaaaatgcctttataataagctttgtttctttgtgaaactaattcagcaggctgaaggaaatggttcatgtgataatgtgggctggtatcctctagagtacctgggtacataaacagaaactcctgtaggtaaaaagtaatttgtgccattagtctttctatgtttctgcatccagatagagtgcagttcatgagggagggggcgggggactgaaggggaaagggcgttaaagtgatacatttttataccaaatgtgtttatttttttgtgcaagtaatccttaaaattgcaattgtattaggtgttaaaataaagtttttaaaaaatt

SEQ ID NO: 4974 - protein, 192 aa, Homo sapiens
MAAAQAVQATAQMKEGRRTSSLKASYEAFKNNDFQLGKEFSMARETVGYSSSSALMTTLTQNASSSAADSRSGRKSKNNNKSSSQQSSSSSSSSSLSSCSSSSTVVQEISQQTTVVPESDSNSQVDWTYDPNEPRYCICNQVSYGEMVGCDNQDCPIEWFHYGCVGLTEAPKGKWYCPQCTAAMKRRGSRHK

SEQ ID NO: 4975 - DNA, 2203 bp, Homo sapiens
tttttttttttttgccggagtcgagcgggtgctgctagcggaggcgccatattggaggggacaaaactccggcgacagcgagtgacacaaataaacccctggacccccttgttccctcagctctaagggccgcgatgttgtacctagaagactatctggaaatgattgagcagcttcctatggatctgcgggaccgcttcacggaaatgcgcgagatggacctgcaggtgcagaatgcaatggatcaactagaacaaagagtcagtgaattctttatgaatgcaaagaaaaataaacctgagtggagggaagagcaaatggcatccatcaaaaaagactactataaagctttggaagatgcagatgagaaggttcagttggcaaaccagatatatgacttggtagatcgacacttgagaaagctggatcaggaactggctaagtttaaaatggagctggaagctgataatgctggaattacagaaatattagagaggcgatctttggaattagacactccttcacagccagtgaacaatcaccatgctcattcacatactccagtggaaaaaaggaaatataatccaacttctcaccatacgacaacagatcatattcctgaaaagaaatttaaatctgaagctcttctatccacccttacgtcagatgcctctaaggaaaatacactaggttgtcgaaataataattccacagcctcttctaacaatgcctacaatgtgaattcctcccaacctctgggatcctataacattggctcgttatcttcaggaactggtgcaggggcaattaccatggcagctgctcaagcagttcaggctacagctcagatgaaggagggacgaagaacatcaagtttaaaagccagttatgaagcatttaagaataatgactttcagttgggaaaagaattttcaatggccagggaaacagttggctattcatcatcttcggcacttatgacaacattaacacagaatgccagttcatcagcagccgactcacggagtggtcgaaagagcaaaaacaacaacaagtcttcaagccagcagtcatcatcttcctcctcctcttcttccttatcatcgtgttcttcatcatcaactgttgtacaagaaatctctcaacaaacaactgtagtgccagaatctgattcaaatagtcaggttgattggacttacgacccaaatgaacctcgatactgcatttgtaatcaggtatcttatggtgagatggtgggatgtgataaccaagattgccctatagaatggttccattatggctgcgttggattgacagaggcaccaaaaggcaaatggtactgtccacagtgcactgctgcaatgaagagaagaggcagcagacacaaataaaggtggtccttttgtttgatgaagaaataaacttcagctgaagattttatataggactttaaaaagaagagaagagaaagaagaaacaatgcatttccaggcaaccacttaaaggatttacatagacaatcctataagatcttgaacttgaattttatgggttgtattttaataatgtaagtaaattatttatgcactcctggtgtgctatgaatattattccagttagccttggattatttcagtggccaacatatgcagacatttgtactcctcaaccattttctcaaagtaatgggcattctatgatttagacttcaaggaattccaatgatgaagattttaaggaaagtattttatattcaacaggtatattctgctgcatgtactgtactccagagctgttatgtaacactgtatataaatggttgcaaaaaaaaaaaaaagtcagtgcttctaaaaagaatttaagataatggtttttaaaatgcctttataataagctttgtttctttgtgaaactaattcagcaggctgaaggaaatggttcatgtgataatgtgggctggtatcctctagagtacctgggtacataaacagaaactcctgtaggtaaaaagtaatttgtgccattagtctttctatgtttctgcatccagatagagtgcagttcatgagggagggggcgggggactgaaggggaaagggcgttaaagtgatacatttttataccaaatgtgtttatttttttgtgcaagtaatccttaaaattgcaattgtattaggtgttaaaataaagtttttaaaaaatt

SEQ ID NO: 4976 - protein, 418 aa, Homo sapiens; identical to SEQ ID NO: 636

SEQ ID NO: 4977 - DNA, 2960 bp, Homo sapiens
tttttttttttttgccggagtcgagcgggtgctgctagcggaggcgccatattggaggggacaaaactccggcgacagcgagtgacacaaataaacccctggacccccttgttccctcagctctaagggccgcgatgttgtacctagaagactatctggaaatgattgagcagcttcctatggatctgcgggaccgcttcacggaaatgcgcgagatggacctgcaggtgcagaatgcaatggatcaactagaacaaagagtcagtgaattctttatgaatgcaaagaaaaataaacctgagtggagggaagagcaaatggcatccatcaaaaaagactactataaagctttggaagatgcagatgagaaggttcagttggcaaaccagatatatgacttggtagatcgacacttgagaaagctggatcaggaactggctaagtttaaaatggagctggaagctgataatgctggaattacagaaatattagagaggcgatctttggaattagacactccttcacagccagtgaacaatcaccatgctcattcacatactccagtggaaaaaaggaaatataatccaacttctcaccatacgacaacagatcatattcctgaaaagaaatttaaatctgaagctcttctatccacccttacgtcagatgcctctaaggaaaatacactaggttgtcgaaataataattccacagcctcttctaacaatgcctacaatgtgaattcctcccaacctctgggatcctataacattggctcgttatcttcaggaactggtgcaggggcaattaccatggcagctgctcaagcagttcaggctacagctcagatgaaggagggacgaagaacatcaagtttaaaagccagttatgaagcatttaagaataatgactttcagttgggaaaagaattttcaatggccagggaaacagttggctattcatcatcttcggcacttatgacaacattaacacagaatgccagttcatcagcagccgactcacggagtggtcgaaagagcaaaaacaacaacaagtcttcaagccagcagtcatcatcttcctcctcctcttcttccttatcatcgtgttcttcatcatcaactgttgtacaagaaatctctcaacaaacaactgtagtgccagaatctgattcaaatagtcaggttgattggacttacgacccaaatgaacctcgatactgcatttgtaatcaggtatcttatggtgagatggtgggatgtgataaccaagattgccctatagaatggttccattatggctgcgttggattgacagaggcaccaaaaggcaaatggtactgtccacagtgcactgctgcaatgaagagaagaggcagcagacacaaataaaggtggtccttttgtttgatgaagaaataaacttcagctgaagattttatataggactttaaaaagaagagaagagaaagaagaaacaatgcatttccaggcaaccacttaaaggatttacatagacaatcctataagatcttgaacttgaattttatgggttgtattttaataatgtaagtaaattatttatgcactcctggtgtgctatgaatattattccagttagccttggattatttcagtggccaacatatgcagacatttgtactcctcaaccattttctcaaagtaatgggcattctatgatttagacttcaaggaattccaatgatgaagattttaaggaaagtattttatattcaacaggtatattctgctgcatgtactgtactccagagctgttatgtaacactgtatataaatggttgcaaaaaaaaaaaaaagtcagtgcttctaaaaagaatttaagataatggtttttaaaatgcctttataataagctttgtttctttgtgaaactaattcagcaggctgaaggaaatggttcatgtgataatgtgggctggtatcctctagagtacctgggtacataaacagaaactcctgtaggtaaaaagtaatttgtgccattagtctttctatgtttctgcatccagatagagtgcagttcatgagggagggggcgggggactgaaggggaaagggcgttaaagtgatacatttttataccaaatgtgtttatttttttgtgcaagtaatccttaaaattgcaattgtattaggtgttaaaataaagtttttaaaaaattacttgtatttatactttacatacttaataatgaaaatttctgaattccaattaactttcaactttcataatctaaaaagaatcagagacccaggacacagaatactgtgtaatctgtgatgtctttaatgatgtttagagtttgtgatataagaatacaggaaagacatttttaatgtaaatttgaaatgccaatgtatttttttaagaacatcatctggcttttccttcagtctaaaagacatgaaagaagtgtaagtatagcagttaaaacgaaaataatggttatgggtgttttgactggaggcaatgtagccaaatagagtaaagagacccccctggtcgggagctccaaattgagctatttttgattctaccacttactgatatgacagttaattcaaattttgtatcactctgggccttactacaccagggtgatgctgactgcagaatagatcttattctaaggtgctatttaaattataaatttgcatagtggaggttttatttaaagtataatattgagtctggtcgatagaaaaatccttaacttttaagatacttaatatatcatatatattttatattgaaacttactgggtccatcagatttctgctttaattaaaccacttatgagcttcttagaacttattcagataacagtgtaaaatctatgcagtgctacccaaagggtgtgaggtagataggggatttcaaagatctcttccacctttgagatcccatgattctgagc

SEQ ID NO: 4978 - protein, 418 aa, Homo sapiens; identical to SEQ ID NO: 636

SEQ ID NO: 4979 - DNA, 5999 bp, Homo sapiens
tgccggagtcgagcgggtgctgctagcggaggcgccatattggaggggacaaaactccggcgacagcgagtgacacaaataaacccctggacccccttgttccctcagctctaagggccgcgatgttgtacctagaagactatctggaaatgattgagcagcttcctatggatctgcgggaccgcttcacggaaatgcgcgagatggacctgcaggtgcagaatgcaatggatcaactagaacaaagagtcagtgaattctttatgaatgcaaagaaaaataaacctgagtggagggaagagcaaatggcatccatcaaaaaagactactataaagctttggaagatgcagatgagaaggttcagttggcaaaccagatatatgacttggtagatcgacacttgagaaagctggatcaggaactggctaagtttaaaatggagctggaagctgataatgctggaattacagaaatattagagaggcgatctttggaattagacactccttcacagccagtgaacaatcaccatgctcattcacatactccagtggaaaaaaggaaatataatccaacttctcaccatacgacaacagatcatattcctgaaaagaaatttaaatctgaagctcttctatccacccttacgtcagatgcctctaaggaaaatacactaggttgtcgaaataataattccacagcctcttctaacaatgcctacaatgtgaattcctcccaacctctgggatcctataacattggctcgttatcttcaggaactggtgcaggggcaattaccatggcagctgctcaagcagttcaggctacagctcagatgaaggagggacgaagaacatcaagtttaaaagccagttatgaagcatttaagaataatgactttcagttgggaaaagaattttcaatggccagggaaacagttggctattcatcatcttcggcacttatgacaacattaacacagaatgccagttcatcagcagccgactcacggagtggtcgaaagagcaaaaacaacaacaagtcttcaagccagcagtcatcatcttcctcctcctcttcttccttatcatcgtgttcttcatcatcaactgttgtacaagaaatctctcaacaaacaactgtagtgccagaatctgattcaaatagtcaggttgattggacttacgacccaaatgaacctcgatactgcatttgtaatcaggtaaaagtctgttatatctataaaagtataatctgaataaactagaaggaagagaactatttcatttttaagcacttttttaaactcacttaaaatacctttgctttatttgtatacttttctcccccttcttacaaaagtgacatttgctgtaaatactgagtataaagaaaaatgttacccataatcctagccctcagatacaacctgtaactaaacatttttggtataccactaccatatacctcatgtgcacattggctgccttaataaaatacaacagactgggtagcttaaacaacagaaaataattttctcacaggtatgaaggctgggaagtccaagatcaaggtgtccactgactcagttctggaggagggctcccttcctagatggagactgctgccttctcaccgggtcctcacatgatagagggagaaagagtgtgctctggtgtcttttcttataagggcaccagccttgtcagagtaggaccccactctatgacctcatttaacctttaccacctcctcacaggccctgtttccaattatagtcacgttgggggttagggcttcaacatatgattttgagacataagcttgcatttcataacacgtgtctatgcagatttgcacatgcatgtgtgtataagtttgtcagtaggaaccacagtgtatactttcttgttactggcttttttctctaaatcaggtataccgaacatgatttttctttaagatcatatttttaattttcacatagttatctcttatgccatccagtgtagttttcttaaccaatacctagctatagattatattagtggttttaatttgtttgaaattagggataatattacgataggcattttttaaatgtaatccattttatacatctaatttcttggataatcttttagaaataaaattaggctgtaaatatttgacagacaccaaaatatattttctagaaatttattaccaaaaattaataaacataccggtttactaaaccctgtccaacactggatattattttcttttaaaaactaagtaccaatttggtagttttatattatgattgttttaaatacactagtattattgaagttggacattttttgaccatttttgttttttacattatgaatcgactcctaatggtgtcggctgatttttctattgtttttgttatgtactctaaatatttgcttgatttagttttttaaaaataattctaaaattttaattttatgtagttatgactgttaatttttttttatgaagcaagccatggattatatacttagaagggctttctctttggctcttctttctacaaaaaattgtcttgtataatattttctcctagtttttatatggttttgtctagttctttgcatgcttcagtttcttcacatttaagacttagtctatcagcagattattgtgtctaacagtatgagttgccagtctgatttttaaaaattttaacaatttgttagctgttccactatcacccgataaacatttttcagtacaaatgatagaaaagcatatcctgtatcctgacaacaaaagtagattacttgcaaaagaacaaaatcagactgaacctagagttttcctctgtaacactaaaaaactagaaggtgatggaatatgtctgtagagctttcagggaaaaattaagagcccccaaaaacttgatattcagagaagttatttctctgcataggaccatgtaaatatattttcactcatgcagagaatcagaagatatgccatctagttaatcctgtctgaaaaattattcaatccactgagaacttcagtgaactcaagaattagcaagttatgccctaaagtgctggtgatgaagagcaaaagaaaaatgagaaaggacataaaatagataagtttagaagtttcaaggaaggagactattaattgcaaaaatataaatgacctaatgtgacccaagaagtaaaaactttcagtaagtaaataatcaagaaaggaacttaaaatttttacaataagaactacccagaaagatgactccttcatccgggtgatttatatgtcaagttcttccagacttctgaagggcagataattcctgtgcatttcttcccacccttgccccaccctgcccaaaagagtatttcaggaaaaaattattataccttgattctcaatgtaattgtatattcagtgtatttccctttattttccagcagtatcatacataaacagttaattggtatctaggtgtttgttacatagtcataataaagacatttaattttttttaactaggtatcttatggtgagatggtgggatgtgataaccaagatgtaagtattacatttttctatttaggaatgaaaaaaatcacaggttgttattacttgaatatttgtcttatttgctgtatggtttggtctaagaaaacaggtttgcaggtatattagttatattatgctaatgctagaatattcctcttcaaaatagggtagtgtcccttaatgtgttccctattttaatttttaaagctaattttatggttttatgtgcagattgtctcagaagtgttatgttgtatgaaaattataaataccctcctttccctttactaaaaaatactgtgtttactagaatccagttcatttatcacattgaagaaatggaattttaaaacaattcattctttcaggctgcaccgtgctaaagtgaagggtgggataattgaggatctaatgtgagattatcttcctctcatgagtataatattttttcctgtactctgcaggtgtcagctgataagagccacccctgatctaaaaagtaaaggaaatttgaaaggaaggaattcttggtttttaggagacttaattttagttagagatacgttttttattcaatactgagaatattgttgtctagtaattttgactccctccttatttagtagtgacaggatcctaagattaacaagagttttaaatttgtaaaacaatctgaagattgagggagctggctaggtgcattaaaatgtgtacttttcctagacctgatagggttacagcaacatgctcacgtagattgggacagagcctccttctgtttccctgtctagaatcccttgtaggctgtttgtggttgttgcaaaaacaatattgcccaaccatttcaagaacatcactgtaaactcttctggggcagttagtgaaaatgatgaatgagatttctatgagtaccagcatcatgcttctctgattcttcttattcccagttgtgctcttctgagtgctaagactttcatgaaagagttttctgcttaatatgtttcaaagaggaataatttttctctacatttcaaggaatagaaacacccacgtaggaaatgcagggcataagacataaattaatgtctttaattacaatcagcttattctactttatgagacagcaaataaggctgactattaaataaaatcttaagttatatttaccttctacatagaagattcatcccacttctttttgcccttgaaagctgaaaactagtgaattttcattcattaggatgaggggactagattacatggacctcaggattcttgaagatgcataatttttctgtgccttcatttcctcattcctgaagcttatcatttagtctaaatgatgtctaaataatctagatctaaaaattctgatgtcacacatctaattattgttaaattaaatggattattcagtctcctgagcatattttaatatactctcttgtcttcagaagtactgaaaacttgttttttgcaattttgctttctagtgccctatagaatggttccattatggctgcgttggattgacagaggcaccaaaaggcaaatggtactgtccacagtgcactgctgcaatgaagagaagaggcagcagacacaaataaaggtggtccttttgtttgatgaagaaataaacttcagctgaagattttatataggactttaaaaagaagagaagagaaagaagaaacaatgcatttccaggcaaccacttaaaggatttacatagacaatcctataagatcttgaacttgaattttatgggttgtattttaataatgtaagtaaattatttatgcactcctggtgtgctatgaatattattccagttagccttggattatttcagtggccaacatatgcagacatttgtactcctcaaccattttctcaaagtaatgggcattctatgatttagacttcaaggaattccaatgatgaagattttaaggaaagtattttatattcaacaggtatattctgctgcatgtactgtactccagagctgttatgtaacactgtatataaatggttgcaaaaaaaaaaaaaagtcagtgcttctaaaaagaatttaagataatggtttttaaaatgcctttataataagctttgtttctttgtgaaactaattcagcaggctgaaggaaatggttcatgtgataatgtgggctggtatcctctagagtacctgggtacataaacagaaactcctgtaggtaaaaagtaatttgtgccattagtctttctatgtttctgcatccagatagagtgcagttcatgagggagggggcgggggactgaaggggaaagggcgttaaagtgatacatttttataccaaatgtgtttatttttttgtgcaagtaatccttaaaattgcaattgtattaggtgttaaaataaagtttttaaaaaatt

SEQ ID NO: 4980 - protein, 378 aa, Homo sapiens
MLYLEDYLEMIEQLPMDLRDRFTEMREMDLQVQNAMDQLEQRVSEFFMNAKKNKPEWREEQMASIKKDYYKALEDADEKVQLANQIYDLVDRHLRKLDQELAKFKMELEADNAGITEILERRSLELDTPSQPVNNHHAHSHTPVEKRKYNPTSHHTTTDHIPEKKFKSEALLSTLTSDASKENTLGCRNNNSTASSNNAYNVNSSQPLGSYNIGSLSSGTGAGAITMAAAQAVQATAQMKEGRRTSSLKASYEAFKNNDFQLGKEFSMARETVGYSSSSALMTTLTQNASSSAADSRSGRKSKNNNKSSSQQSSSSSSSSSLSSCSSSSTVVQEISQQTTVVPESDSNSQVDWTYDPNEPRYCICNQVKVCYIYKSII

SEQ ID NO: 4981 - DNA, 1744 bp, Homo sapiens
gccggagtcgagcgggtgctgctagcggaggcgccatattggaggggacaaaactccggcgacagcgagtgacacaaataaacccctggacccccttgttccctcagctctaagggccgcgatgttgtacctagaagactatctggaaatgattgagcagcttcctatggatctgcgggaccgcttcacggaaatgcgcgagatggacctgcaggtgcagaatgcaatggatcaactagaacaaagagtcagtgaattctttatgaatgcaaagaaaaataaacctgagtggagggaagagcaaatggcatccatcaaaaaagactactataaagctttggaagatgcagatgagaaggttcagttggcaaaccagatatatgacttggtaagtaaaagtaatgtgcatactgtgccataagtacttgaataacagattatatcttaaattgtattggcttaaatgtagtaggaagaagcaactaaaactgaagtattgctctcttgatcacatctaatttgacatttcagtgtccattttatggtttctttgtggaaaagtcagagtggttagttaatgtggtgagaactgtacattttagcaagtctatacggcggtaaggtggtttctgatgttagatattttttaaacaagaattaatgtttaactttattttactaatccttgtcttcttaaggtagtgtgtttacttgccttatacatcattttgagattgtttctgtggtaaaatacacctaagaagactgctttgacaagagttcttggtagtctgattaaaatgaagaagaatcatttgaatcagtgtttatgtgagtgatgttaaaagatcgtatgtaacagctgtgtcagttgtttaagcaatacaagatgacaaactttaaacaagattctttttttgcagcagcacttctaaaagattgaaaacaccaagaagatagatagaatattcactatttctcatattgatgcaattgtggtgctctttttcatttgaaacatcttctcctaaaatatacactttaagaaatagtcatttctgtttttgcattaaagtaaattaaagcagaaaacacatgctcacttttggctaacttcagtgtatagatttcatacttatgttgtctttcctgggtacagatttattactgaacaagtacgtgtaagtaaaatgtcattggtgagcaggacacaagataaaaggtgaacaccacatatggtgtgaattgtaaatgcttataccacaaacttgaaaatgtgtcatgtagagccatggaaaatgtctagttgtttttatgtagtacacacattttaatggtgctaacaacctgggctcttttgttcatagagttattctgaaaaaaatttcataaaagacactgcctaaagataggtagaataggctgtagcttgatttactgtggaataaaaaccaaaaaaaaaaaggtcttaattgtttcagtctttaattatgtctataaacttagaaaaaggcatttacatttgaatctagactaatttgtttagtaacattcttcctcatattcaatgactgtatgtatcagtccttatttagagactgcctgctttttaattcatatagctctttggttctattctttgttttgtttattattttgttgttttattgcttgttagacctttactaaagatattttgtgtatttagaaaaaatataacataaatatatgctttttaaatatg

SEQ ID NO: 4982 - protein, 99 aa, Homo sapiens
MLYLEDYLEMIEQLPMDLRDRFTEMREMDLQVQNAMDQLEQRVSEFFMNAKKNKPEWREEQMASIKKDYYKALEDADEKVQLANQIYDLVSKSNVHTVP

SEQ ID NO: 4983 - DNA, 2850 bp, Homo sapiens
gccggagtcgagcgggtgctgctagcggaggcgccatattggaggggacaaaactccggcgacagcgagtgacacaaataaacccctggacccccttgttccctcagctctaagggccgcgatgttgtacctagaagactatctggaaatgattgagcagcttcctatggatctgcgggaccgcttcacggaaatgcgcgagatggacctgcaggtgcagaatgcaatggatcaactagaacaaagagtcagtgaattctttatgaatgcaaagaaaaataaacctgagtggagggaagagcaaatggcatccatcaaaaaagactactataaagctttggaagatgcagatgagaaggttcagttggcaaaccagatatatgacttggatctttggaattagacactccttcacagccagtgaacaatcaccatgctcattcacatactccagtggaaaaaaggaaatataatccaacttctcaccatacgacaacagatcatattcctgaaaagaaatttaaatctgaagctcttctatccacccttacgtcagatgcctctaaggaaaatacactaggttgtcgaaataataattccacagcctcttctaacaatgcctacaatgtgaattcctcccaacctctgggatcctataacattggctcgttatcttcaggaactggtgcaggggcaattaccatggcagctgctcaagcagttcaggctacagctcagatgaaggagggacgaagaacatcaagtttaaaagccagttatgaagcatttaagaataatgactttcagttgggaaaagaattttcaatggccagggaaacagttggctattcatcatcttcggcacttatgacaacattaacacagaatgccagttcatcagcagccgactcacggagtggtcgaaagagcaaaaacaacaacaagtcttcaagccagcagtcatcatcttcctcctcctcttcttccttatcatcgtgttcttcatcatcaactgttgtacaagaaatctctcaacaaacaactgtagtgccagaatctgattcaaatagtcaggttgattggacttacgacccaaatgaacctcgatactgcatttgtaatcaggtatcttatggtgagatggtgggatgtgataaccaagattgccctatagaatggttccattatggctgcgttggattgacagaggcaccaaaaggcaaatggtactgtccacagtgcactgctgcaatgaagagaagaggcagcagacacaaataaaggtggtccttttgtttgatgaagaaataaacttcagctgaagattttatataggactttaaaaagaagagaagagaaagaagaaacaatgcatttccaggcaaccacttaaaggatttacatagacaatcctataagatcttgaacttgaattttatgggttgtattttaataatgtaagtaaattatttatgcactcctggtgtgctatgaatattattccagttagccttggattatttcagtggccaacatatgcagacatttgtactcctcaaccattttctcaaagtaatgggcattctatgatttagacttcaaggaattccaatgatgaagattttaaggaaagtattttatattcaacaggtatattctgctgcatgtactgtactccagagctgttatgtaacactgtatataaatggttgcaaaaaaaaaaaaaagtcagtgcttctaaaaagaatttaagataatggtttttaaaatgcctttataataagctttgtttctttgtgaaactaattcagcaggctgaaggaaatggttcatgtgataatgtgggctggtatcctctagagtacctgggtacataaacagaaactcctgtaggtaaaaagtaatttgtgccattagtctttctatgtttctgcatccagatagagtgcagttcatgagggagggggcgggggactgaaggggaaagggcgttaaagtgatacatttttataccaaatgtgtttatttttttgtgcaagtaatccttaaaattgcaattgtattaggtgttaaaataaagtttttaaaaaattacttgtatttatactttacatacttaataatgaaaatttctgaattccaattaactttcaactttcataatctaaaaagaatcagagacccaggacacagaatactgtgtaatctgtgatgtctttaatgatgtttagagtttgtgatataagaatacaggaaagacatttttaatgtaaatttgaaatgccaatgtatttttttaagaacatcatctggcttttccttcagtctaaaagacatgaaagaagtgtaagtatagcagttaaaacgaaaataatggttatgggtgttttgactggaggcaatgtagccaaatagagtaaagagacccccctggtcgggagctccaaattgagctatttttgattctaccacttactgatatgacagttaattcaaattttgtatcactctgggccttactacaccagggtgatgctgactgcagaatagatcttattctaaggtgctatttaaattataaatttgcatagtggaggttttatttaaagtataatattgagtctggtcgatagaaaaatccttaacttttaagatacttaatatatcatatatattttatattgaaacttactgggtccatcagatttctgctttaattaaaccacttatgagcttcttagaacttattcagataacagtgtaaaatctatgcagtgctacccaaagggtgtgaggtagataggggatttcaaagatctcttccacctttgagatcccatgattctgagc

SEQ ID NO: 4984 - protein, 192 aa, Homo sapiens; identical to SEQ ID NO: 4974

SEQ ID NO: 4985 - DNA, 5319 bp, Homo sapiens
gcgatgccgaggtcctctgctcccgccgggcgtgcagcgggcgcgcgcgcgtgtgtttatgtgtctgtgtgcgtgtgtgtgtgtgtctctctctgtgtgtgtgtgagatgaattggagtcatacgactgggtgtttccttccgagtggttttcatcagcaatccattaggaaatcatggaaactttttttttcctggctaaaaggatgaaaactgagtcatccacttttgactgtcatccatggaagagctcttattaaaagcctcagactttcgggacctatgattctttggcacaaccttttggaaaattcttaagcagggatgaagcaaacttgattggagttggggaaaaagaagacagattagtatttttcatgctgacaaaaaatagctgctatgacttttcccgcaacgtggacaggggccaagtgaagctgaactggtcatggtctgtcgcccagtgttcccttgtcgtcggcgattttgcccccgacccttcttggtgggcttagtggtggcaatctgtctcttctaccagactctgaccctccgagggtcgaggaagctcacagccgctgcccctggggctgtcccacacacatccactgaaacccaggcaagcagatgcaagaaaggattctctcaggacaaacagtgcttccttctctctggtaatgcccaggaaaccagaaaggtcaaagaatcaatggagacacactttggcagccatggccgaagggccatactctacaggcctcctttctacagcaaaacagagcttcagctacaccagcacattctgactcaacatggctatacggttgtcatcgctgaagaaaggctcaatgctggcctagggccggggctactagaacaaggtgatctgggctcttgggatctgctcatttgcctgtcttctaagaaagcagaaggaacaccctgtatatccaaggaagtcatgtgccagttaggtttacatcaaaaggcaaacagattaccagaaatacagcagccactttgcagaaaggaaggattatgtcaaatagttagaagattcccagaactgcaacttccagtgagtccctctgtgtgtctggatcagggaatgcaattaaagccgagtacttcgagtcaccttttaaaaacagtgaagccacgtgtgtggaaaccaggggactggagtcgtgaacagctgaatgaaacgacagtccttgctccacatgaaacaatctttcgagccgaagatctatctgtgattcttaaagcgtatgtgttggtgacgtccttaacccctttgcgtgcattcattcattcgacgggcacagtttggaatccaccaaagaaaaaacgcttcactgtcaagctgcaaacattttttgagacattcctgagagccagttcacctcaacaggcttttgacattatgaaggaagcaattggcaaactactgctagcggctgaagtattcagtgaaacatctactctgggaccaaagaccttccatagatgcagattctgctttcaacttctaacttttgatattggttatggcagtttcatgtaccctgtagtgctccaggtacacgagcatttaaattttcaagattatgataatatggattttgaggaccaaaatacagaagaattccttttaaatgacactttcaattttctcttccctaatgaatcatcactttccatattttctgagatatttcagagactttatagatcagatgttttcaagggtgaaaactatcaaaaggaactaaatcagtgtctgtccttagaagaaattaactcaattatgactttcataaaggaacttggaagtctgggacaattccaactgctcttcccatctactactcctgggattcagtcactgatgcatgaattttatgatgtggcaaatcctgtgggaaatcctggctcagtcctgacccaatactggtctcttttaaatgtatttgaacaatttcagttcatgaataaaaagacacagccacatccactggaatggaattctttcacagaagataagaacattgaaaaaccacaagtgccatttgatgcaatagaaaataaaaaagctgcagttccacaaattaaaaatgaaaataaagaaatacattgcagtgatgatgaaaacacaccatgtcatatcaagcagatcttcacacatccacatttggaactaaatcctgactttcatccaaagatcaaagattattactgtgaagtcccatttgatgtggtaacagtgacaattggagtggaaactcctaagtgtctgtgcaaggtgcacctgtacgagcaggcagggccaagctttgccagctaccctctgggcttaggaatgaacaaaatctcaatatttgttgtggatgaatctccagcacacggtgagactctgatcacgtacaaactcaccatctatagagaagaccgcccaagtctgcccttgtttgaggccttcacagcatgtggttttgtgcaggattgtggtttgctgattcatccagaggaaacctgtgggttacagcctatttcttctgactacattgaagccattttacagtctgaactaaaaagatgtccatctggggacatgaaaggccagtggattgtgccttgccttagttgttcggacaacaggacgtgtgactggagagaaataacctggcagccccacaactgccaatatggtgtcctaactaagcctcaactccagcagtgcctgggaggaaggaagattctgttcattggagattcaaccaacagagggatcatgtactatcttattgaaaggctgaatgaaacgttgcaggaatggcagaaagtacatggcactaaattctatcacaacgtcaatggtgggaagactttgatcagttattcctactatccccagttctggataagcccttcattgagaccaacatttgaaaatgcacttgaacacctcttgcaaagatcacgtcccctagagaatactggccagactgtattggttgttggtggtgttcagtggcttaattccaatcacctgcaaattattcacaaagttttgaagagggaaaatttactcaatatcctagtgatcatcaaaactttgggaattggatttcatctgccagtggatggagtacatttcttaacacagagtgaagtacagaacttatggaaagaaaatttgattattctggatactgcaaaaaaacatggctatgaagtagttgacacattcactataacaatggggcgttacaaagagtttctacaggggaagtgtggatgtcatttccatgaggtagtgaaatcaaagttatccaaagaatataactttattaaaatgaaaagatcaagaaatcatatcatgggaagatatttcagcaatcaaagcaaactacaacaaggcactgtaacaaattttcgatcgccatatcatgtcagaggtccaataaatcaggtttgttctgaaatccttctcagcaggatgtgtgcaaataaaaggactatgtaggctccctgcaggagagctgaatctggagctggagacgagctagtcacccggacaatggtctaggagccaagcgctgcacatcgcacacatttgggatcgaccacacacacttgtgcacaccagcacatgcatgcacaccagtacacacacagttaaataatgataacacttcttacagctttatgaattcaagatgtgaccttgaacaccagtccatttcacagtgaaagatatacctagagaaacgttacttgaagcataattattaaccagaaccactgtgggccaggtatggcattgtgataataaagagaaatatagacacttaaaattatgtgaaaaaaaggataatgctctttcatgttgtcttaccatatctataggtacatcaatattgaaaaggagaaaaaccaatgacattccactggcaagtagaagttgtcctttcattctttaccaggagaaaatgtgatgtttatgatggcttaggctttgtgaatctaatgcttatgaaaaacatttcttcctatactttttaaattttattactgaaaggaaaagaacaggaatgttccacaagggaatttgaagagattctgtgagagagatatgaaatattttatagttaaaacaccaatatattcaactttacacttcttgtgtttttcataaacattccctcttgtcttatctgtgtacttcgatgggtaactgcagtctgaattaatgaaatatgtaattttaaagtaagtaacaaaatgtagttcctcatgtattactgtactatgtttcattgatgatattacttaaatcttgtgtttgccattacagccctatgtaacttaaaattacaattatattttatgtaaatattttgcaaaggactatgcattctgaaatgcataggtgctttttcccaccaagcatttgcatatgtccacaaatagtattatgttactagtatctatattttgattttcctgagcaactgtatcaaatccaaatttagattagacaaaaaattattattttaattaaactgtggcatacatataatacatacctaattatagtagtgagaactatttcttttatctctttaggttcaaaatggtgaatttctttattatatgaatgctttgttgtgagataacatcacactgttacaatggattttagaggtttgtcttttttgggtggggtgggaagctgagagggttaattcaatacatggctgaaattaccaaatgtataaatacctcattttcactaccatacaagaaaaaaacacctattttgattgatcagttcttttgtatgaatatccacctcctttaaatactctatttttatatatatttttatatgaagataaacatgaatttatatttaactgtcttaaattatatttacataaatgcaaatatcacttgatataaacaatacaaatctgcatcttacagatgataatttttttagaagaatgatacagaattaactttaaaaataaaacttttctaatatacacttaaatgcaaacatcatttttaaattttcagtgatttttttaatgacataaaacgttaccaatgtgtgcagcctctccatcatgttttaacatactgtatactctatagcagtattacagtcagtatttcatataattttctttagacctaactgttaccatctgactgaggttactctggtatttatctcttcgctgctgaaataataatggattttagaaacaattgtaataatatcattaataaatgtcttactagtaat

SEQ ID NO: 4986 - protein, 1026 aa, Homo sapiens
MVCRPVFPCRRRFCPRPFLVGLVVAICLFYQTLTLRGSRKLTAAAPGAVPHTSTETQASRCKKGFSQDKQCFLLSGNAQETRKVKESMETHFGSHGRRAILYRPPFYSKTELQLHQHILTQHGYTVVIAEERLNAGLGPGLLEQGDLGSWDLLICLSSKKAEGTPCISKEVMCQLGLHQKANRLPEIQQPLCRKEGLCQIVRRFPELQLPVSPSVCLDQGMQLKPSTSSHLLKTVKPRVWKPGDWSREQLNETTVLAPHETIFRAEDLSVILKAYVLVTSLTPLRAFIHSTGTVWNPPKKKRFTVKLQTFFETFLRASSPQQAFDIMKEAIGKLLLAAEVFSETSTLGPKTFHRCRFCFQLLTFDIGYGSFMYPVVLQVHEHLNFQDYDNMDFEDQNTEEFLLNDTFNFLFPNESSLSIFSEIFQRLYRSDVFKGENYQKELNQCLSLEEINSIMTFIKELGSLGQFQLLFPSTTPGIQSLMHEFYDVANPVGNPGSVLTQYWSLLNVFEQFQFMNKKTQPHPLEWNSFTEDKNIEKPQVPFDAIENKKAAVPQIKNENKEIHCSDDENTPCHIKQIFTHPHLELNPDFHPKIKDYYCEVPFDVVTVTIGVETPKCLCKVHLYEQAGPSFASYPLGLGMNKISIFVVDESPAHGETLITYKLTIYREDRPSLPLFEAFTACGFVQDCGLLIHPEETCGLQPISSDYIEAILQSELKRCPSGDMKGQWIVPCLSCSDNRTCDWREITWQPHNCQYGVLTKPQLQQCLGGRKILFIGDSTNRGIMYYLIERLNETLQEWQKVHGTKFYHNVNGGKTLISYSYYPQFWISPSLRPTFENALEHLLQRSRPLENTGQTVLVVGGVQWLNSNHLQIIHKVLKRENLLNILVIIKTLGIGFHLPVDGVHFLTQSEVQNLWKENLIILDTAKKHGYEVVDTFTITMGRYKEFLQGKCGCHFHEVVKSKLSKEYNFIKMKRSRNHIMGRYFSNQSKLQQGTVTNFRSPYHVRGPINQVCSEILLSRMCANKRTM

SEQ ID NO: 4987 - DNA, 2596 bp, Homo sapiens
gtgtgtctctctctgtgtgtgtgtgagatgaattggagtcatacgactgggtgtttccttccgagtggttttcatcagcaatccattaggaaatcatggaaactttttttttcctggctaaaaggatgaaaactgagtaagtacatagaactttgaacttgagacggaatgaaacaaattcaagcaaaaaccctgacagtaaccatgtccattcaaattgcgtatgccctttttatgttaaaagccgtgaatacttacaggacagtgggaatttaaaactaaatgaagggaagcatacaaaaggctgaaagcaagactgctttaaaaccggaggaaaattgaggaactgctaaggcaacctggcctgagttcagctgtgcaacaggcactttgggttttaatcttttgcgttcttcaatgctgttttcagactccagatatactttggtattgttttctctcttcctgcaaagctgaggcagagtcggactcctttactgtgagttgaaagatgtgagaataaggcattgctggaagcaacagtttggcagcctggggtacactcaggttattcgttacaactattattatttgatgtctttttttaaactcaggtcatccacttttgactgtcatccatggaagagctcttattaaaagcctcagactttcgggacctatgattctttggcacaaccttttggaaaattcttaagcagggatgaagcaaacttgattggagttggggaaaaagaagacagattagtatttttcatgctgacaaaaaatagctgctatgacttttcccgcaacgtggacaggggccaagtgaagctgaactggtcatggtctgtcgcccagtgttcccttgtcgtcggcgattttgcccccgacccttcttggtgggcttagtggtggcaatctgtctcttctaccagactctgaccctccgagggtcgaggaagctcacagccgctgcccctggggctgtcccacacacatccactgaaacccaggcaagcagatgcaagaaaggattctctcaggacaaacagtgcttccttctctctggtaatgcccaggaaaccagaaaggtcaaagaatcaatggagacacactttggcagccatggccgaagggccatactctacaggcctcctttctacagcaaaacagagcttcagctacaccagcacattctgactcaacatggctatacggttgtcatcgctgaagaaaggctcaatgctggcctagggccggggctactagaacaaggtgatctgggctcttgggatctgctcatttgcctgtcttctaagaaagcagaaggaacaccctgtatatccaaggaagtcatgtgccagttaggtttacatcaaaagctcaggcggcgggaggagcggcagcggccaggcagcccagcttcgcgaaggctctcggtacgatgaggcctgcaggcacctggcacgcaccctcctcgtcaccaggatgcccaagaagaaggtcatgaagggaccatcaaggaagagcccaagaggagattggcgcagttgtcagctaaacctgctcctgcaaaagtggaagcgaagctgaaaaaggcagcagcgaaggataaatcttcaggcaaaaatgtgcaaacaaaagggaaaaggagagcaaagggaaaacaggccaaagtggcaaaccaagaaactaaagaagatttacctgcagaaaacggggaaatgaaaactgaggagagtccagcctctgatgaagcaggagagaaagaaaccaagtctgattaatacagtataccatgtcttaccagcagtccctgactcccctcttgtacaatccagaggaatatttttaccaattattttgtaaatgcaagttttttagtagctctagaaacatttttaagaaggagggaatcccacctcctcccattttttaaatgtaaatgccttttttttttttagaggtaaaatcatttgctggttgtttatttttttggcacaaccagaaaatagtgtgggatattgaattatgggaggctttgactgtctcgggtgtcagcttaacattccatagatgggggttagtttttatatcctataaaacaaagcatattaaatggaaatatgaagtcagtcctgcatttaatgtcttgaacattttaaattacttctatgcccttgctgttttttagtagaattgttttccaaagaaaaccactccttgatcctggcttctccctgtcagaattgtgtgcactctgtaagatctgtggttgtggtagtcctgttttcctaataacgttgttatgctgtgaaagattaaaaatttgaatatgtagtgtatatgctattcagttgtgaattggtgaaatgtatgtaacagcttatcaacatgtgaagatattgatagccccttaaggaaaatttgcttccaaattttaagctggaaagtcgctggaataactttaaaaaagaattacaatacgtggctttttagattttcggtatgtatgttaagaattgtgtacaagtttaagtgtctgtactgatccacatccaataaaatctcaattatgaaagaaaaaaaaaaa

SEQ ID NO: 4988 - protein, 201 aa, Homo sapiens
MVCRPVFPCRRRFCPRPFLVGLVVAICLFYQTLTLRGSRKLTAAAPGAVPHTSTETQASRCKKGFSQDKQCFLLSGNAQETRKVKESMETHFGSHGRRAILYRPPFYSKTELQLHQHILTQHGYTVVIAEERLNAGLGPGLLEQGDLGSWDLLICLSSKKAEGTPCISKEVMCQLGLHQKLRRREERQRPGSPASRRLSVR

SEQ ID NO: 4989 - DNA, 2188 bp, Homo sapiens
aattgaatcatgggtgcggtttcccccatcctattctcgtggtagtgagtaagtctcacgagatctgatggttttataagggattttccctttcacttggccctcattcgctcctgcctgccaccatgtaaggcaaacagattaccagaaatacagcagccactttgcagaaaggaaggattatgtcaaatagttagaagattcccagaactgcaacttccagtgagtccctctgtgtgtctggatcagggaatgcaattaaagccgagtacttcgagtcaccttttaaaaacagtgaagccacgtgtgtggaaaccaggggactggagtcgtgaacagctgaatgaaacgacagtccttgctccacatgaaacaatctttcgagccgaagatctatctgtgattcttaaagcgtatgtgttggtgacgtccttaacccctttgcgtgcattcattcattcgacgggcacagtttggaatccaccaaagaaaaaacgcttcactgtcaagctgcaaacattttttgagacattcctgagagccagttcacctcaacaggcttttgacattatgaaggaagcaattggcaaactactgctagcggctgaagtattcagtgaaacatctactctgggaccaaagaccttccatagatgcagattctgctttcaacttctaacttttgatattggttatggcagtttcatgtaccctgtagtgctccaggtacacgagcatttaaattttcaagattatgataatatggattttgaggaccaaaatacagaagaattccttttaaatgacactttcaattttctcttccctaatgaatcatcactttccatattttctgagatatttcagagactttatagatcagatgttttcaagggtgaaaactatcaaaaggaactaaatcagtgtctgtccttagaagaaattaactcaattatgactttcataaaggaacttggaagtctgggacaattccaactgctcttcccatctactactcctgggattcagtcactgatgcatgaattttatgatgtggcaaatcctgtgggaaatcctggctcagtcctgacccaatactggtctcttttaaatgtatttgaacaatttcagttcatgaataaaaagacacagccacatccactggaatggaattctttcacagaagataagaacattgaaaaaccacaagtgccatttgatgcaatagaaaataaaaaagctgcagttccacaaattaaaaatgaaaataaagaaatacattgcagtgatgatgaaaacacaccatgtcatatcaagcagatcttcacacatccacatttggaactaaatcctgactttcatccaaagatcaaagattattactgtgaagtcccatttgatgtggtaacagtgacaattggagtggaaactcctaagtgtctgtgcaaggtgcacctgtacgagcaggcagggccaagctttgccagctaccctctgggcttaggaatgaacaaaatctcaatatttgttgtggatgaatctccagcacacggtgagactctgatcacgtacaaactcaccatctatagagaagaccgcccaagtctgcccttgtttgaggccttcacagcatgtggttttgtgcaggattgtggtttgctgattcatccagaggaaacctgtgggttacagcctatttcttctgactacattgaagccattttacagtctgaactaaaaagatgtccatctggggacatgaaaggccagtggattgtgccttgccttagttgttcggacaacaggacgtgtgactggagagaaataacctggcagccccacaactgccaatatggtgtcctaactaagcctcaactccagcagtgcctgggaggaaggaagttgggtgtcgatgtccagagagttcctagaagccgtaattgaagacacaatccagtcatcctgggaccctaaatgacctccctgccccacccctgcacataaacctgacttgaatcacctggactatttttctgagagagtaataaactttaattgggtttgacctattccaagttttttgggctatctgttacagtgcttagcttatctcacctaatacagggactatgcaaccaagaaactggaaataaaaacaaagataattaaaccattttataataagcct

SEQ ID NO: 4990 - protein, 563 aa, Homo sapiens
MQLKPSTSSHLLKTVKPRVWKPGDWSREQLNETTVLAPHETIFRAEDLSVILKAYVLVTSLTPLRAFIHSTGTVWNPPKKKRFTVKLQTFFETFLRASSPQQAFDIMKEAIGKLLLAAEVFSETSTLGPKTFHRCRFCFQLLTFDIGYGSFMYPVVLQVHEHLNFQDYDNMDFEDQNTEEFLLNDTFNFLFPNESSLSIFSEIFQRLYRSDVFKGENYQKELNQCLSLEEINSIMTFIKELGSLGQFQLLFPSTTPGIQSLMHEFYDVANPVGNPGSVLTQYWSLLNVFEQFQFMNKKTQPHPLEWNSFTEDKNIEKPQVPFDAIENKKAAVPQIKNENKEIHCSDDENTPCHIKQIFTHPHLELNPDFHPKIKDYYCEVPFDVVTVTIGVETPKCLCKVHLYEQAGPSFASYPLGLGMNKISIFVVDESPAHGETLITYKLTIYREDRPSLPLFEAFTACGFVQDCGLLIHPEETCGLQPISSDYIEAILQSELKRCPSGDMKGQWIVPCLSCSDNRTCDWREITWQPHNCQYGVLTKPQLQQCLGGRKLGVDVQRVPRSRN

SEQ ID NO: 4991 - DNA, 1126 bp, Homo sapiens
gtacatttcaacccaagtcttttagtattcgttcacctttcatttgaggagaagctaagtgctgactgccagaggatggaataggaagacaatgaactgcaacttccagtgagtccctctgtgtgtctggatcagggaatgcaattaaagccgagtacttcgagtcaccttttaaaaacagtgaagccacgtgtgtggaaaccaggggactggagtcgtgaacagctgaatgaaacgacagtccttgctccacatgaaacaatctttcgagccgaagatctatctgtgattcttaaagcgtatgtgttggtgacgtccttaacccctttgcgtgcattcattcattcgacgggcacagtttggaatccaccaaagaaaaaacgcttcactgtcaagctgcaaacattttttgagacattcctgagagccagttcacctcaacaggcttttgacattatgaaggaagcaattggcaaactactgctagcggctgaagtattcagtgaaacatctactctgggaccaaagaccttccatagatgcagattctgctttcaacttctaacttttgatattggttatggcagtttcatgtaccctgtagtgctccaggtacacgagcatttaaattttcaagattatgataatatggattttgaggaccaaaatacagaagaattccttttaaatgacactttcaattttctcttccctaatgaatcatcactttccatattttctgagatatttcagagactttatagatcagatgttttcaagggtgaaaactatcaaaaggaactaaatcagtgtctgtccttagaagaaattaactcaattatgactttcataaaggaacttggaagtctgggacaattccaactgctcttcccatctactactcctgggattcagtcactgatgcatgaattttatgatgtggcaaatcctgtgggaaatcctggctcagtcctgacccaatactggtctcttttaaatgtatttgaacaatttcagttcatgaataaaaagacacagccacatccactggaatggaattctttcacagaagataagaacattgaaaaaccacaagtgccatttgatgcaatagaaaataaaaaag

SEQ ID NO: 4992 - protein, 328 aa, Homo sapiens
MQLKPSTSSHLLKTVKPRVWKPGDWSREQLNETTVLAPHETIFRAEDLSVILKAYVLVTSLTPLRAFIHSTGTVWNPPKKKRFTVKLQTFFETFLRASSPQQAFDIMKEAIGKLLLAAEVFSETSTLGPKTFHRCRFCFQLLTFDIGYGSFMYPVVLQVHEHLNFQDYDNMDFEDQNTEEFLLNDTFNFLFPNESSLSIFSEIFQRLYRSDVFKGENYQKELNQCLSLEEINSIMTFIKELGSLGQFQLLFPSTTPGIQSLMHEFYDVANPVGNPGSVLTQYWSLLNVFEQFQFMNKKTQPHPLEWNSFTEDKNIEKPQVPFDAIENK

SEQ ID NO: 4993 - DNA, 1476 bp, Homo sapiens
catttgaggagaagctaagtgctgactgccagaggatggaataggaagacaatgaactgcaacttccagtacatcaatattgaaaaggagaaaaaccaatgacattccactggcaagtagaagttgtcctttcattctttaccaggagaaaatgtgatgtttatgatggcttaggctttgtgaatctaatgcttatgaaaaacatttcttcctatactttttaaattttattactgaaaggaaaagaacaggaatgttccacaagggaatttgaagagattctgtgagagagatatgaaatattttatagttaaaacaccaatatattcaactttacacttcttgtgtttttcataaacattccctcttgtcttatctgtgtacttcgatgggtaactgcagtctgaattaatgaaatatgtaattttaaagtaagtaacaaaatgtagttcctcatgtattactgtactatgtttcattgatgatattacttaaatcttgtgtttgccattacagccctatgtaacttaaaattacaattatattttatgtaaatattttgcaaaggactatgcattctgaaatgcataggtgctttttcccaccaagcatttgcatatgtccacaaatagtattatgttactagtatctatattttgattttcctgagcaactgtatcaaatccaaatttagattagacaaaaaattattattttaattaaactgtggcatacatataatacatacctaattatagtagtgagaactatttcttttatctctttaggttcaaaatggtgaatttctttattatatgaatgctttgttgtgagataacatcacactgttacaatggattttagaggtttgtcttttttgggtggggtgggaagctgagagggttaattcaatacatggctgaaattaccaaatgtataaatacctcattttcactaccatacaagaaaaaaacacctattttgattgatcagttcttttgtatgaatatccacctcctttaaatactctatttttatatatatttttatatgaagataaacatgaatttatatttaactgtcttaaattatatttacataaatgcaaatatcacttgatataaacaatacaaatctgcatcttacagatgataatttttttagaagaatgatacagaattaactttaaaaataaaacttttctaatatacacttaaatgcaaacatcatttttaaattttcagtgatttttttaatgacataaaacgttaccaatgtgtgcagcctctccatcatgttttaacatactgtatactctatagcagtattacagtcagtatttcatataattttctttagacctaactgttaccatctgactgaggttactctggtatttatctcttcgctgctgaaataataatggattttagaaacaattgtaataatatcattaataaatgtcttactagtaat

SEQ ID NO: 4994 - protein, 41 aa, Homo sapiens [sequence omitted]

SEQ ID NO: 4995 - DNA, 1776 bp, Homo sapiens
catttgaggagaagctaagtgctgactgccagaggatggaataggaagacaatgaactgcaacttccagtacatcaatattgaaaaggagaaaaaccaatgacattccactggcaagtagaagttgtcctttcattctttaccaggagaaaatgtgatgtttatgatggcttaggctttgtgaatctaatgcttatgaaaaacatttcttcctatactttttaaattttattactgaaaggaaaagaacaggaatgttccacaagggaatttgaagagattctgtgagagagatatgaaatattttatagttaaaacaccaatatattcaactttacacttcttgtgtttttcataaacattccctcttgtcttatctgtgtacttcgatgggtaactgcagtctgaattaatgaaatatgtaattttaaagtaagtaacaaaatgtagttcctcatgtattactgtactatgtttcattgatgatattacttaaatcttgtgtttgccattacagccctatgtaacttaaaattacaattatattttatgtaaatattttgcaaaggactatgcattctgaaatgcataggtgctttttcccaccaagcatttgcatatgtccacaaatagtattatgttactagtatctatattttgattttcctgagcaactgtatcaaatccaaatttagattagacaaaaaattattattttaattaaactgtggcatacatataatacatacctaattatagtagtgagaactatttcttttatctctttaggttcaaaatggtgaatttctttattatatgaatgctttgttgtgagataacatcacactgttacaatggattttagaggtttgtcttttttgggtggggtgggaagctgagagggttaattcaatacatggctgaaattaccaaatgtataaatacctcattttcactaccatacaagaaaaaaacacctattttgattgatcagttcttttgtatgaatatccacctcctttaaatactctatttttatatatatttttatatgaagataaacatgaatttatatttaactgtcttaaattatatttacataaatgcaaatatcacttgatataaacaatacaaatctgcatcttacagatgataatttttttagaagaatgatacagaattaactttaaaaataaaacttttctaatatacacttaaatgcaaacatcatttttaaattttcagtgatttttttaatgacataaaacgttaccaatgtgtgcagcctctccatcatgttttaacatactgtatactctatagcagtattacagtcagtatttcatataattttctttagacctaactgttaccatctgactgaggttactctggtatttatctcttcgctgctgaaataataatggattttagaaacaattgtaataatatcattaataaatgtcttactagtaatagtctgtgtttgtagagtatcttttattttcttttttactgaagatgtacatctatgcaaacagtgaccacttggcagggatattatcatgtggattcaagtattatagcatggttaaacacgattaactatatagttccttctaagcctaatattctttaagtttatgatcagatgaacttcccactgtgcaatgaccaaaatgtatgaagataatgtattgtagtgacaagctttttaaaaataataataataagacacttacttaaatgctaggaatcattttaattgctccttaac

SEQ ID NO: 4996 - protein, 41 aa, Homo sapiens [sequence omitted]

SEQ ID NO: 4997 - DNA, 625 bp, Homo sapiens
gctacccagcagagcagcagagccaacacaatgtgcaggagaattgggtcttcctagcttctgacagcatccagagaagtttctgattgtggtttgctgattcatccagaggaaacctgtgggttacagcctatttcttctgactacattgaagccattttacagtctgaactaaaaagatgtccatctggggacatgaaaggccagtggattgtgccttgccttagttgttcggacaacaggacgtgtgactggagagaaataacctggcagccccacaactgccaatatggtgtcctaactaagcctcaactccagcagtgcctgggaggaaggaagttgggtgtcgatgtccagagagttcctagaagccgtaattgaagacacaatccagtcatcctgggaccctaaatgacctccctgccccacccctgcacataaacctgacttgaatcacctggactatttttctgagagagtaataaactttaattgggtttgacctattccaagttttttgggctatctgttacagtgcttagcttatctcacctaatacagggactatgcaaccaagaaactggaaataaaaacaaagataattaaaccattttataataagcct

SEQ ID NO: 4998 - protein, 61 aa, Homo sapiens
MKGQWIVPCLSCSDNRTCDWREITWQPHNCQYGVLTKPQLQQCLGGRKLGVDVQRVPRSRN

SEQ ID NO: 4999 - DNA, 581 bp, Homo sapiens
atgctaaagctttacaacggcctctcggaaggggagtcggtgggactccccacggggcccgaccccctggaccccactgatcggaacggggcgcacttcgaccgggaagtttacctagacaagctgcctagagagagtcctctggcccagctgatggactgtgcaggcagagcccccggagtcatggccagcccttccggcagctccgaagccactggcaagccccgaggcagggatggccggcccaggagggaagaggacgacgtccctcccgaagagaagaggctgcggctgttgctggaggggggaagcgcagaacctgaggactgcgaggacggggaggacgtgccgcggccaggcagggaggagaccgggacccagacaggtggcgacggcagaggagcgcagtggctcacacctgtaatcccagctacttgggaggctgaggcaggagaatcgtttgcacctgggagacagaggttgcagtcagccgagatcgcaccactgtacttcagccagcctgggtgacagagcgagactctgtttcaaaaataaataaataaataaaatagaattctgaa

SEQ ID NO: 5000 - protein, 175 aa, Homo sapiens
MLKLYNGLSEGESVGLPTGPDPLDPTDRNGAHFDREVYLDKLPRESPLAQLMDCAGRAPGVMASPSGSSEATGKPRGRDGRPRREEDDVPPEEKRLRLLLEGGSAEPEDCEDGEDVPRPGREETGTQTGGDGRGAQWLTPVIPATWEAEAGESFAPGRQRLQSAEIAPLYFSQPG

SEQ ID NO: 5001 - DNA, 3597 bp, Homo sapiens
acgcagccccatcccacacacacaggcccggtgactcaggggcccacgtgtgcaggacaccgggagctcacagggacagcgccccgggggatggaaggaactttgcctctctgtccctctctgtagggatggaaagaggagagcgatttctgggatggaagccatctgcctcctctcaactctcgctgcccaaccagaaagggaagaaaaacaggaagatgcgggacaggtgaggagctgggtgagcgccaccagcctgcagcccagcagagcagggcttggccaagcctggcgccagggacttcccccctacccccaccacaggcccctcgccaggtgagaggcaccgacagaatcccagacagatgccccagacaggatgcccggggcaacccccgccccttcccctgctaggggcccccaggacgcggggctccccctctccttttggccagccacagagtccagcggatctcccggccagggatgtcgtgggagaatcaggaagtcgaagccacacagccgagaaggggcagctggcgtctcggaggccgtcacgagctgtcactccgcgcccgccggacttgccgctcaattaccaacttcaacccagggccggccccggagcctcccgccgcccctaccccgcgcccctggcacccctggacctccgcgcccgcgtcacttactcctctgccgtcgccacctgtctgggtcccggtctcctccctgcctggccgcggcacgtcctccccgtcctcgcagtcctcaggttctgcgcttcccccctccagcaacagccgcagcctcttctcttcgggagggacgtcgtcctcttccctcctgggccggccatccctgcctcggggcttgccagtggcttcggagctgccggaagggctggccatgactccgggggctctgcctgcacctggggaagaggaaggacccggcgcgagcggcctctcggcggagctggggcgtctgagcgagggctcggtgggtcagcgcggcgcggggctgggcatcccggcgggcgcgggctcctccgcgggccgctcctggctctctgacgccctctgccggccgcttgcgcgcaccgcggacacgccgggtactggcctgcccggctctcacctgcccaggcccaagcagtcgctgtcccctgcctgtggccaggcccgctctggccaggccctgcacctcctccccgccccagccaggttgcacccgatggtctccctgcccaaggaggagagaagagaaaggacgccccgagatggtggacatcggccacaaccaccttgtctttgctcttaccctgtgtcttccatgatttggaggtggtgggaaacccgaggctgctcaaaactcgtggagaattccgcctgcaggatgacatgaatgcaccttcccattgcctaccaacagatcttttttgagcatcactgtggaccaggcgtggtgatgggggaggggatattgtggagaacatgacaggcattgccttcacccagtggggctcagcgctgggtgggaaggcattgagaatggacattgtcaattgggcaaaaggaggccaagaagaagtgctgggggcatgggaactgaaaaagacaggaggctcagcaggtcttggagctgggagagggacagcagcagcggctgttccaaaggaagcaacagctgagagaggcctcagagagttgttctcagcccagtggagggtgttcaggcagagggaacagcctgtgcaaaagcccagaggctgggaaagaagcagaaagaggactgtggggctggagcgtggtgggcaagaggagaaaggtgtggtgggcagacagattgcctgggaccgagccgtgcaggggcagaggagataggggatccttgcaggcctccagctggggctgaggcacagagacaatgcaggtgggcaaagggaggagacgtggagaagtattttggaggcatgccctgatgaatgagcccaggatgcacccttagtgtcagtgtggagctccttcctaggttgtgtgatgggctgaactggggggtattttctggacatcgaagtgctacacccagagtccaggacaggctaagtgagcaccagcagctcctggcccacctcaaaagcaggagagacaggggagactggggaggccagggcggaaggggaagccaggaaggcaggagaggccagggaagcagaggaggccagggaggcaggggaggcaggagaggctggggcggctgtgtcctttccatgtttctgcccaggatcctaggccgctgtactccctgagcttccccaccccaagtgctggaaccatgttgcacaacggtctccccactaagctcctgatggcagcccctaccctgctgtgctccctatttcaaccctaacagctctcacagtgggcagcacatagtaggtgctcaggaaacactggtgggagagcacgtgggtctgctcagcaccttcctctctcctccagctctccccatcatgaaataattctgataacgacacatggactttgagatcctcttctattacttgccatatgctaatccatctatacctcacagcagtcctgggggtgggtgctattaggatgcccattttacagaggaggagactgaggtataaagagggtaagtgacatacgcacactacaggggctggggccaagtgatcagagcactcaatccccaaaggcaaggtggatgcagttaccataaaagacagcagagtcaaagctgcaaccagcatagcctgactctcagagacctacggtgccagctgatcgtggctttcctagaagtgaaatagataagaagcctgccacatttttactggatctgtgtttgcagaagagttctagatcaggtgagcagaagtctaatctgaatcataaaaacagagtcacagtccccagtcaattcccagacataagccagttcacagacccggattcccttgtctgaatgggaagccaggtcccctgcagaaaggacactgctccactgccacaaattaatactgtcaatctttctcccagcctgcctccaagggaatacacagccttttaccaggatgactgaacaggagaaaaggaactaatggacctgtgcaggatcactggacacaggctgtgaactggcactaggatgagactagggtctaccagtcagaataggcattttggaggtcaggtgaatgttggtgcaagttcatgtcatggtagatccattaggtcccccaatccatcctctggttatatacaaagcggcaatgctgagattcaaattcagggcatccaacatgatgaagccccgtctgtactaaaaattcaaaaattagctggccatgatgacacacccctgtagtcccagctactcgggagcctgaggcaggagaatcattgagcccaggaggtagagttgcagcgagctgagacagcaccactgcactccagcctgggcaacagagtgagacttcatttaagaaaaaattaaataaataaaggctatgcccagtattttccatgtactgtcttattatctcagtaaatcccatataaccttcct

SEQ ID NO: 5002 - protein, 72 aa, Homo sapiens
MRLGSTSQNRHFGGQVNVGASSCHGRSIRSPNPSSGYIQSGNAEIQIQGIQHDEAPSVLKIQKLAGHDDTPL

SEQ ID NO: 5003 - DNA, 1381 bp, Homo sapiens
tgtgggaagtttgttctttcgctttttgcaacatagcttgctgctgctcactctttggtttcgtgccgcctttaagcgctgtaacactcactgcgaaggtctgcaacttcacttctgaggccagccagaccatgaacccactgggaggaataagcaactctggacacaccatctttaagaattgttaacactcaccaggagggtctgcggcttcattcttaaactcagcgagaccaagaacccaccaattccggacactgtggagagggaccagtggtgggcagggctccagaactccaaagatcattttctcaagcaatttttaaatttcattcttttaccctattgagcttttcttagtgcctaaagtgtctgcaagtggaaatccagaggaagacagagagaaactgagttcctgacaatgcattcactagagaaagtgacttttgaagatgtagctattgacttcacccaggaagagtgggacatgatggacacatccaagagaaagctgtacagagatgtgatgctggaaaatatcagtcacctggtgtccctcgggtaccagataagcaaatcctatataattttgcagctggagcaaggaaaagagctgtggcgggaaggaagagtatttcttcaagaccagaatccagacagggaaagtgcccttaagaaaaaacacatgatatccatgcatcctatcatcagaaaagacgcatccaccagtatgacaatggagaactctctcattctggaggatccttttgaatataatgattcgggagaagattgcactcacagttccacaataactcagtgtttgttaactcacagtggaaagaaaccctgtgtcagcaaacagtgtggaaaatcccttcgtaatcttttgtcccctaaaccacgtaaacaaattcatactaaaggtaaatcatatcaatgtaatctatgtgaaaaggcctatactaattgcttttaccttagacggcacaagatgactcacactggagagaggccatatgcatgtcatctatgtggaaaagccttcactcagtgttctcaccttagaagacatgagaaaactcacacgggagagagaccatataagtgtcatcaatgtgggaaagcctttattcaatcctttaaccttcgaagacatgagagaactcaccttggacaaaagtgttatgaatgtgataaaagtgggaaagcctttagtcaaagctctggctttagaggaaacaaaataattcacattggagagaaaccacatgcttgtcttctatccttcagtcaatgtactaatcttaaaaagcatcagaaaattcaccctggagagaaaattataaacttcttcagaacatattctgactttagatga

SEQ ID NO: 5004 - protein, 319 aa, Homo sapiens
MHSLEKVTFEDVAIDFTQEEWDMMDTSKRKLYRDVMLENISHLVSLGYQISKSYIILQLEQGKELWREGRVFLQDQNPDRESALKKKHMISMHPIIRKDASTSMTMENSLILEDPFEYNDSGEDCTHSSTITQCLLTHSGKKPCVSKQCGKSLRNLLSPKPRKQIHTKGKSYQCNLCEKAYTNCFYLRRHKMTHTGERPYACHLCGKAFTQCSHLRRHEKTHTGERPYKCHQCGKAFIQSFNLRRHERTHLGQKCYECDKSGKAFSQSSGFRGNKIIHIGEKPHACLLSFSQCTNLKKHQKIHPGEKIINFFRTYSDFR

SEQ ID NO: 5005 - DNA, 3388 bp, Homo sapiens
gaccaagtccctctccttccaccaaggagcgcccagaggccggcgggagctccaggttcacctcctcctcctccaggaaatcccacttccaactggatgtctggatgaactactgaaagctgctgagtgtcctgcagcaggtgagctgtggccagagcccaaggatgaagggggctccctcactctgtgactgtgaagaggaaccctgaggtgtagcaggcccaggccccagaagtatggaaaaaatgaggtttgacagaattcatgttgctgccatagaggggctcttttcaaactgatgtcttaaatcttgttcagatatgccatttccaatccagcggaagaccttctagaagagatgatggtgggagagtgctgacatactatgtgaagctactatttggagttggacacgagtgcatgtgtccttgtgccacaacgggaatcttgactacaacacaaatgaatccactcaaatgttggcaagtggagcagagtcccagaacaggtgctggagcagcccccctggaagtgatgcagcatccaggaagacggaggaaggggcggagaaggacctctgctttccaggctgccttttatactgcctctggtcacctgacgtggaacgtaccctaacctaatcagttacatgaggcgcttggaaaccaccgtcaattggaccgcactgggaaacacagatgaacaaagtcaacaccgctttgtccttcagtgcctggctcctttttcagctcgtcttgcgactctaggtattggagtccagggaggggtacgtcgcctttaccctgtgcttgccacgatcttgtctccttaatcctcactgcagttctctgccatagagtcttatactgctttacatgtgggaaactgaggctcagagagtttcacagcagggcagggagcccagatgtgaatctgtagataccaaactttctaatttttcagtagtttccaagcatcttttatttttcttgtttcttcgttggtgtctttttttttttttttttttttgagacaaaatctctgtgcccaggctgaggtgcagtggtgtgatctcagctcactgcaacctcgacgtctcacattcaacaattctcatgcctcaacctcccgagtggctgggactacaggtgcccaccacacccaacttatttttgtatttttagtagaaacacggttttgccatgttggccaggctggtcttgaactcctgacctcaggtgatccacccgccttggcctcccaatatgctggaattattgatatgagccattgggcccggtcatgtcattggtgccttaaccaagcctcttttaatttttcaaacggaagagcccctgtccctcagttacggctgctgagccctttcaaggtgagtcagtgaggagggagaaaagcggaagtggtgtgggaagaggcggggtctgggccagctgctggtcctgctctcctccctcctttggcctctaggctcccaggagtggtttcgaacctgcgccgtgtgctctggaggctgtggcaaggcaggcgcggcttggaacccgcaccatgtgctctgggggctgtggcaaggcaggggcagcttggaacctgcgccatgtgctctgggggctgtgccagggcagggggagtcctcgtgtcccctgcgcacaacacagacagaaggctgggtccacccagtgggcggtcgggtgccaggccagtgcttaccccgccatgtttgcagcccgaggccagctggctgcaggtgcaggactaggcgtcaggggtcagggtgcacacatccctgcaggtctcggggctcctgggttgcttctggaagggcacagatggggcctgactggagctgccgaggggtggagcttctggggaaaggatccctcctagggggagtgtcttgggcctggggccacgtggcagggacagagacgggtccatggcagtgtctgctcttctctgtgaaggcaaaaggcctctgagggagtattacagccgcctcatccaccagaagcatttccagcagatccaggtctgcaccccctgactgcagggccaaggactacccccgcttctaggtgagaggccagcaggaggctcagggaggaggcggggccttaagcagggggagcaggggtgggcatgatgtactttttctgaaaaggtggctctggaggccacttggggacaggacatgggctctggctgaactcccgggaggaggctacttcctggtgtgccagcccctccctgccaggtcgccccagaggccctttaccaaggggtttgaggaggccacgtcctttcagtctgccacgccctccattcagtcctcttccttcctgcaggagggctgggcctgggtttggggccactgttgcccaggtgtgggagggcagtggctttgggaggaacagggacgatgtgtcaaacagcgtcgcctctcccagtgagatggttctcctttgcctgcatctctttccccgttgatttctccaagtggggagtcgtggcttggtcctgatgcgtctctagagctgcatcttccaccttccagtgagcagaacagttggagtctgagggctttttcctggcaggattctccagctagtctttgttttagacagtcttgctccgttgcccaggctggagtgcacgatctcagttcatgcaacctccgcctcctgggttcaagcgattcacccacctcagcctcccaagtagattacaggattacaggagtccaccacaacagctggcttatttttgtatttttagtagagacagggtttcaccatgttgtccaggctggtcttgaactcctgacctcaagtgatcctctcgccttggcctccctaagtgctgggattccaggcgtgacccatcatgcctggccccaggtagtctttagaaatgttaagctatttggctttattttcacactgacagctggtttgtggtgggtgtgttatggtttattattattattattattattatcattattattattttgagacggagtttcgctcttgtagaccaggctggagtgcaatggcgcgatcttcgctcaccgcaacctctgccttcccaggttcaagcgattctcctgcctcagccgcctgagtagctgggattacaggcacatgccacggattaacatcgctaattttgtatttatttttagtagagatggggattcaccatgttggccaggctggtcttgaactcctgacctcaggtgatccacccgccttggcctcccaaaatgctgggattacaggcgggaggtgaacctgggaggtggaggttgcagggagctgagattgtgccactgcactccagcctgggtgacagagtgagactctgtctc

SEQ ID NO: 5006 - protein, 71 aa, Homo sapiens
MCPCATTGILTTTQMNPLKCWQVEQSPRTGAGAAPLEVMQHPGRRRKGRRRTSAFQAAFYTASGHLTWNVP

SEQ ID NO: 5007 - DNA, 513 bp, Homo sapiens
aactggatgtctggatgaactactgaaagctgctgagtgtcctgcagcaggccatttccaatccagcggaagaccttctagaagagatgatggtgggagagtgctgacatactatgtgaagctactatttggagttggacacgagtgcatgtgtccttgtgccacaacgggaatcttgactacaacacaaatgaatccactcaaatgttggcaagtggagcagagtcccagaacagtctgcaatctctacaggtacagaaacacccccagttcaaggatcttcacacctggatttaggcctactcctgcaactaccccaggcaccaatttgatcttctactactttgcagacatctcttctgcaaacaccagacaaattgagacaatgaccttccacaggacccaaatcacctcttactgcaggaaagaagatccagtgagaaaattagtccacaaatggaatgtaaatccataaacactcttaagtaacagaataaatttagtatgaacgtt

SEQ ID NO: 5008 - protein, 108 aa, Homo sapiens
MCPCATTGILTTTQMNPLKCWQVEQSPRTVCNLYRYRNTPSSRIFTPGFRPTPATTPGTNLIFYYFADISSANTRQIETMTFHRTQITSYCRKEDPVRKLVHKWNVNP

SEQ ID NO: 5009 - DNA, 1593 bp, Homo sapiens
atggaagacgactcactctatttgggaggtgactggcagttcaatcacttttcaaaactcacatcttctcggctagatgcagcttttgctgaaatccagcggacttctctctctgaaaagtcaccactctcatctgagacccgtttcgacctctgtgatgatttggctcctgtggcaagacagcttgctcccagggagaagcttcctctgagtagcaggagacctgctgcggtgggggctgggctccagaagataggaaataccttctatgtgaacgtttccctgcagtgcctgacatacacactgccgctttccaactacatgctgtcccgggaggactctcaaacgtgtcatcttcacaagtgctgcatgttctgtactatgcaagctcacatcacatgggccctccacagtcctggccatgtcatccagccctcacaggtattggctgctggcttccatagaggtgagcaggaggatgcccatgaatttctcatgtttactgtggatgccatgaaaaaggcatgccttcccgggcacaagcagctagatcatcactccaaggacaccaccctcatccaccaaatatttggagcgtattggagatctcaaatcaagtatctccactgccacggcgtttcagacacctttgacccttacctggacatcgccctggatatccaggcagctcagagtgtcaagcaagctttggaacagttggtgaagcccaaagaactcaatggagagaatgcctatcattgtggtctttgtctccagaaggcgcctgcctccaagacgttaactttacccacttctgccaaggtcctcattcttgtattgaagagattctccgatgtcacaggcaacaaacttgccaagaatgtgcaatatcctaagtgccgtgacatgcagccatacatgtctcagcagaacacaggacctcttgtctatgtcctctatgctgtgctggtccacgctgggtggagttgtcacaacggacattacttctcttatgtcaaagctcaagaaggccagtggtataaaatggatgatgccgaggtcactgcctctggcatcacctctgtcctgagtcaacaggcctatgtcctcttttacatccagaagagtgaatgggaaagacacagtgagagtgtgtcaagaggcagggaaccaagagcccttggtgctgaagacacagacaggccagcaacgcaaggagagctcaagagagaccacccttgcctccaggtacccgagttggacgagcacttggtggaaagagccactcaggaaagcaccttagaccactggaaattcccccaagagcaaaacaaaacgaagcctgagttcaacgtcagaaaagttgaaggtaccctgcctcccaacgtacttgtgattcatcaatcaaaatacaagtgtggtatgaaaaaccatcatcctgaacagcaaagctccctgctaaacctctcttcgacgaaaccgacagatcaggagtccatgaacactggcacactcgcttctctgcaagggagcaccaggagatccaaagggaataacaaacacagcaagagatctctgcttgtgtgccagtga

SEQ ID NO: 5010 - protein, 530 aa, Homo sapiens; identical to SEQ ID NO: 642

SEQ ID NO: 5011 - DNA, 1593 bp, Homo sapiens
atggaggacgactcactctacttgggaggtgagtggcagttcaaccacttttcaaaactcacatcttctcggccagatgcagcttttgctgaaatccagcggacttctctccctgagaagtcaccactctcatctgaggcccgtgtcgacctctgtgatgatttggctcctgtggcaagacagcttgctcccaggaagaagcttcctctgagtagcaggagacctgctgcggtgggggctgggctccagaatatgggaaatacctgctacgagaacgcttccctgcagtgcctgacatacacaccgccccttgccaactacatgctgtcccgggagcactctcaaacatgtcagcgtcccaagtgctgcatgctctgtactatgcaagctcacatcacatgggccctccacagtcctggtcatgtcatccagccctcacaggcattggctgctggcttccatagaggcaagcaggaagatgcccatgaatttctcatgttcactgtggatgccatgaaaaaggcatgccttcccggccacaagcaggtagatcatcactctaaggacaccaccctcatccaccaaatatttggaggctgctggagatctcaaatcaagtgtctccactgccacgggatttcagacacttttgacccttacctggacatcgccctggatatccaggcagctcagagtgtcaagcaagctttggaacagttggtgaagcccgaagaactcaatggagagaatgcctatcattgcggtctttgtctccagagggcgccggcctccaagacgttaactttacacacttctgccaaggtcctcatccttgtcttgaagagattctccgatgtcacaggcaacaaacttgccaagaatgtgcaatatcctgagtgccttgacatgcagccatacatgtctcagcagaacacaggacctcttgtctatgtcctctatgctgtgctggtccacgctgggtggagttgtcacgacggacattacttctcttatgtcaaagctcaagaaggccagtggtataaaatggatgatgccaaggtcactgcctgtagcatcacttctgtcctgagtcaacaggcctatgtcctcttttacatccagaagagtgaatgggaaagacacagtgagagtgtgtcaagaggcagggaaccaagagccctcggcgctgaagacacagacaggcgagcaacgcaaggagagctcaagagagaccacccctgcctccaggcacccgagttggacgagcgcttggtggaaagagccactcaggaaagcaccttagaccactggaaattcccccaagagcaaaacaaaacgaagcctgagttcaacgtcagaaaagtcgaaggtaccctgcctcccaacgtacttgtgattcatcaatcgaaatacaagtgtgggatgaaaaaccatcatcctgaacagcaaagctccctgctaaacctctcttcgacgacccggacagatcaggagtccgtgaacactggcaccctcgcttctctgcaagggaggaccaggagatccaaagggaagaacaaacacagcaagagggctctgcttgtgtgccagtga

SEQ ID NO: 5012 - protein, 530 aa, Homo sapiens
MEDDSLYLGGEWQFNHFSKLTSSRPDAAFAEIQRTSLPEKSPLSSEARVDLCDDLAPVARQLAPRKKLPLSSRRPAAVGAGLQNMGNTCYENASLQCLTYTPPLANYMLSREHSQTCQRPKCCMLCTMQAHITWALHSPGHVIQPSQALAAGFHRGKQEDAHEFLMFTVDAMKKACLPGHKQVDHHSKDTTLIHQIFGGCWRSQIKCLHCHGISDTFDPYLDIALDIQAAQSVKQALEQLVKPEELNGENAYHCGLCLQRAPASKTLTLHTSAKVLILVLKRFSDVTGNKLAKNVQYPECLDMQPYMSQQNTGPLVYVLYAVLVHAGWSCHDGHYFSYVKAQEGQWYKMDDAKVTACSITSVLSQQAYVLFYIQKSEWERHSESVSRGREPRALGAEDTDRRATQGELKRDHPCLQAPELDERLVERATQESTLDHWKFPQEQNKTKPEFNVRKVEGTLPPNVLVIHQSKYKCGMKNHHPEQQSSLLNLSSTTRTDQESVNTGTLASLQGRTRRSKGKNKHSKRALLVCQ

SEQ ID NO: 5013 - DNA, 838 bp, Homo sapiens
cagcctttcatcccaaagatgcagccgacttgattgtggtggataagctttttgatgtgctgctggattccgtttgctagtattttattaagaatttttgcattaatgttcatcagggatattggcctggattgagcaggccatttccaatccagcggaagaccttctagaagagatgatggtgggagagtgctgacatactatgtgaagctactatttggagttggacacgagtgcatgtgtccttgtgccacaacgggaatcttgactacaacacaaatgaatccactcaaatgttggcaagtggagcagagtcccagaacagtctgcaatctctacaggtacagaaacacccccagttcaaggatcttcacacctggatttaggcctactcctgcaactaccccaggtaagtttccttgttcttcaatggcaaagtttggacaatgctgttcaaactccaggcaacaagcaacatctagggaatgtgcttttaggtagggtcagcataatatcccaccctgggagacatttttattttaaagttgtagagggtgttgctgctgtcggctccctgccaatcagcaccatttgcagcctcttttgaagacagagaactgagggctgtccttcgaatggagcagtgtgattccaaaaaaagagatgctccttgtggtcctgggaccagggataggactccagttgagcctggtggaagaggtccttgtcctaccccaacggagagccatgcagctgagcttgggcgatgtggtccacgtggttgtttctgagtgtgtcctgaggttgcaggatggcttgcagttccctatgcagatcc

SEQ ID NO: 5014 - protein, 87 aa, Homo sapiens
MCPCATTGILTTTQMNPLKCWQVEQSPRTVCNLYRYRNTPSSRIFTPGFRPTPATTPGKFPCSSMAKFGQCCSNSRQQATSRECAFR

SEQ ID NO: 5015 - DNA, 559 bp, Homo sapiens
ccaggccatttccaatccagcggaagaccttctagaagagatgatggtgggagagtgctgacatactatgtgaagctactatttggagttggacacgagtgcatgtgtccttgtgccacaacgggaatgtgagctggatgacaaatggagatttggacttgtgataattggcctctgtgtcattgtgtggaagactgactggtccctttatttcctgtagcttgactacaacacaaatgaatccactcaaatgttggcaagtggagcagagtcccagaacagtctgcaatctctacaggtacagaaacacccccagttcaaggatcttcacacctggatttaggcctactcctgcaactaccccaggcaccaatttgatcttctactactttgcagacatctcttctgcaaacaccagacaaattgagacaatgaccttccacaggacccaaatcacctcttactgcaggaaagaagatccagtgagaaaattagtccacaaatggaatgtaaatccataaacactcttaagtaacagaataaatttagtatgaacgtt

SEQ ID NO: 5016 - protein, 94 aa, Homo sapiens
MNPLKCWQVEQSPRTVCNLYRYRNTPSSRIFTPGFRPTPATTPGTNLIFYYFADISSANTRQIETMTFHRTQITSYCRKEDPVRKLVHKWNVNP

SEQ ID NO: 5017 - DNA, 639 bp, Homo sapiens
ctagaagagatgatggtgggagagtgctgacatactatgtgaagctactatttggagttggacacgagtgcatgtgtccttgtgccacaacgggaatgtgagctggatgacaaatggagatttggacttgtgataattggcctctgtgtcattgtgtggaagactgactggtccctttatttcctgtagcttgactacaacacaaatgaatccactcaaatgttggcaagtggagcagagtcccagaacagtctgcaatctctacaggtacagaaacacccccagttcaaggatcttcacacctggatttaggcctactcctgcaactaccccagtttcatttcaacttaggtttaaggggttcttgataatctgacatgataagtggtgttggaattggcattaaaatccaccatgctctacaacacttcatccttcttcggcaggcaccaatttgatcttctactactttgcagacatctcttctgcaaacaccagacaaattgagacaatgaccttccacaggacccaaatcacctcttactgcaggaaagaagatccagtgagaaaattagtccacaaatggaatgtaaatccataaacactcttaagtaacagaataaatttagtatgaacgtt

SEQ ID NO: 5018 - protein, 56 aa, Homo sapiens
MNPLKCWQVEQSPRTVCNLYRYRNTPSSRIFTPGFRPTPATTPVSFQLRFKGFLII

SEQ ID NO: 5019 - DNA, 457 bp, Homo sapiens
ggacacgagtgcatgtgtccttgtgccacaacgggaatcttgactacaacacaaatgaatccactcaaatgttggcaagtggagcagagtcccagaacagtctgcaatctctacaggtacagaaacacccccagttcaaggatcttcacacctggatttaggcctactcctgcaactaccccaggccagttatccaggcagtgactttcagtgcagctacagtcacctctggaaacctgtggagactttaaaaatttccaaaaggcaccaatttgatcttctactactttgcagacatctcttctgcaaacaccagacaaattgagacaatgaccttccacaggacccaaatcacctcttactgcaggaaagaagatccagtgagaaaattagtccacaaatggaatgtaaatccataaacactcttaagtaacagaataaatttagtatgaacgtt

SEQ ID NO: 5020 - protein, 63 aa, Homo sapiens
MCPCATTGILTTTQMNPLKCWQVEQSPRTVCNLYRYRNTPSSRIFTPGFRPTPATTPGQLSRQ

SEQ ID NO: 5021 - DNA, 488 bp, Homo sapiens
ttatttcctgtagcttgactacaacacaaatgaatccactcaaatgttggcaagtggagcagagtcccagaacagtctgcaatctctacaggtacagaaacacccccagttcaaggatcttcacacctggatttaggcctactcctgcaactaccccagtttcatttcaacttaggtttaaggggttcttgataatctgacatgataagtggtgttggaattggcattaaaatccaccatgctctacaacacttcatccttcttcggcaggcaccaatttgatcttctactactttgcagacatctcttctgcaaacaccagacaaattgagacaatgaccttccacaggacccaaatcacctcttactgcaggaaagaagatccagtgagaaaattagtccacaaatggaatgtaaatccataaacactcttaagtaacagaataaatttagtatgaacgtttttatgtgggagctcttgaaatggt

SEQ ID NO: 5022 - protein, 56 aa, Homo sapiens; identical to SEQ ID NO: 5018

SEQ ID NO: 5023 - DNA, 395 bp, Homo sapiens
agatggagccatcccagccatgacaacagagaatgtaccactctcacttgaggaagaggggtaggcagtgctcctgtatcaccagcccttaatgagaccctgaggaaaccacatcatggagatcagcccttctctcctggggtaatgttgagttccagaaggcaaggattaacattcagaaaataggaaaaacaacctgcaggcaccaatttgatcttctactactttgcagacatctcttctgcaaacaccagacaaattgagacaatgaccttccacaggacccaaatcacctcttactgcaggaaagaagatccagtgagaaaattagtccacaaatggaatgtaaatccataaacactcttaagtaacagaataaatttagtatgaacgtt

SEQ ID NO: 5024 - protein, 55 aa, Homo sapiens [sequence omitted]

SEQ ID NO: 5025 - DNA, 2499 bp, Homo sapiens
atctgtgcccttccagaagcaacccaggagccccgagacctgcagggatgtgtgcaccctgacccctgacgcctagtcctgcacctgcagccagctggcctcgggctgcaaacatggcgggtgcggtccaattgacggtggtttccaagcgcctcctggaggagaaaacacatgagggtgtggtcagggttctctgctgacagacctaccgtggggaagaaagagaaactctgaagatggatcatggccatgactgcatgtcaaggagaatctccttgaagacactgaggcctacgtcgaggtagagtaaatatggtccaattaaaaggtgaccagaggcagtataaaaggcagcctggaaagcagaggtccttctccgccccttcctccgtcttcctggatgctgcatcacttccaggggggctgctccagcacctgcccatctcagcgccagccggtgaaagaaagtagacgtgtaatttcaggtgacccaacagtcaacccctgaaaaaggcggtcacaaaacccccaggagacgaagatgacggcacgtcgtgaccccaaacctggggcaaagagactggtgagagcccagaccctccagaagcagcggagggccccagttgggccaagggctcccccgcccgatgaagaagatcccaggctcaagtgcaaaaactgcagggcccttggccacacggtcagaagtaccaggtgccccatgaagtgctggaaggcagccctggttccaccgaccttggggaaaaaggaagggaaggaaaacctgaaaccatggaagccccaggttgaagccaacccggggcccttgaacaaggataagggagagaaggaagagagaccaaggcaacaagacccgcagagaaaggctctcctccacatattttccgggaaacctccagagaagctgctgccaaatcgaaaaggatccacggaatcttctgtttttctgagggttgcaagccggccaatgccggtccacacaacaagtaagaggccgtgcgtggaccctgaactcgctgatcgctcagctaccgaaatgtctggcagaggctccgtcttggcttcactgtctcccctcagaaaagccagtctgagatcctcctcaagtcttggaccaaaggaaagacagacaggtgctgcggccgacatccctcagcctgcagtcaggcaccagggccccgagcctctcctcgtggtgaagccgacacacagcagccgtgagggtggctgccgagaagttccccaggctgcctccaaaacccacggcctgctccaggctgtcagaccccaggcacaagacaaacgtcctgcggtgacctgacagcccggcccaccagccgccacacacagcttgggcctaggctccaatctcagcttcagaccaggagccaagagacctgcccaggctccgattcagggttgcctgaacttccccaagaaaccgagactgggtcccttccagatccccgaaagcgccatccagggaggtgagctgggggccccggagaatctccaacctccgccagccgcaaccgaacttggaccaagtacgtcgccccagatgggcaggaggacacccgcccaggtgcccggcgtcgaccggcagcctccgcacagcagaccttgcctgcctactgcccaggcctgcaccatgtcccatcacccagcggccagccatgatggggcccagcctctcagagtgctcttccggagactagaaaacagacgctggagctccagcctcctggcggccccctcatttcactctcctgagaagccgggagccttcctcgctcagagccctcatgtgtcagagaagtctgagggtccctgtgttcgtgtcccaccgaacgtcctctatgaagaccttcaggtttcctcctcctcagaggacagcgattctgacctgcagtgagactgcaggtggcaggggctccttggcctccagctcccgtgacttggaggggactgtgggactgaggagagcagagcagagagcacactctgtgcggtgactccgaagctccccggctgtggcgcttctgtggatgtgggagcccaggccaggcagggagcagatgcagggactctgcctcattgaattctggtgagggacgttgtagttggcgtggttctccggaaacgcgccaggaaaagcttccgtgccagagattcgttgcctcagaaactgcgtgacgcgcaggagtcagacttccgctgggacgtcaataggaaactggggaattactgtgtatttgctctctagatgactgaataagggaaaagttagggaaccctgagaggtgcagcccttccgctgtgccccgccctgagagcagtgtttcggacgctgggaagcgtgctgtgcgaagcgctctcggggtctttcctcagcctcgaaaactgggctctggaatgcctttgtaaacaggtgtgttgaatttgttttgaagtgaataaaattctcaaaaagatgac

SEQ ID NO: 5026 - protein, 266 aa, Homo sapiens; identical to SEQ ID NO: 648

SEQ ID NO: 5027 - DNA, 2789 bp, Homo sapiens
cgcccacgttatggcgcccgaggagaacgcggggaccgaactcttgctgcagggttttgagcgccgcttcctggcggtgcgcacactgcgctccttcccctggcaggtgggcggcggggcgagcggagaggcccgcgggggtcgcgggagtccaggggcagacgggatgggtctccgtgctgaaacccccggcgctccggccacgtgagttcctgggctctcctcggtcagggccgcgagacccggtccccgtccctggggcctggccagagtcgctcgcaccccttctgccccgcgagctggcggcggaagctgggggcgtctccaccgccttagggggtagacgcgcgctccgtgtggggtacggttcacgatcattttcacgactttttaaaggcagtaatcgttctggtcactgggacacagctgcactcgcccattctaaaaagtcagcgccctcaggcccgcgggtaaccacctcctcctgagcgcggtgaccagagcttagaggcaaagttaagagactcatcagattctgagctgctgcgggatattttgcagaagactgtgaggcatcctgtgtgtgtgaagcacccgccgtcagtcaagtatgcctggtgctttctctcagaactcatcaaaaagtcctcaggaggctcagtcacactctccaagagcacagccatcatctcccacggtaccacaggcctggtcacatgggatgccgccctctaccttgcagaatgggccatcgagaacccggcagccttcattaacaggactgtcctagagcttggcagtggtgccggcctcacaggccttgccatctgcaagatgtgccgcccccgggcatacatcttcagcgaccctcacagccgggtcctcgagcagctccgagggaatgtccttctcaatggcctctcattagaggcagacatcactggcaacttagacagccccagggtgacagtggcccagctggactgggacgtagcaatggtccatcagctctctgccttccagccagatgttgtcattgcagcagacgtgctgtattgcccagaagccatcgtgtcgctggtcggggtcctgcagaggctggctgcctgccgggagcacaagcgggctcctgaggtctacgtggcctttaccgtccgcaacccagagacgtgccagctgttcaccaccgagctaggccgggatgggatcagatgggaagcggaagctcatcatgaccagaaactgtttccctatggagagcacttggagatggcaatgctgaacctcacactgtaggactcacacatgactccaaagggattgtgagaatcaagtcactctcgtgggaagaatttttatatgggaaagtggataaaactttcattggactggaatgtttggagattattaaactccaaatcaggaatcaaaactgccctctaataagacattagctgtctaggcgtgtgggtgccccctttctgccagcagttctggttctcaagaaaatcatcataaatcagacatgaaaattctagctccaaaaatagcattttctttctgcaaataaaaacgtgtgtatcaaggatgacgttcccccaacgtggacacactcggttcctcagaaagccaagcccgctgcagctgccacatccctggacacactcggttcctcacaaagccaagcccgctgcagctgccacatccctggacacactcggttcctcacaaagccaagcccgctgcagctgccacatccctggacacactcggttcctcacaaagccaagcccgctgcagctgccacatcccagggcttatggtgcagcaggcgcttttttcaagacaggaatgaaagtgttaggaacacggcagaaaggtgacacctggagaccaaatgcaggatgaggagtactgcagaggtcacagggaagtcacagaacagtaatacgctagcaggggcatggggcatgaagaacagaagacaggaagcatttcagagactccaaagaagaaatcagggccaaccacagcttcccgggtcattcaccaggtgacaccactgccgtcatttcagcttctggccactgggaggcgctgctcgaaaggctttgccctgagactccaagaagctgcgggaaggacagcaggggccctggggttttagcctctggcccaggagttatgtgtccataaccaaagggagcacagtctgcacccagctctcatcccatcagagctgctgagactcttgcaggttcttccagaactggcttagcttgcctgcaggatcagaaaagtttgagaaaagcatctgcaaaatgctaaagagcagagcttaactcattgcctgtccccaccccatcccaggtcaccacttggatgaccccaggtccccgacccaacaacaacccctcccaagtccctaactccctcacttggacttgagacccttcacaacccccctcacttggacttgagacccttcacaacccagcagcgctccacttccaacttgacatcatgctttctggaaacttccccgtatgtcccactttcccacacttggtgccctggagcaccttccggcctctacatgctgtacgttcccctgtgagcaccctcctctcggcctctggccaacacagtcccacccatctgtgggtaacaagggggtgtgggtgttcttttcagccttgctaaactgtctgaatcaaggatcacaaactacagcctgcaggccaaatccagcccacagcctgtgtttgtaaataaagctttgttggaac

SEQ ID NO: 5028 - protein, 153 aa, Homo sapiens
MCRPRAYIFSDPHSRVLEQLRGNVLLNGLSLEADITGNLDSPRVTVAQLDWDVAMVHQLSAFQPDVVIAADVLYCPEAIVSLVGVLQRLAACREHKRAPEVYVAFTVRNPETCQLFTTELGRDGIRWEAEAHHDQKLFPYGEHLEMAMLNLTL

SEQ ID NO: 5029 - DNA, 1561 bp, Homo sapiens
tttatttacaaacacaggctgtgggctggatttggcctgcaggctgtagtttgtgatccttgattcagacagtttagcaaggctgaaaagaacacccacacccccttgttacccacagatgggtgggactgtgttggccagaggccgagaggagggtgctcacaggggaacgtacagcatgtagaggccggaaggtgctccagggcaccaagtgtgggaaagtgggacatacggggaagtttccagaaagcatgatgtcaagttggaagtggagcgctgctgggttgtgaagggtctcaagtccaagtgaggggggttgtgaagggtctcaagtccaagtgagggagttagggacttgggaggggttgttgttgggtcggggacctggggtcatccaagtggtgacctgggatggggtggggacaggcaatgagttaagctctgctctttagcattttgcagatgcttttctcaaacttttctgatcctgcaggcaagctaagccagttctggaagaacctgcaagagtctcagcagctctgatgggatgagagctgggtgcagactgtgctccctttggttatggacacataactcctgggccagaggctaaaaccccagggcccctgctgtccttcccgcagcttcttggagtctcagggcaaagcctttcgagcagcgcctcccagtggccagaagctgaaatgacggcagtggtgtcacctggtgaatgacccgggaagctgtggttggccctgatttcttctttggagtctctgaaatgcttcctgtcttctgttcttcatgccccatgcccctgctagcgtattactgttctgtgacttccctgtgacctctgcagtactcctcatcctgcatttggtctccaggtgtcacctttctgccgtgttcctaacactttcattcctgtcttgaaaaaagcgcctgctgcaccataagccctgggatgtggcagctgcagcgggcttggctttgtgaggaaccgagtgtgtccagggatgtggcagctgcacgggcttggctttctgaggaaccgagtgtgtccacgttgggggaacgtcatccttgatacacacgtttttatttgcagaaagaaaatgctatttttggagctagaattttcatgtctgatttatgatgattttcttgagaaccagaactgctggcagaaagggggcacccacacgcctagacagctaatgtcttattagagggcagttttgattcctgatttggagtttaataatctccaaacattccagtccaatgaaagttttatccactttcccatataaaaattcttcccacgagagtgacttgattctcacaatccctttggagtcatgtgtgagtcctacagtgtgaggttcagcattgccatctccaagtgctctccatagggaaacagtttctggtcatgatgagcttccgcttcccatctgatcccatcccggcctggaaacaaagcacgtgtttgaggatggcggtgtttggggacaggacatgagcgttttgtgtggggctgctaggacaggcctgg

SEQ ID NO: 5030 - protein, 70 aa, Homo sapiens [sequence omitted]

SEQ ID NO: 5031 - DNA, 1186 bp, Homo sapiens
ccgaggagaacgcggggaccgaactcttgctgcagggttttgagcgccgcttcctggcggtgcgcacactgcgctccttcccctggcaggtgggcggcggggcgagcggagaggcccgcgggggtcgcgggagtccaggggcagacgggatgggtctccgtgctgaaacccccggcgctccggccacagcttagaggcaaagttaagagactcatcagattctgagctgctgcgggatattttgcagaagtcctcaggaggctcagtcacactctccaagagcacagccatcatctcccacggtaccacaggcctggtcacatgggatgccgccctctaccttgcagaatgggccatcgagaacccggcagccttcattaacagacgtgctgtattgcccagaagccatcgtgtcgctggtcggggtcctgcagaggctggctgcctgccgggagcacaagcgggctcctgaggtctacgtggcctttaccgtccgcaacccagagacgtgccagctgttcaccaccgagctaggtgaacccccacgcccacccgggcctacatggtgcccgagctgtccctgcaggactccagtggaagtgaaagaactgggcgctggggaaaagctaggatgctccacactcccacactatgcggggaactcgggcagaggccggccgggatgggatcagatgggaagcggaagctcatcatgaccagaaactgtttccctatggagagcacttggagatggcaatgctgaacctcacactgtaggactcacacatgactccaaagggattgtgagaatcaagtcactctcgtgggaagaatttttatatgggaaagtggataaaactttcattggactggaatgtttggagattattaaactccaaatcaggaatcaaaactgccctctaataagacattagctgtctaggcgtgtgggtgccccctttctgccagcagttctggttctcaagaaaatcatcataaatcagacatgaaaattctagctccaaaaatagcattttctttctgcaaataaaaacgtgtgtatcaaggatgacgttcccccaacgtggacacactcggttcctcagaaagccaagcccgctgcagctgccacatccctggacacactcggttcctcacaaagccaagcccgctgcagctgccacat

SEQ ID NO: 5032 - protein, 129 aa, Homo sapiens; identical to SEQ ID NO: 1410

SEQ ID NO: 5033 - DNA, 1128 bp, Homo sapiens
cgcccgaggagaacgcggggaccgaactcttgctgcagggttttgagcgccgcttcctggcggtgcgcacactgcgctccttcccctggcaggtgggcggcggggcgagcggagaggcccgcgggggtcgcgggagtccaggggcagacgggatgggtctccgtgctgaaacccccggcgctccggccacagcttagaggcaaagttaagagactcatcagattctgagctgctgcgggatattttgcagaagactgtgaggcatcctgtgtgtgtgaagcacccgccgtcagtcaagtatgcctggtgctttctctcagaactcatcaaaaagtcctcaggaggctcagtcacactctccaagagcacagccatcatctcccacggtaccacaggcctggtcacatgggatgccgccctctaccttgcagaatgggccatcgagaacccggcagccttcattaacagacgtgctgtattgcccagaagccatcgtgtcgctggtcggggtcctgcagaggctggctgcctgccgggagcacaagcgggctcctgaggtctacgtggcctttaccgtccgcaacccagagacgtgccagctgttcaccaccgagctaggccgggatgggatcagatgggaagcggaagctcatcatgaccagaaactgtttccctatggagagcacttggagatggcaatgctgaacctcacactgtaggactcacacatgactccaaagggattgtgagaatcaagtcactctcgtgggaagaatttttatatgggaaagtggataaaactttcattggactggaatgtttggagattattaaactccaaatcaggaatcaaaactgccctctaataagacattagctgtctaggcgtgtgggtgccccctttctgccagcagttctggttctcaagaaaatcatcataaatcagacatgaaaattctagctccaaaaatagcattttctttctgcaaataaaaacgtgtgtatcaaggatgacgttcccccaacgtggacacactcggttcctcagaaagccaagcccgctgcagctgccacatccctggacacactcggttcctcacaaagccaagcccgctgcagctgccacat

SEQ ID NO: 5034 - protein, 139 aa, Homo sapiens; identical to SEQ ID NO: 1418

SEQ ID NO: 5035 - DNA, 933 bp, Homo sapiens
tggcgcccgaggagaacgcggggaccgaactcttgctgcagggttttgagcgccgcttcctggcggtgcgcacactgcgctccttcccctggcagagcttagaggcaaagttaagagactcatcagattctgagctgctgcgggatattttgcagaagactgtgaggcatcctgtgtgtgtgaagcacccgccgtcagtcaagtatgcctggtgctttctctcagaactcatcaaaaagtcctcaggaggctcagtcacactctccaagagcacagccatcatctcccacggtaccacaggcctggtcacatgggatgccgccctctaccttgcagaatgggccatcgagaacccggcagccgtctacgtggcctttaccgtccgcaacccagagacgtgccagctgttcaccaccgagctaggccgggatgggatcagatgggaagcggaagctcatcatgaccagaaactgtttccctatggagagcacttggagatggcaatgctgaacctcacactgtaggactcacacatgactccaaagggattgtgagaatcaagtcactctcgtgggaagaatttttatatgggaaagtggataaaactttcattggactggaatgtttggagattattaaactccaaatcaggaatcaaaactgccctctaataagacattagctgtctaggcgtgtgggtgccccctttctgccagcagttctggttctcaagaaaatcatcataaatcagacatgaaaattctagctccaaaaatagcattttctttctgcaaataaaaacgtgtgtatcaaggatgacgttcccccaacgtggacacactcggttcctcagaaagccaagcccgctgcagctgccacatccctggacacactcggttcctcacaaagccaagcccgctgcagctgccacat

SEQ ID NO: 5036 - protein, 72 aa, Homo sapiens
MPGAFSQNSSKSPQEAQSHSPRAQPSSPTVPQAWSHGMPPSTLQNGPSRTRQPSTWPLPSATQRRASCSPPS

SEQ ID NO: 5037 - DNA, 956 bp, Homo sapiens
gttatggcgcccgaggagaacgcggggaccgaactcttgctgcagggttttgagcgccgcttcctggcggtgcgcacactgcgctccttcccctggcagagcttagaggcaaagttaagagactcatcagattctgagctgctgcgggatattttgcagaagtcctcaggaggctcagtcacactctccaagagcacagccatcatctcccacggtaccacaggcctggtcacatgggatgccgccctctaccttgcagaatgggccatcgagaacccggcagccttcattaacagacgtgctgtattgcccagaagccatcgtgtcgctggtcggggtcctgcagaggctggctgcctgccgggagcacaagcgggctcctgaggtctacgtggcctttaccgtccgcaacccagagacgtgccagctgttcaccaccgagctaggccgggatgggatcagatgggaagcggaagctcatcatgaccagaaactgtttccctatggagagcacttggagatggcaatgctgaacctcacactgtaggactcacacatgactccaaagggattgtgagaatcaagtcactctcgtgggaagaatttttatatgggaaagtggataaaactttcattggactggaatgtttggagattattaaactccaaatcaggaatcaaaactgccctctaataagacattagctgtctaggcgtgtgggtgccccctttctgccagcagttctggttctcaagaaaatcatcataaatcagacatgaaaattctagctccaaaaatagcattttctttctgcaaataaaaacgtgtgtatcaaggatgacgttcccccaacgtggacacactcggttcctcagaaagccaagcccgctgcagctgccacatccctggacacactcggttcctcacaaagccaagcccgctgcagctgccacat

SEQ ID NO: 5038 - protein, 126 aa, Homo sapiens
MAPEENAGTELLLQGFERRFLAVRTLRSFPWQSLEAKLRDSSDSELLRDILQKSSGGSVTLSKSTAIISHGTTGLVTWDAALYLAEWAIENPAAFINRRAVLPRSHRVAGRGPAEAGCLPGAQAGS

SEQ ID NO: 5039 - DNA, 1058 bp, Homo sapiens
aacggctgcggcctcgcccacgttatggcgcccgaggagaacgcggggaccgaactcttgctgcagggttttgagcgccgcttcctggcggtgcgcacactgcgctccttcccctggcagagcttagaggcaaagttaagagactcatcagattctgagctgctgcgggatattttgcagaagactgtgaggcatcctgtgtgtgtgaagcacccgccgtcagtcaagtatgcctggtgctttctctcagaactcatcaaaaagtcctcaggaggctcagtcacactctccaagagcacagccatcatctcccacggtaccacaggcctggtcacatgggatgccgccctctaccttgcagaatgggccatcgagaacccggcagccttcattaacagacgtgctgtattgcccagaagccatcgtgtcgctggtcggggtcctgcagaggctggctgcctgccgggagcacaagcgggctcctgaggtctacgtggcctttaccgtccgcaacccagagacgtgccagctgttcaccaccgagctaggccgggatgggatcagatgggaagcggaagctcatcatgaccagaaactgtttccctatggagagcacttggagatggcaatgctgaacctcacactgtaggactcacacatgactccaaagggattgtgagaatcaagtcactctcgtgggaagaatttttatatgggaaagtggataaaactttcattggactggaatgtttggagattattaaactccaaatcaggaatcaaaactgccctctaataagacattagctgtctaggcgtgtgggtgccccctttctgccagcagttctggttctcaagaaaatcatcataaatcagacatgaaaattctagctccaaaaatagcattttctttctgcaaataaaaacgtgtgtatcaaggatgacgttcccccaacgtggacacactcggttcctcagaaagccaagcccgctgcagctgccacatccctggacacactcggttcctcacaaagccaagcccgctgcagctgccacat

SEQ ID NO: 5040 - protein, 153 aa, Homo sapiens; identical to SEQ ID NO: 1422

SEQ ID NO: 5041 - DNA, 1181 bp, Homo sapiens
tcctccaggtctcccggcaacggctgcggcctcgcccacgttatggcgcccgaggagaacgcggggaccgaactcttgctgcagggttttgagcgccgcttcctggcggtgcgcacactgcgctccttcccctggcaggcagtaatcgttctggtcactgggacacagctgcactcgcccattctaaaaagtcagcgccctcaggcccgcgggtaaccacctcctcctgagcgcggtgaccagagcttagaggcaaagttaagagactcatcagattctgagctgctgcgggatattttgcagaagactgtgaggcatcctgtgtgtgtgaagcacccgccgtcagtcaagtatgcctggtgctttctctcagaactcatcaaaaagtcctcaggaggctcagtcacactctccaagagcacagccatcatctcccacggtaccacaggcctggtcacatgggatgccgccctctaccttgcagaatgggccatcgagaacccggcagccttcattaacagacgtgctgtattgcccagaagccatcgtgtcgctggtcggggtcctgcagaggctggctgcctgccgggagcacaagcgggctcctgaggtctacgtggcctttaccgtccgcaacccagagacgtgccagctgttcaccaccgagctaggccgggatgggatcagatgggaagcggaagctcatcatgaccagaaactgtttccctatggagagcacttggagatggcaatgctgaacctcacactgtaggactcacacatgactccaaagggattgtgagaatcaagtcactctcgtgggaagaatttttatatgggaaagtggataaaactttcattggactggaatgtttggagattattaaactccaaatcaggaatcaaaactgccctctaataagacattagctgtctaggcgtgtgggtgccccctttctgccagcagttctggttctcaagaaaatcatcataaatcagacatgaaaattctagctccaaaaatagcattttctttctgcaaataaaaacgtgtgtatcaaggatgacgttcccccaacgtggacacactcggttcctcagaaagccaagcccgctgcagctgccacatccctggacacactcggttcctcacaaagccaagcccgctgcagctgccacat

SEQ ID NO: 5042 - protein, 139 aa, Homo sapiens; identical to SEQ ID NO: 1418

SEQ ID NO: 5043 - DNA, 1016 bp, Homo sapiens
gcttcctccaggtctcccggcaacggctgcggcctcgcccacgttatggcgcccgaggagaacgcggggaccgaactcttgctgcagggttttgagcgccgcttcctggcggtgcgcacactgcgctccttcccctggcagactgtgaggcatcctgtgtgtgtgaagcacccgccgtcagtcaagtatgcctggtgctttctctcagaactcatcaaaaagtcctcaggaggctcagtcacactctccaagagcacagccatcatctcccacggtaccacaggcctggtcacatgggatgccgccctctaccttgcagaatgggccatcgagaacccggcagccttcattaacagacgtgctgtattgcccagaagccatcgtgtcgctggtcggggtcctgcagaggctggctgcctgccgggagcacaagcgggctcctgaggtctacgtggcctttaccgtccgcaacccagagacgtgccagctgttcaccaccgagctaggccgggatgggatcagatgggaagcggaagctcatcatgaccagaaactgtttccctatggagagcacttggagatggcaatgctgaacctcacactgtaggactcacacatgactccaaagggattgtgagaatcaagtcactctcgtgggaagaatttttatatgggaaagtggataaaactttcattggactggaatgtttggagattattaaactccaaatcaggaatcaaaactgccctctaataagacattagctgtctaggcgtgtgggtgccccctttctgccagcagttctggttctcaagaaaatcatcataaatcagacatgaaaattctagctccaaaaatagcattttctttctgcaaataaaaacgtgtgtatcaaggatgacgttcccccaacgtggacacactcggttcctcagaaagccaagcccgctgcagctgccacatccctggacacactcggttcctcacaaagccaagcccgctgcagctgccacat

SEQ ID NO: 5044 - protein, 139 aa, Homo sapiens; identical to SEQ ID NO: 1418

SEQ ID NO: 5045 - DNA, 470 bp, Homo sapiens
ggcgcccgaggagaacgcggggaccgaactcttgctgcagggttttgagcgccgcttcctggcggtgcgcacactgcgctccttcccctggcagagcttagaggcaaagttaagagactcatcagattctgagctgctgcgggatattttgcagaagactgtgaggcatcctgtgtgtgtgaagcacccgccgtcagtcaagtatgcctggtgctttctctcagaactcatcaaaaagtcctcaggaggctcagtcacactctccaagagcacagccatcatctcccacggtaccacaggcctggtcacatgggatgccgccctctaccttgcagaatgggccatcgagaacccggcagccttcattaacaggactgtcctagagcttggcagtggtgccggcctcacaggccttgccatctgcaagatgtgccgcccccgggcatacatcttcagcgaccctcacagcc

SEQ ID NO: 5046 - protein, 59 aa, Homo sapiens
MPGAFSQNSSKSPQEAQSHSPRAQPSSPTVPQAWSHGMPPSTLQNGPSRTRQPSLTGLS

SEQ ID NO: 5047 - DNA, 557 bp, Homo sapiens
cggggcaggtcctgggtagagtccaggttggcggttcctggggcagggccaggatagggcgatcctggaagctgggcttcggaagcgtccagctgttgttccccaccagaaccaaatgagcgcaagatctgacaaagaaaaaaaaaggttcatcttttattcctccaaacactttcatttaaatcaagaggatgggatgtggttattgctgtgtttttagacagaatcaacggtttctgggtctgagatgttgcatacaccttctcagtccctgtatcctgagatggagtcacctgagaatccacagcaagtcctaaccagggatgggtctgggtgattaaggaaggttggcttcagaactgggccaggggcactgctttgcttttgctgttttgatcagctctctgcctgaaggagacaagaaaaaccaacgggaacagatagggtctctctctctgccacccaggccagagtgcagttgacgcagggcaggggagccccgaagtggagcatagtgtgtccggaactggtgggttcttggtctcactgacttcaag

SEQ ID NO: 5048 - protein, 41 aa, Homo sapiens
MGCGYCCVFRQNQRFLGLRCCIHLLSPCILRWSHLRIHSKS

SEQ ID NO: 5049 - DNA, 848 bp, Homo sapiens
ggaggggatcggaatgtggctcaagttcgggaggcgttacctgcggagggtttgaggcaggcccaggagcgagcccatggtcttccgacgcggggccaggggcggggcccaggatccggagcttcgtgcggggccgagtccagcgcctaccatgtgcctgacaagggagatgtaacggtgagaaaaactaggtgtggtccaggcccttcaggggctcaggtgctcgtggaagaagtggacattgaagtacttatcacacaaatgaggataaaagtacgataacgatatctaccacgaagctgttgttccccaccagaaccaaatgagcgcaagatctgacaaagaaaaaaaaaggttcatcttttattcctccaaacactttcatttaaatcaagaggatgggatgtggttattgctgtgtttttagacagaatcaacggtttctgggtctgagatgttgcatacaccttctcagtccctgtatcctgagatggagtcacctgagaatccacagcaagtcctaaccagggatgggtctgggtgattaaggaaggttggcttcagaactgggccaggggcactgctttgcttttgctgttttgatcagctctctgcctgaaggagacaagaaaaaccaacgggaacagctggggaaactgagttacagagcttgtctgcactgagtcatcaggagcaaatgctagatcagatagggtctctctctctgccacccaggccagagtgcagttgacgcagggcaggggagccccgaagtggagcatagtgtgtccggaactggtgggttcttggtctcactgacttcaagaaagaagccgcggaccctcgcg

SEQ ID NO: 5050 - protein, 32 aa, Homo sapiens [sequence omitted]

SEQ ID NO: 5051 - DNA, 1593 bp, Homo sapiens
atggaggacgactcactctacttgggaggtgagtggcagttcaaccacttttcaaaactcacatcttctcggccagatgcagcctttgctgaaatccagcggacttctctccctgagaagtcacaactctcaactgagacccgcgtcgacttctgcgatgatttggcgcctgtggcaagacagctcgctcccagggagaagcttcctctgagtagcaggagacctgctgcggtgggggctgggctccagaatatgggaaatacctgctacgtgaacgcttcccagcagtgtctgacatacataccgccccttgccaactacatgctgtcccgggagcactctcaaacatgtcatcgtcacaagtgctgcatgctctgtaccatggaagctcacatcacatggcccctccacattcctggccatgtcatccagccctcacaggcattggctgctggcttccatagaggcaagcaggaagctgcccttgaatttctcatgttcactgtggatgccatgaaaaaggcatgccttcccgggcacaagcaggtagatcatcactccaaggacaccaccctcatccaccaaatatttggagggtactggagatctcaaatcaagtgactccactgccacggcatttcagacacttttggcccttacctggacatcgccctggatatccaggaagctcagagtgtcaagcaagctttggaacagttggtgaagcccaaagaactcaatggagagaatgcctatcattgtggtctttgtctccagagggcgccggcctccaagacgtaaactttacacacttctgccaagatcctcatcctcgtatggaagagattctccgatgtcacaggcaacaaaattgccaagaatgtgcaatatcctgagtgccttgacatgcagccatacatgtctcagcagaacacaggacctcttgtctatgtcctctatgctgtgctggtccacgccgggtggagttgtcacaacggacattacttctcttatgtcaaagttcaagaaggccagtggtataaaatggatgatgccgaggtcactgcctctggcatcacctctgtcctgagtcaacaggcctatgtcctcttttacatccagaagagtgaatgggaaagacacagtgagagtgtgtcaagaggcagggaaccaagagccctcggcgctgaagacacagacaggcgagcaacgcaaggagagctcaagagagactacccctgcctccaggtacccgagttggacgagcacttggtggaaagagccactcaggaaagcaccttagaccactggaaattcctccaagagcaaaacaaaacgaagcctgagttcaacgtcagaaaacttgaaggtaccctgcctcccaacgtacttgtgattcatcaatcaaaatacaagtgtgggatgaaaaaccatcatcctgaacagcaaagctccctgctaaacctctcttcgacgaacccgacagatcaggagtccatgaacactggcacactcgcttctctgcaagggaggaccaggagatccaaagggaagaacaaacactgcaagagggctctgcttgtgtgccagtga

SEQ ID NO: 5052 - protein, 228 aa, Homo sapiens
MQPYMSQQNTGPLVYVLYAVLVHAGWSCHNGHYFSYVKVQEGQWYKMDDAEVTASGITSVLSQQAYVLFYIQKSEWERHSESVSRGREPRALGAEDTDRRATQGELKRDYPCLQVPELDEHLVERATQESTLDHWKFLQEQNKTKPEFNVRKLEGTLPPNVLVIHQSKYKCGMKNHHPEQQSSLLNLSSTNPTDQESMNTGTLASLQGRTRRSKGKNKHCKRALLVCQ

SEQ ID NO: 5053 - DNA, 1642 bp, Homo sapiens
atggcactgtatggagaacaggcaacagagagcatgataggaagaccttctaaaagaggtgatggatgggagagtgctgacatactatgtgaagctactatttggagttggacacgagtgcatgtgaccttgtgccacagcgggaatcttgactaccacacaaatgaatccattcaaatgttggcaagtggagcagagtcccaggacaggtacagaaacacccccagttcaagaatcttcacatctgaatttagtcctacacctgcaactaccccagttgtagagggtgatgctgctggcggctccctcccaattagcaccatttgcagcctcttttgaagacagagaactgagggctgtccttcaaatggagcagtgtgattccaaaaaaaagagatgctccttgtggtcctgggaccagggataggactccagctgagcctggtggaagaggtccacgtcctagcccaacggagagccatgcagctgagcttgggcgatgtggtccacgtggttgtttctgagtgtgtcctgaggttgctggatggcttgcagttccctatgcagatccaatgcttcttttgcttttttggttctgcaacctggaatttatatgttcaagatggagccatctcagccatgacaacagagaatgtaccactctcacatgaggaagaggggtaggaagtgctcctgtatcaccagcccttaatgagaccctgaggaaaccacatcatggagatcagcccttctctcctgtaaggaactcatcctatgaaagagcaattagtgcctgcaagagctgtctctgggacagctgttcatgtctatatctgcagggtaaccctcatagtcatatgcagtcatatccatagtcatatcgggagtcagactccagtttgactgagtgaatggagaaactaaacatttattactgaataataacattaataaaccatcttaatgatagtaataataaacatattgatgagtattaacaggaatgatgattattatgatactaatatccataattaataattttaatattgataataatactaaccctgtggacttgggacctagagagcagtttcccctgacaattatcccatatttggccacatggggtaatattgagttccagaaggcaaagattaacattcagaaaaataggaaaaacaacctgcaggtaggcatgtgcacacatggggactctatggataaatactaaagtgactcttgttctggatctccatgctaacaaacatgcaccagctttcaggaggtaggacagctggctgatggggcaaggcttcttgaggacatggcaggagtcagaaatcacacatgctgcccagcagcagagctcatgacaagcagtaaaccccagtgaaaggacctggctgcccttctgccatctgctctcccatggcctctgttgactggtacatctaggcactggaataaccttcactggctataggaaggcataatcctcagtattctcccacctgcaagaaagacaaaaattaattgaataccatggcttctgggtatccttagtgggcttagtgtattttgcatttgttttaacaggccagttatccaggcagtgactttcagtacagctacagtcacc

SEQ ID NO: 5054 - protein, 112 aa, Homo sapiens
MALYGEQATESMIGRPSKRGDGWESADILCEATIWSWTRVHVTLCHSGNLDYHTNESIQMLASGAESQDRYRNTPSSRIFTSEFSPTPATTPVVEGDAAGGSLPISTICSLF

SEQ ID NO: 5055 - DNA, 552 bp, Homo sapiens
accttctaaaagaggtgatggatgggagagtgctgacatactatgtgaagctactatttggagttggacacgagtgcatgtgaccttgtgccacagcgggaatcttgactaccacacaaatgaatccattcaaatgttggcaagtggagcagagtcccaggacaggtacagaaacacccccagttcaagaatcttcacatctgaatttagtcctacacctgcaactaccccagtttcatttcaacttaggtttaaggggttcttgataatctgacatgataagtggtgttggaattggcattaaaatccaccatgctctacagcacttcatccttcttcggcaggcaccaatttgatcttctactactttgcagacatctcttctgcaaacaccagacaaattgagacaatgaccttccgcaggacccaaaccacctcttactgcaggaaagaagatccagtgagatagttagtccacaaatggaatgtaaatccataaacactcttaagtaacagaataaatttagtatgagcatttttatgtgggagctc

SEQ ID NO: 5056 - protein, 48 aa, Homo sapiens
MNPFKCWQVEQSPRTGTETPPVQESSHLNLVLHLQLPQFHFNLGLRGS

SEQ ID NO: 5057 - DNA, 2499 bp, Homo sapiens
atctgtgcccttccagaagcaacccaggagccccgagacctgcagggatgtgtgcaccctgacccctgacgcctagtcctgcacctgcagccagctggcctcgggctgcaaacatggcgggtgcggtccaattgacggtggtttccaagcgcctcctggaggagaaaacacatgagggtgtggtcagggttctctgctgacagacctaccgtggggaagaaagagaaactctgaagatggatcatggccatgactgcatgtcaaggagaatctccttgaagacactgaggcctacgtcgaggtagagtaaatatggtccaattaaaaggtgaccagaggcagtataaaaggcagcctggaaagcagaggtccctctctgccccttcctccgtcgtcctggatgctgcatcgcttccagccgggctgctgcagcacctgcccatctcagcgccagccggggaaagaaagtagacgtgtaatttcaggtggcccaacagtcaacccctgaaaaaggcggtcacaaaacccccaggagacgaagatgacggcacgtcgtgaccccaaacctggggcaaagagactggtgagagcccagaccctccagaagcagcggagggccccagttgggccaagggctcccccgcccgatgaagaaaatcccaggctcaagtacaaaaactgcagggcccttggccacacggtcagaagtaccaggtgccccatgaagtgctggaaggcagccctggttccaccgaccttggggaaaaaggaagggaaggaaaacctgaaaccatggaagccccaggttgaagccaacccggggcccttgaacaaggataagggagagaaggaagagagaccaaggcaacaagacccgcagagaaaggctctcctccacatattttccgggaaacctccagagaagctgctgccaaatcgaaaaggatccacggaatcttctgtttttctgagggttgcaagccggccaatgccggtccacacaacaagtaagaggccgtgcgtggaccctgaactcgctgatcgctcagctaccgaaatgtctggcagaggctccgtcttggcttcactgtctcccctcagaaaagccagtctgagatcctcctcaagtcttggaccaaaggaaagacagacaggtgctgcggccgacatccctcagcctgcagtcaggcaccagggccccgagcctctcctcgtggtgaagccgacacacagcagccgtgagggtggctgccgagaagttccccaggctgcctccaaaacccacggcctgctccaggccgtcagaccccaggcacaagacaaacgtcctgcggtgacctgacagcccggcccaccagccgccacacacagcttgggcctaggctccaatctcagcttcagaccaggagccaagagacctgcccaggctccgattcagggttgcctgaacttccccaagaaaccgagactgggtcccttccagatccccgaaagcgccatccagggaggtgagctgggggccctggagaatctccaacctccgccagcagcaaccgaacttggaccaagtacgtcgccccagatgggcaggaggacacccgcccaggtgcccggcgtcgaccggcagcctccgcacagcagaccttgcctgcccactgcccaggcctgcaccatgtcccatcacccagcggccagccatgatggggcccagcctctcagagtgctcttccggagactagaaaacagacgctggagctccagcctcctggcggccccctcatttcactctcctgagaagctgggagtcttcctcgctcagagccctcatgtgtcagagaagtctgaggctccctgtgttcgtgtcccaccgaacgtcctctatgaagaccttcaggtttcctcctcctcagaggacagcgattctgacctgcagtgagactgcaggtggcaggggctccttggcctccagctcccgtgacttggaggggactgtgggactgaggagcgcagagcagagagcagactctgtgcggtgactccgaagctccccggctgtggcgcttctgtggatgtgggagcccaggccaggcagggagcagatgcagggactctgcctcattgaattctggtgagggacgttgtagttcgcgtggttctccggaaacgcgccaggaaaagcttccgtgccagagattcgttgcctcagaaactgcgtgacgcgcaggagtcagacttccgctgggacgtcaataggaaactggggaattactgtgtatttgctctctagatgactgaataagggaaaagttagggaaccctgagaggtgcagcccttccgctgtgccccgccctgagagcagtgtttcggacgctgggaagcgtgctgtgcgaagcgctctcggggtctttcctcagcctcgaaaactgggctctggaatgcctttgtaaacaggtgtgttgaatttgttttgaagtgaataaaattctcaaaaagatgat

SEQ ID NO: 5058 - protein, 266 aa, Homo sapiens; identical to SEQ ID NO: 656

SEQ ID NO: 5059 - DNA, 638 bp, Homo sapiens
gtcacagaacagtaatacgctagcaggggcatggggcatgaagaacagaagacaggaagcatttcagagactccaaagaagaaatcagggccaaccacagccctcccaagtccctaactccctcacttggacttgagacccttcacaacccagcagcgctccacctccaacttgacatcatgctttctggaaacttccccgtatgtcccactttcccacacttggtgccctggagcaccttccggcctctacatgctgtacgttcccctgtgagcaccctcctctcggcctctggccaacacagtcccacccatctgtgggtaacaagggggtgtgggtgttcttttcagccttgctaaactgtctgaatcaaggatcacaaactacagcctgcaggccaaatccagcccacagcctgtgtttgtaaataaagctttgttggaacaaagccacaccccttaatctacagatgatctgtggctactttcacaccacaacagagtaccatggttctgacagagactggggtaccctgtctaaatgacttctgacctggacatttactgaaaatcctcccaatcattctgttgacaagaatgatgtattactttttgcaataagaaacaagtaacctttgc

SEQ ID NO: 5060 - protein, 32 aa, Homo sapiens
MKNRRQEAFQRLQRRNQGQPQPSQVPNSLTWT

SEQ ID NO: 5061 - DNA, 2924 bp, Homo sapiens
caggggcacagatgtagacaactcgagctttgctgattgtgagaaaggtatgacaaatggccctgatggaattttcttcttgtacttacaggggaacagagcggcatcattccactattccaggggaggtgctaaatatgagggtgaggctgtcaagtggtccctggtggattcctacactcacccaagcagcaacgagacagagcggaaggagaacatcgatatcgtcatgaactggttcaccaaggaagactttgattttgtgactctgtgctacagagagccagataacgtgggacatcgattcgggccagaggcagagaaaaggaagttgatgattcagcaaatcgacaggaccatcgggtatctgaagagacccaatgtcaacaagatccccttgtccaactacgtcaagttcagggacctggtcaagtttgatattgtgcgctacggtggctttgggatgcccctgcccaagttggggcaagaggaagccctttaccaggcactgaagaatgcgcaccgtcacctccacgtctacaagaaggaggagtttccagaacacttccatatcgctaaacatgaccgggttctgccaatcgtgatgtatgccaactctggttacagtatcaatgggaccatgggctcgctcttgggcctgcctcaaaccctccgcaggtctcccggcaacggctgcggcctcgcccacgttatggcgcccgaggagaacgcggggaccgaactcttgctgcagggttttgagcgccgcttcctggcggtgcgcacactgcgctccttcccctggcagagcttagaggcaaagttaagagactcatcagattctgagctgctgcgggatattttgcagaagactgtgaggcatcctgtgtgtgtgaagcacccgccgtcagtcaagtatgcctggtgctttctctcagaactcatcaaaaagcacgaggctgtccacacggagcctttggacaaactgtacgaggtgctcgcggagactctgatggccaaggagtccacccagggccaccggagctatttgctgtcctcaggaggctcagtcacactctccaagagcacagccatcatctcccacggtaccacaggcctggtcacatgggatgccgccctctaccttgcagaatgggccatcgagaacccggcagccttcattaacaggactgtcctagagcttggcagtggtgccggcctcacaggccttgccatctgcaagatgtgccgcccccgggcatacatcttcagcgaccctcacagccggatcctcgagcagctccgagggaatgtccttctcaatggcctctcattagaggcagacatcactggcaacttagacagccccagggtgacagtggcccagctggactgggacgtagcaatggtccatcagctctctgccttccagccagatgttgtcattgcagcagacgtgctgtattgcccagaagccatcgtgtcgctggtcggggtcctgcagaggctggctgcctgccgggagcacaagcgggctcctgaggtctacgtggcctttaccgtccgcaacccagagacatgccagctgttcaccaccgagctagcctctgccccagctccccctgagcacagcccctcctggcagccatgtgcacagatgtacccgcagcagcctctgcctgtacacagagacatggatgacccagtgcctgtccaccattttctttctgcaaataaaaacgtgtgtatcaaggatgacgttcccccaacgtggacacactcagttcctcagaaagccaagcccgctgcagctgccacatccctggacacactcggttcctcacaaagccaagcccgctgcagctgccacatccctggacacactcggttcctcacaaagccaagcccgctgcagctgccacatccctggacacactcggttcctcacaaagccaagcccgctgcagctgccacatcccagggcttatggtgcagcaggcgcttttttcaagacaggaatgaaagtgttaggaacacggcagaaaggtgacacctggagaccaaatgcaggatgaggagtactgcagaggtcacagggaagtcacagaacagtaatacgctagcaggggcatggggcatgaagaacagaagacaggaagcatttcagagactccaaagaagaaatcagggccaaccacagcttcccgggtcattcaccaggtgacaccactgccgtcatttcagcttctggccactgggaggcgctgctcgaaaggctttgccctgagaccccaagaagctgcgggaaggacagcaggggccctggggttttagcctctggcccaggagttatgtgtccataaccaaagggagcacagtctgcacccagctctcatcccatcagagctgctgagactcttgcaggttcttccagaactggtttagcttgcctgcaggatcagaaaagtttgagaaaagcatctgcaaaatgctaaagagcagagcttaactcattgcctgtccccaccccatcccaggtcaccacttggctgaccccaggtccccgacccaacaacaacccctcccaagtccctaactccctcacttggacttgagacccttcacaacccagcagcgctccacctccaacttgacatcatgctttctggaaacttccccgtatgtcccactttcccacacttggtgccctggagcaccttccggcctctacatgctgtacgttcccctgtgagcaccctcctctcggcctctggccaacacagtcccacccatctgtgggtaacaagggggtgtgggtgttcttttcagccttgctaaactgtctgaatcaaggatcacaaactacagcctgcaggccaaatccagcccacagcctgtgtttgtaaataaagctttgttggaac

SEQ ID NO: 5062 - protein, 666 aa, Homo sapiens
MTNGPDGIFFLYLQGNRAASFHYSRGGAKYEGEAVKWSLVDSYTHPSSNETERKENIDIVMNWFTKEDFDFVTLCYREPDNVGHRFGPEAEKRKLMIQQIDRTIGYLKRPNVNKIPLSNYVKFRDLVKFDIVRYGGFGMPLPKLGQEEALYQALKNAHRHLHVYKKEEFPEHFHIAKHDRVLPIVMYANSGYSINGTMGSLLGLPQTLRRSPGNGCGLAHVMAPEENAGTELLLQGFERRFLAVRTLRSFPWQSLEAKLRDSSDSELLRDILQKTVRHPVCVKHPPSVKYAWCFLSELIKKHEAVHTEPLDKLYEVLAETLMAKESTQGHRSYLLSSGGSVTLSKSTAIISHGTTGLVTWDAALYLAEWAIENPAAFINRTVLELGSGAGLTGLAICKMCRPRAYIFSDPHSRILEQLRGNVLLNGLSLEADITGNLDSPRVTVAQLDWDVAMVHQLSAFQPDVVIAADVLYCPEAIVSLVGVLQRLAACREHKRAPEVYVAFTVRNPETCQLFTTELASAPAPPEHSPSWQPCAQMYPQQPLPVHRDMDDPVPVHHFLSANKNVCIKDDVPPTWTHSVPQKAKPAAAATSLDTLGSSQSQARCSCHIPGHTRFLTKPSPLQLPHPWTHSVPHKAKPAAAATSQGLWCSRRFFQDRNESVRNTAER

SEQ ID NO: 5063 - DNA, 921 bp, Homo sapiens
tctttgctgagggatcgggtagcctggagtttgccctctgctgtgttggcttgaagctcataggagacttaagacgggctctcaagcaaccaacgttctgtcctttgccgtagactgtgaggcatcctgtgtgtgtgaagcacccgccgtcagtcaagtatgcctggtgctttctctcagaactcatcaaaaagcacgaggctgtccacacggagcctttggacaaactgtacgaggtgctcgcggagactctgatggccaaggagtccacccagggccaccggagctatttgctgtcctcaggaggctcagtcacactctccaagagcacagccatcatctcccacggtaccacaggcctggtcacatgggatgccgccctctaccttgcagaatgggccatcgagaacccggcagccttcattaacagacgtgctgtattgcccagaagccatcgtgtcgctggtcggggtcctgcagaggctggctgcctgccgggagcacaagcgggctcctgaggtctacgtggcctttaccgtccgcaacccagagacatgccagctgttcaccaccgagctaggccgggatgggatcagatgggaagcggaagctcatcatgaccagaaactgtttccctatggagagcacttggagatggcaatgctgaacctcacactgtaggactcacacatgactccaaagggattgtgagaatcaagtcactctcgtgggaagaatttttatatgggaaagtggataaaactttcattggactggaatgtttggagattattaaactccaaatcaggaatcaaaactgccctctaataagacattagctgtctaggcgtgtgggtgccccctttctgccagcagttctggttctcaagaaaatcatcataaatcagacatgaaaattct

SEQ ID NO: 5064 - protein, 102 aa, Homo sapiens
MPPSTLQNGPSRTRQPSLTDVLYCPEAIVSLVGVLQRLAACREHKRAPEVYVAFTVRNPETCQLFTTELGRDGIRWEAEAHHDQKLFPYGEHLEMAMLNLTL

SEQ ID NO: 5065 - DNA, 907 bp, Homo sapiens
cgcccgaggagaacgcggggaccgaactcttgctgcagggttttgagcgccgcttcctggcggtgcgcacactgcgctccttcccctggcaggtgggcggcggggcgagcggagaggcccgcgggggtcgcgggagtccaggggcagacgggatgggtctccgtgctgaaacccccggcgctccggccacagcttagaggcaaagttaagagactcatcagattctgagctgctgcgggatattttgcagaagactgtgaggcatcctgtgtgtgtgaagcacccgccgtcagtcaagtatgcctggtgctttctctcagaactcatcaaaaagtcctcaggaggctcagtcacactctccaagagcacagccatcatctcccacggtaccacaggcctggtcacatgggatgccgccctctaccttgcagaatgggccatcgagaacccggcagccttcattaacagacgtgctgtattgcccagaagccatcgtgtcgctggtcggggtcctgcagaggctggctgcctgccgggagcacaagcgggctcctgaggtctacgtggcctttaccgtccgcaacccagagacatgccagctgttcaccaccgagctaggccgggatgggatcagatgggaagcggaagctcatcatgaccagaaactgtttccctatggagagcacttggagatggcaatgctgaacctcacactgtaggactcacacatgactccaaagggattgtgagaatcaagtcactctcgtgggaagaatttttatatgggaaagtggataaaactttcattggactggaatgtttggagattattaaactccaaatcaggaatcaaaactgccctctaataagacattagctgtctaggcgtgtgggtgccccctttctg

SEQ ID NO: 5066 - protein, 139 aa, Homo sapiens; identical to SEQ ID NO: 1418

SEQ ID NO: 5067 - DNA, 399 bp, Homo sapiens
taggtgaacccccacgcccacccgggcctacatggtgcccgagctgtccctgcaggactccagtggaagtgaaagaactgggcgctggggaaaagctaggatgctccacactcccacactatgcggggaactcgggcagaggccggccgggatgggatcagatgggaagcggaagctcatcatgaccagaaactgtttccctatggagagcacttggagatggcaatgctgaacctcacactgtaggactcacacatgactccaaagggattgtgagaatcaagtcactctcgtgggaagaatttttatatgggaaagtggataaaactttcattggactggaatgtttggagattattaaactccaaatcaggaatcaaaactgccctctaataagac

SEQ ID NO: 5068 - protein, 66 aa, Homo sapiens
MVPELSLQDSSGSERTGRWGKARMLHTPTLCGELGQRPAGMGSDGKRKLIMTRNCFPMESTWRWQC

SEQ ID NO: 5069 - DNA, 889 bp, Homo sapiens
gcccgaggagaacgcggggaccgaactcttgctgcagggttttgagcgccgcttcctggcggtgcgcacactgcgctccttcccctggcagagcttagaggcaaagttaagagactcatcagattctgagctgctgcgggatattttgcagaagactgtgaggcatcctgtgtgtgtgaagcacccgccgtcagtcaagtatgcctggtgctttctctcagaactcatcaaaaagagacaagatctctgttgcccaggctgtcctcgaactcctgggctcaagcagtcctcccacgtcagcctttagagtagctggaactattcgacacacaccaccacgcccaacgaaattagaacgaaagcaaacaagctctcactctgtctgcccccagcacgaggctgtccacacggagcctttggacaaactgtacgaggtgctcgcggagactctgatggccaaggagtccacccagggccaccggagctatttgctgtcctcaggaggctcagtcacactctccaagagcacagccatcatctcccacggtaccacaggcctggtcacatgggatgccgccctctaccttgcagaatgggccatcgagaacccggcagccttcattaacagacgtgctgtattgcccagaagccatcgtgtcgctggtcggggtcctgcagaggctggctgcctgccgggagcacaagcgggctcctgaggtctacgtggcctttaccgtccgcaacccagagacatgccagctgttcaccaccgagctaggccgggatgggatcagatgggaagcggaagctcatcatgaccagaaactgtttccctatggagagcacttggagatggcaatgctgaacctcacactgtaggactcacaca

SEQ ID NO: 5070 - protein, 171 aa, Homo sapiens [sequence omitted]

SEQ ID NO: 5071 - DNA, 1107 bp, Homo sapiens
cgcccacgttatggcgcccgaggagaacgcggggaccgaactcttgctgcagggttttgagcgccgcttcctggcggtgcgcacactgcgctccttcccctggcaggtgggcggcggggcgagcggagaggcccgcgggggtcgcgggagtccaggggcagacgggatgggtctccgtgctgaaacccccggcgctccggccacgtgagttcctgggctctcctcggtcagggccgcgagacccggtccccgtccctggggcctggccagagtcgctcgcaccccttctgccccgcgagctggcggcggaagctgggggcgtctccaccgccttagggggtagacgcgcgctcggtgtggggtacggttcacgatcattttcacgactttttaaaggcagtaatcgttctggtcactgggacacagctgcactcgcccattctaaaaagtcagcgccctcaggcccgcgggtaaccacctcctcctgagcgtggtgaccagagcttagaggcaaagttaagagactcatcagattctgagctgctgcgggatattttgcagaagactgtgaggcatcctgtgtgtgtgaagcacccgccgtcagtcaagtatgcctggtgctttctctcagaactcatcaaaaagtcctcaggaggctcagtcacactctccaagagcacagccatcatctcccacggtaccacaggcctggtcacatgggatgccgccctctaccttgcagaatgggccatcgagaacccggcagccttcattaacaggactgtcctagagcttggcagtggtgccggcctcacaggccttgccatctgcaagatgtgccgcccccgggcatacatcttcagcgaccctcacagccggatcctcgagcagctccgagggaatgtccttctcaatggcctctcattagaggcagacatcactggcaacttagacagccccagggtgacagtggcccagctggactgggacgtagcaatggtccatcagctctctgccttccagccagatgttgtcattgcagcagacgtgctgtattgcccagaagccatcgtgtcgctggtcggggtcctgcagaggctggctgcc

SEQ ID NO: 5072 - protein, 90 aa, Homo sapiens
MCRPRAYIFSDPHSRILEQLRGNVLLNGLSLEADITGNLDSPRVTVAQLDWDVAMVHQLSAFQPDVVIAADVLYCPEAIVSLVGVLQRLA

SEQ ID NO: 5073 - DNA, 638 bp, Homo sapiens
ggcgcccgaggagaacgcggggaccgaactcttgctgcagggttttgagcgccgcttcctggcggtgcgcacactgcgctccttcccctggcagagcttagaggcaaagttaagagactcatcagattctgagctgctgcgggatattttgcagaagactgtgaggcatcctgtgtgtgtgaagcacccgccgtcagtcaagtatgcctggtgctttctctcagaactcatcaaaaagtcctcaggaggctcagtcacactctccaagagcacagccatcatctcccacggtaccacaggcctggtcacatgggatgccgccctctaccttgcagaatgggccatcgagaacccggcagccttcattaacaggactgtcctagagcttggcagtggtgccggcctcacaggccttgccatctgcaagatgtgccgcccccgggcatacatcttcagcgaccctcacagccggatcctcgagcagctccgagggaatgtccttctcaatggcctctcattagaggcagacatcactggcaacttagacagccccagggtgacagtggcccagctggactgggacgtagcaatggtccatcagctctctgccttccagccagatgttgtcattgcagcag

SEQ ID NO: 5074 - protein, 59 aa, Homo sapiens; identical to SEQ ID NO: 5046

SEQ ID NO: 5075 - DNA, 557 bp, Homo sapiens; identical to SEQ ID NO: 5047

SEQ ID NO: 5076 - protein, 41 aa, Homo sapiens; identical to SEQ ID NO: 5048

SEQ ID NO: 5077 - DNA, 1179 bp, Homo sapiens
cagggactgggaggccggttggggctgggctcaggggccgagacctagctgggcttggggcggggccgagacggagcgaggggtccagggtgtgggaaacggggaggggtttgaggaggggatcggaatgtggctcaagttcgggaggcgttacctgcggagggtttgaggcaggcccaagagcgagcccatggtcttccgacgcggggccaggggcgggccccaggatccggagcttcgtgcggggccgagtccaggtttggggcccgggaggcggggccagttagggcgactgtccctgggatcgtcgggtcaggccttgggctaacgtaggcactctcgcagttcctccgccttcaggaaggtcttttcagcaggggccttacgggtgcatgcttcggtcctggaggccttatcctagcctcctctccatcagcgccacccgtctggggcccgaaaggagggagctttccctctgtcccccagcctttggactgtcaccaaacaagccattcgttcatcaaatactttttaagcgcctaccatgtgcctgacaagggagatgtaacggtgagaaaaactaggtgtggtccaggcccttcaggggctcaggtgctcgtggaagaagtggacattgaagtacttatcacacaaatgaggataaaagtacgatagcgatatctaccacgaagctgttgttccccaccagaaccaaatgagcgcaagatctgacaaagaaaaaaaaaggttcatcttttattcctccaaacactttcatttaaatcaagaggatgggatgtggttattgctgtgtttttagacagaatcaacggtttctgggtctgagatgttgcatacaccttctcagtccctgtatcctgagatggagtcacctgagaatccacagcaagtcctaaccagggatgggtctgggtgattaaggaaggttggcttcagaactgggccaggggcactgctttgcttttgctgttttgatcagctctctgcctgaaggagacaagaaaaaccaacgggaacagatagggtctctctctctgccacccaggccagagtgcagttgacgcagggcaggggagccccgaagtggagcatagtgtgtccggaactggtgggttcttggtctcactgacttcaagaaagaagccgcggaccctcgcg

SEQ ID NO: 5078 - protein, 53 aa, Homo sapiens
MLRSWRPYPSLLSISATRLGPERRELSLCPPAFGLSPNKPFVHQILFKRLPCA

SEQ ID NO: 5079 - DNA, 3159 bp, Homo sapiens
cagggactgggaggccggttggggctgggctcaggggccgagacctagctgggcttggggcggggccgagacggagcgaggggtccagggtgtgggaaacggggaggggtttgaggaggggatcggaatgtggctcaagttcgggaggcgttacctgcggagggtttgaggcaggcccaagagcgagcccatggtcttccgacgcggggccaggggcgggccccaggatccggagcttcgtgcggggccgagtccaggtttggggcccgggaggcggggccagttagggcgactgtccctgggatcgtcgggtcaggccttgggctaacgtaggcactctcgcagttcctccgccttcaggaaggtcttttcagcaggggccttacgggtgcatgcttcggtcctggaggccttatcctagcctcctctccatcagcgccacccgtctggggcccgaaaggagggagctttccctctgtcccccagcctttggactgtcaccaaacaagccattcgttcatcaaatactttttaagcgcctaccatgtgcctgacaagggagatgtaacggtgagaaaaactaggtgtggtccaggcccttcaggggctcaggtgctcgtggaagaagtggacattgaagtacttatcacacaaatgaggataaaagtacgatagcgatatctaccacgaagctgttgttccccaccagaaccaaatgagcgcaagatctgacaaagaaaaaaaaaggttcatcttttattcctccaaacactttcatttaaatcaagaggatgggatgtggttattgctgtgtttttagacagaatcaacggtttctgggtctgagatgttgcatacaccttctcagtccctgtatcctgagatggagtcacctgagaatccacagcaagtcctaaccagggatgggtctgggtgattaaggaaggttggcttcagaactgggccaggggcactgctttgcttttgctgttttgatcagctctctgcctgaaggagacaagaaaaaccaacgggaacagctggggaaactgagttacagagcttgtctgcactgagtcatcaggagcaaatgctagatcagatagggtctctctctctgccacccaggccagagtgcagttgacgcagggcaggggagccccgaagtggagcatagtgtgtccggaactggtgggttcttggtctcactgacttcaagaaagaagccgcggaccctcgcgttctacaaggcctggagctgataggaaaaacctcccttctttcccaaatggtccccagctgccccgttcactgaaggccctgcagtcaggaacggtcaggacttcacacccagttgttgtgggtgtttggccgacacgacacttcctcttgtgtgattcatggacccgcagcattgcgtcacctgggagcttttggtattgaagactctcagggctcacccggaaggacctgctgggccagaatctacattttaacaagatgcccagaaactcctggagggcagaggcatgcctgccatcttcatcattgcattaccaccacccaacactatcgggggacctgccctgataatcagagtcttcctctgtcgcctaggctggagggcagtggcatgatctcagctcactgaaacctccacctcccgggttcaagcgattcccctgcctcagcctcctgagtagtgtgggactacaggcgtattcaccatgcccggctaattttttttattttagtagaaacggggtttcaccatgttggccaggatggtctcaatctcctgacctcgtgactcgctcgcctcagcctctgaaagtgctgggattacaggtgtgagccactgcgcctggcctatatgaattttatatttacctgctcccttcaccaggagatcatgctgctgtgatgtcgagttttcttaacagcataaggaagacttgccctcttgccctatcaaagagaatagttttggaggggagaagtgggaccaaaaaagatgcagttttcatttgtattgggaaatgtgaaaataaaattgacaactcttttagttaaaaacaaaaaaaagaaaaggaaacaagatgtggggctgccatatgtaataccgtggattccacggatcttctactctggaggcaaatattatctttgctgaagccagaccaacctgacacaaagaccttttgtttttttaatgtgactgtgttttattttagaatgtgtaattcactttagaagggcaaagtacctgtctggggaagactatttaatttcctgcatttatttagaatgttggctgatgttattatgaagggaaacagctctaacaactgagtgccccccacatagccacagctcatgagttcacggggcaaaggaaatgaacagcagcctcctaatagccagccttctttgtgatgtggaaataattatcagcatgtaaaagactatatatatattcaacaattctgatcccctgaaaaattcaaatctacaactgatttgcttcctgggctcctgaaaacaactttgtcaaaattgttcagaaatataatcagccaatcgttgccccttggggacgcaggataaagcaagtcagccatgaccaatgaggagtcggccgtgcacaattacatgcagacctgcaggacatcgagtccctgctatggtccctccccagtcagacccccattgcctgggctgcagccagaagcattcaggcacaagtgcattcaacaaatacttatttaattgtattggtggttagagggttgcgattgattaaggcacattaatggatccgtgtcctccctgtatccaagattctgccatttgtctctgcagttcctcccactgaagaatcggagtatatttctccagtccctaatgttgggtttagtcatgtgtctagctttggccactggaatattaatctgtatgaccaaaaacttggaaagtgtgaattcatttctgctcactcactcctgctatcaccatgagaacaagcccaggccagactgctgcttccagcagaagagacagcaagagcaacgtcgagcttcccagacatgctcatgctagattgaccaatcctcagctgacccatagatccatgaaaataaacgattgttgtattaagcc

SEQ ID NO: 5080 - protein, 35 aa, Homo sapiens
MPAIFIIALPPPNTIGGPALIIRVFLCRLGWRAVA

SEQ ID NO: 5081 - DNA, 2290 bp, Homo sapiens
cagggactgggaggccggttggggctgggctcaggggccgagacctagctgggcttggggcggggccgagacggagcgaggggtccagggtgtgggaaacggggaggggtttgaggaggggatcggaatgtggctcaagttcgggaggcgttacctgcggagggtttgaggcaggcccaagagcgagcccatggtcttccgacgcggggccaggggcgggccccaggatccggagcttcgtgcggggccgagtccaggtttggggcccgggaggcggggccagttagggcgactgtccctgggatcgtcgggtcaggccttgggctaacgtaggcactctcgcagttcctccgccttcaggaaggtcttttcagcaggggccttacgggtgcatgcttcggtcctggaggccttatcctagcctcctctccatcagcgccacccgtctggggcccgaaaggagggagctttccctctgtcccccagcctttggactgtcaccaaacaagccattcgttcatcaaatactttttaagcgcctaccatgtgcctgacaagggagatgtaacggtgagaaaaactaggtgtggtccaggcccttcaggggctcaggtgctcgtggaagaagtggacattgaagtacttatcacacaaatgaggataaaagtacgatagcgatatctaccacgaagctgttgttccccaccagaaccaaatgagcgcaagatctgacaaagaaaaaaaaaggttcatcttttattcctccaaacactttcatttaaatcaagaggatgggatgtggttattgctgtgtttttagacagaatcaacggtttctgggtctgagatgttgcatacaccttctcagtccctgtatcctgagatggagtcacctgagaatccacagcaagtcctaaccagggatgggtctgggtgattaaggaaggttggcttcagaactgggccaggggcactgctttgcttttgctgttttgatcagctctctgcctgaaggagacaagaaaaaccaacgggaacagctggggaaactgagttacagagcttgtctgcactgagtcatcaggagcaaatgctagatcagatagggtctctctctctgccacccaggccagagtgcagttgacgcagggcaggggagccccgaagtggagcatagtgtgtccggaactggtgggttcttggtctcactgacttcaagaaagaagccgcggaccctcgcgaaactcctggagggcagaggcatgcctgccatcttcatcattgcattaccaccacccaacactatcgggggacctgccctgataatcagtctacaggtgtatccagcagctccagagagacagcgaccagcgagaaggggccatgatgatggaggtggttttgtcaaaacgaaaatggggatatgtagggaaaagaaagagagatcagactgttactgtgtctacatagaaagggaagacataagagactccattttgaaaaagacctgtactttaaacaattgctttgctgagatgttgttaatctgtagctttgccccagccactttgccccaaccactttgacccaatctggagctcataaaaacatgtgttgtatgaaatcaaggtttaaggcatgtagggctgtgcaggacgtgccttgttaaccaaatgtttgcaagcagtatacttggtaaaagtcatcaccattctctcatctcaataaaccaggggcacaatgcactgtggaaagccgcagggacctctgcccttgaaagctgggtattgtccaaagttcctccccatgtgatagtctgaaatatggcctcgtgggatgagaaagacctgacggtcccccagcgcgacacccataaaagatctgtgctgaggtggattagtcaaagaggaaagacttgcagttgagatagaggaaggccactgtctcctgactgcccctgggaactgaatgtctcggtataaaacacgattgtacatttgttcagttctgagatgggagaaaaaccgccctatggtgggaggcgagacatgtttacagcaatgctgccttgttatcctttactccactgagatgtctgggtggagagaaacataaatctggcttacatgcacgtccagtcatagtaccttcccttgaacttcattatgacatggattctattgctcacgtttgttgctgaccttctccttattatcaccctgccctcctactacattcctttttgctgaaataatgaagataataatcaataaaaactgagggaattcag

SEQ ID NO: 5082 - protein, 107 aa, Homo sapiens [sequence omitted]

SEQ ID NO: 5083 - DNA, 2593 bp, Homo sapiens
cagggactgggaggccggttggggctgggctcaggggccgagacctagctgggcttggggcggggccgagacggagcgaggggtccagggtgtgggaaacggggaggggtttgaggaggggatcggaatgtggctcaagttcgggaggcgttacctgcggagggtttgaggcaggcccaagagcgagcccatggtcttccgacgcggggccaggggcgggccccaggatccggagcttcgtgcggggccgagtccaggtttggggcccgggaggcggggccagttagggcgactgtccctgggatcgtcgggtcaggccttgggctaacgtaggcactctcgcagttcctccgccttcaggaaggtcttttcagcaggggccttacgggtgcatgcttcggtcctggaggccttatcctagcctcctctccatcagcgccacccgtctggggcccgaaaggagggagctttccctctgtcccccagcctttggactgtcaccaaacaagccattcgttcatcaaatactttttaagcgcctaccatgtgcctgacaagggagatgtaacggtgagaaaaactaggtgtggtccaggcccttcaggggctcaggtgctcgtggaagaagtggacattgaagtacttatcacacaaatgaggataaaagtacgatagcgatatctaccacgaagctgttgttccccaccagaaccaaatgagcgcaagatctgacaaagaaaaaaaaaggttcatcttttattcctccaaacactttcatttaaatcaagaggatgggatgtggttattgctgtgtttttagacagaatcaacggtttctgggtctgagatgttgcatacaccttctcagtccctgtatcctgagatggagtcacctgagaatccacagcaagtcctaaccagggatgggtctgggtgattaaggaaggttggcttcagaactgggccaggggcactgctttgcttttgctgttttgatcagctctctgcctgaaggagacaagaaaaaccaacgggaacagctggggaaactgagttacagagcttgtctgcactgagtcatcaggagcaaatgctagatcagatagggtctctctctctgccacccaggccagagtgcagttgacgcagggcaggggagccccgaagtggagcatagtgtgtccggaactggtgggttcttggtctcactgacttcaagaaagaagccgcggaccctcgcggtgagtgtcacagttcttaaaggctgcgtgtccagagtttgttccttctgatgctcggatgtgttcagagtttcttccttctggtggttttgtggtctcgctggcttcaggagtgaagctgcagaccttcaagaaatgaggcttctccccaggaccagcattccacgaaggcagcccttttctagatggagaaaacagaacctgaagacacccgtttccctaaactgctctcgctcatgtaaactcctggagggcagaggcatgcctgccatcttcatcattgcattaccaccacccaacactatcgggggacctgccctgataatcagtctacaggtgtatccagcagctccagagagacagcgaccagcgagaaggggccatgatgatggaggtggttttgtcaaaacgaaaatggggatatgtagggaaaagaaagagagatcagactgttactgtgtctacatagaaagggaagacataagagactccattttgaaaaagacctgtactttaaacaattgctttgctgagatgttgttaatctgtagctttgccccagccactttgccccaaccactttgacccaatctggagctcataaaaacatgtgttgtatgaaatcaaggtttaaggcatgtagggctgtgcaggacgtgccttgttaaccaaatgtttgcaagcagtatacttggtaaaagtcatcaccattctctcatctcaataaaccaggggcacaatgcactgtggaaagccgcagggacctctgcccttgaaagctgggtattgtccaaagttcctccccatgtgatagtctgaaatatggcctcgtgggatgagaaagacctgacggtcccccagcgcgacacccataaaagatctgtgctgaggtggattagtcaaagaggaaagacttgcagttgagatagaggaaggccactgtctcctgactgcccctgggaactgaatgtctcggtataaaacacgattgtacatttgttcagttctgagatgggagaaaaaccgccctatggtgggaggcgagacatgtttacagcaatgctgccttgttatcctttactccactgagatgtctgggtggagagaaacataaatctggcttacatgcacgtccagtcatagtaccttcccttgaacttcattatgacatggattctattgctcacgtttgttgctgaccttctccttattatcaccctgccctcctactacattcctttttgctgaaataatgaagataataatcaataaaaactgagggaattcagagacctgtgccagtgcaggtccttagcatgctaagcgccggtcccctgggcccgctgttgttt

SEQ ID NO: 5084 - protein, 149 aa, Homo sapiens
MRLLPRTSIPRRQPFSRWRKQNLKTPVSLNCSRSCKLLEGRGMPAIFIIALPPPNTIGGPALIISLQVYPAAPERQRPARRGHDDGGGFVKTKMGICREKKERSDCYCVYIEREDIRDSILKKTCTLNNCFAEMLLICSFAPATLPQPL

SEQ ID NO: 5085 - DNA, 618 bp, Homo sapiens
ccagttagggcgactgtccctgggatcgtcgggtcaggccttgggctaacgtaggcactctcgcagttcctccgccttcaggaaggtcttttcagcaggggccttacgggtgcatgcttcggtcctggaggccttatcctagcctcctctccatcagcgccacccgtctggggcccgaaaggagggagctttccctctgtcccccagcctttggactgtcaccaaacaagccattcgttcatcaaatactttttaagcgcctaccatgtgcctgacaagggagatgtaacggtgagaaaaactaggtgtggtccaggcccttcaggggctcaggtgctcgtggaagaagtggacattgaagtacttatcacacaaatgaggataaaagtacgatagcgatatctaccacgaagctgttgttccccaccagaaccaaatgagcgcaagatctgacaaagaaaaaaaaaggttcatcttttattcctccaaacactttcctttttgctgaaataatgaagataataatcaataaaaactgagggaattcagagacctgtgccagtgcaggtccttagcatgctaagcgccggtcccctgggcccgctgttgtttctctat

SEQ ID NO: 5086 - protein, 53 aa, Homo sapiens; identical to SEQ ID NO: 5078

SEQ ID NO: 5087 - DNA, 1148 bp, Homo sapiens
aatataattattttagttcaaagttattgtgtcttgagttgaaaggcagggcagttagcaacacagcttagatttcagtactgcccctgaaatctgaactgtgttcaaagtctaaaacgtttaccttagcaaattcctcatcaaactccatttggaagagtcccgagagctaatttgttaagtatacttgcaaaaggtagatgaggagacagataaaatcttattacctctttcagatgagaggcacttgagccctgctcagctatgagaataagagaggggaattaattctaattgaatacacttgttctcttatagctgttgttccccaccagaaccaaatgagcgcaagatctgacaaagaaaaaaaaagtccctgtatcctgagatggagtcacctgagaatccacagcaagtcctaaccagggatgggtctgggtgattaaggaaggttggcttcagaactgggccaggggcactgctttgcttttgctgttttgatcagctctctgcctgaaggagacaagaaaaaccaacgggaacagctggggaaactgagttacagagcttgtctgcactgagtcatcaggagcaaatgctagatcagatagggtctctctctctgccacccaggccagagtgcagttgacgcagggcaggggagccccgaagtggagcatagtgtgtccggaactggtgggttcttggtctcactgacttcaagaaagaagccgcggaccctcgcgaaactcctggagggcagaggcatgcctgccatcttcatcattgcattaccaccacccaacactatcgggggacctgccctgataatcagtctacaggtgtatccagcagctccagagagacagcgaccagcgagaaggggccatgatgatggaggtggttttgtcaaaacgaaaatggggatatgtagggaaaagaaagagagatcagactgttactgtgtctacatagaaagggaagacataagagactccattttgaaaaagacctgtactttaaacaattgctttgctgagatgttgttaatctgtagctttgccccagccactttgccccaaccactttgacccaatctggagctcataaaaacatgtgttgtatgaaatcaaggtttaaggcatgta

SEQ ID NO: 5088 - protein, 107 aa, Homo sapiens [sequence omitted]

SEQ ID NO: 5089 - DNA, 551 bp, Homo sapiens
agctgttgttccccaccagaaccaaatgagcgcaagatctgacaaagaaaaaaaaaggttcatcttttattcctccaaacactttcatttaaatcaagaggatgggatgtggttattgctgtgtttttagacagaatcaacggtttctgggtctgagatgttgcatacaccttctcagtccctgtatcctgagatggagtcacctgagaatccacagcaagtcctaaccagggatgggtctgggtgattaaggaaggttggcttcagaactgggccaggggcactgctttgcttttgctgttttgatcagctctctgcctgaaggagacaagaaaaaccaacgggaacagctggggaaactgagttacagagcttgtctgcactgagtcatcaggagcaaatgctagatcagatagggtctctctctctgccacccaggccagagtgcagttgacgcagggcaggggagccccgaagtggagcatagtgtgtccggaactggtgggttcttggtctcactgacttcaagaaagaagccgcggaccctcgcg

SEQ ID NO: 5090 - protein, 41 aa, Homo sapiens; identical to SEQ ID NO: 5048

SEQ ID NO: 5091 - DNA, 713 bp, Homo sapiens
gtcttgctctgttgctcaagctggagtgcagtagtgcaatcacagcttagtgcaggattgacctcctgggttcaagaaatcctgccacctcacctcctgagtagctaggattacagtaaaaccaacacaaaacagatgaaagaagtaaccatcggtagtcctgacatcaacatgagcttcaaccatcgttgaacatttttcaaccatggaacatattttgtcacaggatcaaccaccaacatgaatgacacagtgactacctggaccaggaagtttatgaccaatcgaccgttccagaggaaacaaatggtcaccaatgtccttcaccccggaaaggcaacaaaatgtacaagaccacaatggatgtcatcttcatattaatagttggactcagaacccattttggtggtggttaaacaatcgtcacccacattggagtgcagtggtacgatctcagctcaccaaatctctgcctcccaggcttaagcaattctcctgcctcagcctcccccgcagctaggattacaggcacgcaccactactgcctggctaatttttatgtttttagtagagatggggtttcaccttgttggccaggctggtcttgaactcctgacctcaaatgatccacccgccttggcctcccaaagtgctaagattacaggcatgggtcactgtgcccagccttttctgtattaaatttttaaaaacac

SEQ ID NO: 5092 - protein, 67 aa, Homo sapiens
MSFTPERQQNVQDHNGCHLHINSWTQNPFWWWLNNRHPHWSAVVRSQLTKSLPPRLKQFSCLSLPRS

SEQ ID NO: 5093 - DNA, 3026 bp, Homo sapiens
catatatatatacacacatatatatacacatatgtacatgtatatatgtgtacatatactcacatacatatatacatacacatgtatatgtgtgtgtacacacacatatatacatacacatgtatatgtgtgtgtatacacacgcatacatacacatgtatatgtgtgtgtgtacacacgcatatatacatacacatgtatatgtgtgtgtgtacacacgcatatatacatatgtatatgtgtgtgtacacacgcatatatacatacacatgtatatgtgtgtgtacacacgcatatatacatacacatgtatatgtgtgtgtacacacgcatatatacatacacatgtatatgtgtgtgtacacacgcatatatacatacacatgtatatgtgtgtgtacacacgcatatatacatacacatgtatatgtgtgtgtgtacacacgcatatatacatacacatgtatatgtgtgtgtgtacacacgcatatatacatacacatgtatatgtgtgtgtgtacacacgcatatatacatacacatgtatatgtgtgtgtacacacgcatatatacatacacatgtatatgtgtgtgtgtacacacgcatatatacatacacatgtatatgtgtgtgtgtacacacgcatatatacatacacatgtatatgtgtgtgtgtacacacgcatatatacatacacatgtatatgtgtgtgtgtacacacgcatatatacatacacatgtatatgtgtgtgtgtgtacacacgcatatatacatacacaagtatatgtgtgtgtgtgtacacacgcatatatacatacacatgtatatgtgtgtgtgtacacctacacatatatgtatacattgtggtgcaggggtacaatcatagctcattgcacccttgaacttcggggcttaagtgatcctgctacctcagcctcttgagcagctggggcaacaggcatgtgacaccacaccaatatttttttttgttgtttttgagacacggtctcactctgtcacttaggttggagtgcagtggcacaatctcagctcactgcaacctctgactcctaggttcaagcaattctcgtgcctcagcctcccaagtagctgggattatagacatgtgccactatgcccagctaagttttgtatttttagttgagatagagttgtgtcgtgttggccaggctggtttcgaatccctgggctgaagtgatccacttgccttggcctcccaaagtgctgggattacatgtgtgagccaccgcgcctagccctaattttttttttttttttaatatttgtagagatgaggtctcgctaatttgcccaggctggtcctgaactcttgggttcaagtaattctcctgcctcagcctctcaaagtgctgggattacaggcatgagacaccgttcccggctggtggtgaccatgatctgtcacccaggctggagtgcaatggtgtgatctcagctagctgaaacctctgccttctggattaaaccaattctcctgcctcagcctcctgggtagctgggattacaggtgtataccacaacgcccggctaattttttgtatttttaatagagacagtgtttcaccatgttggccaggctggtctcgaactcctgacctcgtgatctgccctctttggcctcccaaagtcctgggattacaggcatgagccaccatacccagccactcttgattaacttaatggaaatatttacagagattctttctcttctgggttctaacgtcttatctgtaacctctgcaggtaatacattttccttcctgatgatagcatttctatggttgctttcacttgcaaatcctctaatgcttatttattccatttctgattggcattagacataattctcaatttttagtgacagcacttcttttaacttacatataaatcgactttgtcttgaaatgtgacattgactagaaggatgaaacttctaacatgctgtagaacatagtttgactggctaatttattatttagaagaagctaatattgccattatgagggacttaggtgactctgaagaaccagtttcatttgtaatatttgcaatgttaaatcacagacattgccaacgtgaaatagtttccatatgctgtgttctcaatacacaccttttccaaagatatcccaagctgtagtcttagaagactgtgatttttcttatttgttctcacaggaatttggggagctatgctggatctccataaaatgagctccagaaagacacgtgtgcacacacacacactcacacatgtaccacaccgcacttgactctgtttatttgggacccatgattatcagaagtgctatttttaacaaatacttctgagaaataatctgaacacttaattggatgcaaaagagtggctatttactattctaccctttaattagcataatcagtgtttccagcagcaaaggcaattggaaaatcgcttgttttgttaggttcattattctcccttagcatagtgtggcatcagcatggctattattcttaaattgcctctttaaaacaagagctggtgcttcttacaggcaattcctaactcttgggttttgtagagggtccaaaactctttagaacctataattcaaggaaaggctccactttggttttacattttgtctggtctctttgggtgacagaatttatgtcacaaggtgcacatgttttggggaggctcatggacagcccatcgctcttgtgctttggtaggaaatatgtgcagttatggggaaggagttagttactcatctagggaacaattgggtagaaagagatggactccctgtatttgaaattcagaactcaagcttggctctaagtgtttccttgctttgctgtgctccacgggagtcactgagcagaaggaagcgagttgcctgagattcctcaaagcccgcagcccttttggaggttacattgttattctcagagcctttatgatacataataaagacctagcttggaccaac

SEQ ID NO: 5094 - protein, 299 aa, Homo sapiens
MCTYTHIHIYIHMYMCVYTHIYTYTCICVCIHTHTYTCICVCVHTHIYIHMYMCVCTHAYIHMYMCVYTRIYTYTCICVCTHAYIHTHVYVCVHTHIYIHMYMCVYTRIYTYTCICVCTHAYIHTHVYVCVYTRIYTYTCICVCVHTHIYIHMYMCVCTHAYIHTHVYVCVHTHIYIHMYMCVCTHAYIHTHVYVCVYTRIYTYTCICVCVHTHIYIHMYMCVCTHAYIHTHVYVCVCTHAYIHTQVYVCVCTHAYIHTHVYVCVYTYTYMYTLWCRGTIIAHCTLELRGLSDPATSAS

SEQ ID NO: 5095 - DNA, 1333 bp, Homo sapiens
gtctgttattccctggcagttctacaaggcctggagctgataggaaaaacctcccttctttcccaaatggtccccagctgccccgttcactgaaggccctgcagtcaggaacggtcaggacttcacacccagttgttgtgggtgtttggccgacacgacacttcctcttgtgtgattcatggacccgcagcattgcgtcacctgggagcttttggtattgaagactctcagggctcacccggaaggacctgctgggccagaatctacattttaacaagatgcccagaaactcctggagggcagaggcatgcctgccatcttcatcattgcattaccaccacccaacactatcgggggacctgccctgataatcagtctacaggtgtatccagcagctccagagagacagcgaccagcgagaaggggccatgatgatggaggtggttttgtcaaaacgaaaatggggatatgtagggaaaagaaagagagatcagactgttactgtgtctacatagaaagggaagacataagagactccattttgaaaaagacctgtactttaaacaattgctttgctgagatgttgttaatctgtagctttgccccagccactttgccccaaccactttgacccaatctggagctcataaaaacatgtgttgtatgaaatcaaggtttaaggcatgtagggctgtgcaggacgtgccttgttaaccaaatgtttgcaagcagtatacttggtaaaagtcatcaccattctctcatctcaataaaccaggggcacaatgcactgtggaaagccgcagggacctctgcccttgaaagctgggtattgtccaaagttcctccccatgtgatagtctgaaatatggcctcgtgggatgagaaagacctgacggtcccccagcgcgacacccataaaagatctgtgctgaggtggattagtcaaagaggaaagacttgcagttgagatagaggaaggccactgtctcctgactgcccctgggaactgaatgtctcggtataaaacacgattgtacatttgttcagttctgagatgggagaaaaaccgccctatggtgggaggcgagacatgtttacagcaatgctgccttgttatcctttactccactgagatgtctgggtggagagaaacataaatctggcttacatgcacgtccagtcatagtaccttcccttgaacttcattatgacatggattctattgctcacgtttgttgctgaccttctccttattatcaccctgccctcctactacattcctttttgctgaaataatgaagataataatcaataaaaactgagggaattc

SEQ ID NO: 5096 - protein, 107 aa, Homo sapiens [sequence omitted]

SEQ ID NO: 5097 - DNA, 2418 bp, Homo sapiens
ctcaggtgatccacccgccttggcctcccaaattgctgggattacaggcgtgagtcaccgtgcccagtctggatgagggtctttagcaaagatggaagttttggtaccttgcagtttagtctcttcatttatgtcctcctgaaatcttcaggaattgcactattttgtcaatacttctggggtcgtacttagggggacttaaaggagatgtgatgtggcagcctttgactcaagggagtatcatactagctcaaagagatctgggtacatgccagttgaaccaactcttctgaggatgtgatagatcctgggaggccactctgatcctgccaacgttgaggccagatgagtctttgaaaaacatggtttggcttaacaccagcacttactctaacacccaccatgaatcttgctgaactgaagctatacaaataccttttcaaaagattttttttcattcaagatccttcttagaaattcctaaggctcaatgctttgtggaagattctgagaaagaaaatagtttccgatctttgggattcccgagatggtccaatctgcaaaaagttcattgccatttccatcaaggacactgagaacaagagtcttatctggattggatcctgggaattgagaagcttcagcagggcttccgctgggactaggatcaggatgtgaacacccccaacctggaccatctggccagggagggcgtcaaggccaagtacctcatgccgccccttgtgacaatgacctccccgtcccacttcactgccatcacagaactctgtacttactgctccgtcactggtaatgacaatgaacatcttcacaatctcaggttttattgcaaagtgattgaggaccagttagaataagttatgctgcagaaactaaagaaatcccgtcaagcaaattgtgtgtcatagaaagtcttaggacagccgtgtatattttctcccccaatgaatcaattgaaaatgagaagctcttaccgccatgttccgggcagaagctatcaaaagtataagccatgatattataatttgatgatttttcatgcgtcaaatggttatggcccaggggtgaaaagtggatgctccgtaactagatgatggtcaagagttataaaaatgaggtcctctctgttcaacatttctcctttcttgaaaggatactcaatatcatgctcagggcctctaatggccagaaataaagttcctcccagttccagagcaccccaggataaccccaaaaccagagcaactgcttatttccatatagactatatactgtgcaactcccggggtggcattttcataaatatgtgggtggcgccccctggaggtaagcaatgcacaacttgcacaaatggtaagacaccgtatcccaaagtccacaaagaagagctaagcaaaactcccatcgatgttgccatcggtaatgagtctgccttttcttcatgggacagtagcaaaaacaatttggccaagtgtgcttggatgatctctaagatggaatcagggtctctcactttcagcactattgacatttggggctggatcattcttttgtcttagtgggagttgtccggggcattgtaggatgcttagcagcatcgctggcctctacccattagctgccagtagcaccacctcctccagccgcaaccaccaaaattgtctccagacatggccacgtgttctctggggggcaaaatcaccccctggctgaaaagccctgaagtaaagacataatatgcagatcacatgtaagtaagggagcctaagggccacacaggtgatgctgtacccatgacaaagacagagtcttaaagaggttagagaggcggagaaagagaaaggaaatgaagtcccagttgcctagagcaacagatgctgactagatgttgttgatagtcatctttaaactgagttaaaagatgctgagaagccatcagctcccatcctgctctccagggacaacgctgctgaaaaaaggcctggagatcaacaaagccccaaacacaggtgcactgagcaaagaaaccagagattgagacaaaatgacattccctcaaagactacacatttccaagaggagagaaaaagtggagtcatgaaaaacagttgaggctggatagagtgactcacacctgtaatcccagcactttgggattactcccagtctgagacgggaagactgcttgaactcaggagttcaagaccagcctgggcaacgtagcaagaccttgcctctagaaaaagggaaaaaattagccaggtgtggtaatacatgcctgtggtctcagctactcgggaggctgaggtgggaggatcacttgaacccaggaggtagaggctgcagtgagccgggatcgcaccactgcactccagcctgggctacagatcctgtccc

SEQ ID NO: 5098 - protein, 48 aa, Homo sapiens
MPPLVTMTSPSHFTAITELCTYCSVTGNDNEHLHNLRFYCKVIEDQLE

SEQ ID NO: 5099 - DNA, 3959 bp, Homo sapiens
acgagcccgcgctcagactccccagctccgccgagaggacgctcgcgctgggtccttcttcttccccaagtgcaggcagagcccccggagtcatggccagcccttccggcagctccgaagccactggcaagccctgaggtagggatggctggcccaggagggaggaggacgacgtccctcccgaagagaagaggctgcggctgttgctggaggggggaagcgcacagcccgaggactgcgaggacggggaggacgcgccgcggccgggcagggaggagaccggcacccagacaggtggcgacggcaaaggagcggaattctccacgagttttgagcagcctcggttttcccaccccctccaaatcatggaagaaacagggtaagagcaaagacaaggtggctgtggcctatgtctaccctctcggggcgtcccttgtcttctctcctccttgggcagggagaccatcggagtgcaacctggctggggcggggaggaggtgcagggcctggccagagcgggcctggccacgggcaagggacagcgacctcctgggccaggacaggtgagcgcggcgcaggcccgggcccggcgtgtccgcgctgcgcgggagaggccagcagagggcgccagagagccaggagcggcccgcggaggagcccgcgcccgccccgatgcccagctccgcgcctcgcggacccagcaagctcgcgctcagacgccccagctccgccgagaggacgctcgccccgggtgcttctttttccccaagtgcaggcagagcccctggagccatggccagcccttccggcagctccgaagccactggcaagccccgaggcagggatggccggcccaggagggaggaggacgacgtccctcctgaagagaagaggctgcggctgttgctggaggggggaagagcacagcccgaggactgcgaggacggggaggacgcgctgcggccgggcaaggaggacaccggcacccagacaggtggcgacggcagaggagcggaattctccacgagttttgagcagcctcgggtttcccaccacctccaaatcatggaagacacagggcagagcccgcggagccatggccagcccttccagcagctccgaagccactggcaagccgcgaggcagggatggcagtcccaggatgggggaggaggacgtccctcccgaagagaagaggctggggctgtagctggaggggggaagcgcacagcccgaggactgcgaggacggggaggacccgccgctaccgggcaggaaggagaccggcacccagacaggtggcgacggcaaaggagcggaattctccacgagttttgagcagcctcgggtttcccaccacctccaaatcatggaagacacacggtgcaggcagagccccccagccgtggccagcccttccggcagctccgaagccactggcaagccccgaggcagggatggccggcccaggagggaggaggacgacgtccctcccgaagagaagaggctgcggctgtagctggaggggggaagcgcagaacccgaggactgcgaggacggggaggacgcgccgcggccaggcagggaggagaccggcacccagacaggtggcgaaggcagaggagtctgttcttcccctggattgtaaactccttgatgtctgggtcatctcagctcatgagctgagctttcagtgggtgctcagtggaacaggtgctgaatggagtccggctctagggaggccagggtgtgttggaaggaaaatacatgtacagccaacttccttgagggttcgttcttttgcatcagggtgtctcaaactgatgcccttaaaacacctgtaagagaatcatccaggcggcttgcttgctctgcatgcaggccctttagaatcagactcagaatccctggggctggagccacaaaatgaaatgacatttcaacgagtttgtcatcatgtgagagagaataggcacagagaagttgcccatgactctgtgatccgttttgtccaatgaaccatgagcagcagcaacttgagtcacctccaggtggaagtgttaagaggttgctctatgatccaccacattccctttgccctgaagtggagatcaaggacacatgcagagatggggcttttgtcagcctggatccctgagtgaacacaatgaacagaccaccccagaatgccctaacacagcccagacatgcaacgtgaccaagaataagcctcactgtggccaggcatggtggctcatgcctgtcatcccagcactttgggaggccaaggtgggtggatcatttgaggtcaggagttcaagaccaacctggctaacagggtgaaatcctgtctctactaagtacaaagattagccagacagtggtggcatgggcctgtaatcccagctactcaggaggcaggagaatcacttgagtctgggaggcagaggttgcagtgagctgagattgcaccactgcactctagtctgggtgacagagtgagaccctgtctcaaaaacaaacaaacaaatacctcactgcatgaggccactgagatttggggtttgttgttactgcaccagaacccaaatcatcctgaccgctagggtgtcctaactagggtttcttaccaaaagcaaaggcatttttaaagttcgtgacatttaaacaaaagagcaaataccaatatctaccactttgtcaggctaaaaaacccaaacaaagccaacagccagaagttaaaataaacagatcattaggttgaaaatagaactgtcaaaacaggcacaattgacttcatttagtgattgcaaagaacatcaggcaagacacaggtatgctcatcataacatttatcacatgcttcattgcacatgtttgactaagaaaaacaaagtatttaagctcatctgtagctcaaagtgcctatccgtgtatttatctattcatcctgatttatttattgagcaactcttttgtgccaggcactgtgctgtgttgcgggaagtcagggaccccaaatggagggaccagctgaagccatgacagaagaacgtggattatgaagattttatggacatttattagttccccaaattaatacttttttaatttcttatgcctgtctttactgcaatctctaaacataaattgtgaagatttcatggacacttatcacttccccaatcaatacccttgtgatttcctatgcctatcattactttaatctcttaatcctgtcagtcgagaaggatgtatatcgtctcaggacctgtaataattgcgttaagtacataaattgtacatcatgtgtgtttgagcaatatgaaatgtgggcaccctgaaaaaagaacaggataacagcaattgttcagggaattagagagataaccttaaactctgaccgctggtgagccaggcagaacagaaccatatttctcttctttcaaaagcaaatgggagaaatatcgctgaattccttttctcagcatggaacgtccctgagaaagagaatgcgcacctaggggtaggtctctgaactggccccccggggcgtacctgtctcttatggtcgagattgcagaggtgaaataaactccagtctcccatagcactcccaggcttattaggaagagaaaattcccgcctaataaactttggtcagacgggttgatctcaaaaccctgtctcctcataagatgttatcaatgacaatggtgccaaaacttcattagcaattttaatttcacttccgtcctgtggtctggccctgtctccacttgccttgtgatattctattaccctgttaagtacttgatgtctgtcacccacacctattcatatactccctccccttttgaaactccctaataaaaacttgctggtttttgtggcttgtgggacatcacggatcctaccaatgtgtgatgtctcccccagatgcccagctttacaatttc

SEQ ID NO: 5100 - protein, 266 aa, Homo sapiens
MSTLSGRPLSSLLLGQGDHRSATWLGRGGGAGPGQSGPGHGQGTATSWARTGERGAGPGPACPRCAGEASRGRQRARSGPRRSPRPPRCPAPRLADPASSRSDAPAPPRGRSPRVLLFPQVQAEPLEPWPALPAAPKPLASPEAGMAGPGGRRTTSLLKRRGCGCCWRGEEHSPRTARTGRTRCGRARRTPAPRQVATAEERNSPRVLSSLGFPTTSKSWKTQGRARGAMASPSSSSEATGKPRGRDGSPRMGEEDVPPEEKRLGL

SEQ ID NO: 5101 - DNA, 1370 bp, Homo sapiens
tggggggctttgagatatggaagaggtttacagtcaattgttatagcaaatatggtttggaatttatttgtgatgcttaaaaatattgctgaacagaagtgaagtctgccctagagttggatggtgagattatttagtggaactaccagatccctgttgtgattctttccagtatcattcagcagcccttgggcagttgcgaggcaagtcgtcaatggggtatggagattttccaggtgggtgtggttgaaggaagggaagaaagagtttaggagcacattacaagaagaaggtgactgtaaggtccaggctgagcaggaaggtaaagcaagaaggaaacatgaggttgtgaagagaatttaaaaaagttccttcttacccaaaagaaaaaaaagatagcaaccttatgttggttctcaaattaaaaaaatatttttactcgttcataaaatagaaaaatctgagaatctgtagcttagagaactacagtgtgggatgtctataaagaccaggttattttatcagctcctaacaccccttaatagaagcttagccaagacttgcactatttcagtctttcccattccacattccatggactcttgaagagacattgatgaaacggtgcagccatgaaccaccctcactcaatcctagtggcagaatcccccttttactgcagaatgagcttcttgctacagtgatacttgaaccccttagatatatcctgtactaattatattaaaacacgaccaatgcttttgctttgttgtcccccaaattaaacaccttaatcatgagaacccagagaattggatttagtgtaactgattccaaactgtcagcaagaacataatttatatttttctccaattcaattaaaagaaaattgacaataaaaagctgatcaatacgtgtagctcaggaggtagagcctgctttgagatgcagaagtgtttttttttttttagatctatattcttgagtaaagaaaaaatccatctttctttcctagaggggaagagtttcagagctgggcttggcaacagcctgactatcagaggctgaattaaacaaatagatacctccctggagtgaatggtgtgtttctcctgtttggggaaccgtgcttttatggggcagtttgcgttctgtcttggtctccggatgtgtgtatctgtgggtggatgtctgcatgtaaatggaagtgtatacctgtgtgggtgtgtacaaaattcccatgtgaatctcagctttgtggggatctccagttcttgagcccagtagatgccatttgaagaaaaaatcacttgaaaatgagacagaaagaatagaaactaaatcctagctctaaaggcaccaggctgatt

SEQ ID NO: 5102 - protein, 59 aa, Homo sapiens
MVCFSCLGNRAFMGQFAFCLGLRMCVSVGGCLHVNGSVYLCGCVQNSHVNLSFVGISSS

SEQ ID NO: 5103 - DNA, 1238 bp, Homo sapiens
caggaacatttaaccacagggccagcaggctggatcttgatatgtgtttcttagttggaaagattttggaccatagagaaatgtcttctcaattcttttaatttcattaaggtggtcatttttcttcttgtggcctctggaatgtgacacagaactcaagggacaggaaggagatgagttggaggctgggacaggggtccctgccagggatgctggtgactcacgtgacggtgttgatgtgtggagtccggtgcctggtttggggaatgttcgtgggatatgttccaaaggactgacagacctatcaggtactggaggtgaatggtcaagtctgatctcagggctgacagtgtcaggcaaggacaggaagttggcattggtctcattggctgaggttgttgggacccagggggcaatgtgtgccaggacagatgggtctggggctaggaaggcaggtttgggctggcgacccgggcatgggaggcatcccaggtagacagtggttgaggctgtggaaatgaccgcgattgcctgggatgagagtggagacagacaagatggaggttttgctttaagcctggggagcccacctcccaggttcaagcgattctcctgcctcagcttcccaagtagctgcaatcccagctacttgggaggctgaggcaggagaatcgtttgcacctgggagacagaggttgcagtcagccgagattgaaccactgtacttcagccagcctgggtgacagagcgagactctgtttcaaaaataaataaataaataaaatagaattctgaattttatttttaataattatttttgtaaagagaatgtcttgttttttggagttgttgaatttattgaattggcaaaaattatgtacaagagggtatacaacatgatgtgattgaggtatgtatacattatgaaatggctaaatcaagctaaataacatatcacctcccagacttactttttggggtgagaacacttaaacaatctactctcttagtgatttccaagtgtatgatatgttgttattaactataggtaccttgttgtcccatggatctcctgaacttattcttcttctctaaaaatgacattctgtgtcctttggcatctgcccacttccccaccctggcaaccatcattctactctgcttctgtgaattcaacttttttcttctctttttttttttcttttttttgagaaaatctccttctattgcccaggctg

SEQ ID NO: 5104 - protein, 47 aa, Homo sapiens [sequence omitted]

SEQ ID NO: 5105 - DNA, 1770 bp, Homo sapiens
ggcagagcccccggagtcatggccagcccttccggcagctccgaagccactggcaagccctgaggtagggatggctggcccaggagggaggaggacgacgtccctcccgaagagaagaggctgcggctgttgctggaggggggaagcgcacagcccgaggactgcgaggacggggaggacgcgccgcggccgggcagggaggagaccggcacccagacaggtggcgacggcaaaggagcggaattctccacgagttttgagcagcctcggttttcccaccccctccaaatcatggaagaaacagggtaagagcaaagacaaggtggctgtggcctatgtctaccctctcggggcgtcccttgtcttctctcctccttgggcagggagaccatcggagtgcaacctggctggggcggggaggaggtgcagggcctggccagagcgggcctggccacgggcaagggacagcgacctcctgggccaggacaggtgagcgcggcgcaggcccgggcccggcgtgtccgcgctgcgcgggagaggccagcagagggcgccagagagccaggagcggcccgcggaggagcccgcgcccgccccgatgcccagctccgcgcctcgcggacccagcaagctcgcgctcagacgccccagctccgccgagaggacgctcgccccgggtgcttctttttccccaagtgcaggcagagcccctggagccatggccagcccttccggcagctccgaagccactggcaagccccgaggcagggatggccggcccaggagggaggaggacgacgtccctcctgaagagaagaggctgcggctgttgctggaggggggaagagcacagcccgaggactgcgaggacggggaggacgcgctgcggccgggcaaggaggacaccggcacccagacaggtggcgacggcagaggagcggaattctccacgagttttgagcagcctcgggtttcccaccacctccaaatcatggaagacacagggtgcaggcagagccccccagccgtggccagcccttccggcagctccgaagccactggcaagccccgaggcagggatggccggcccaggagggaggaggacgacgtccctcccgaagagaagaggctgcggctgtagctggaggggggaagcgcagaacccgaggactgcgaggacggggaggacgcgccgcggccaggcagggaggagaccggcacccagacaggtggcgaaggcagaggagtggtcatttttcttcttgtggcctctggaatgtgacacagaactcaagggacaggaaggagatgagttggaggctgggacaggggtccctgccagggatgctggtgactcacgtgacggtgttgatgtgtggagtccggtgcctggtttggggaatgttcgtgggatatgttccaaaggactgacagacctatcaggtgcagtggttcacacctgtaatcccagcactttgggaggccgaggctggcggatcacctaaggtcaggagttcgagaccagcctggtcaacatggcaaaactgtctctactaaaaatacagaaattagccaggtgtgatggcacacacctgcaatcccagctacttgggaggctgaggcaggagaatcgtttgcacctgggagacagaggttgcagtcagccgagattgaaccactgtacttcagccagcctgggtgacagagcgagactctgtttcaaaaataaataaataaataaaatagaattctgaattttatttttaataa

SEQ ID NO: 5106 - protein, 389 aa, Homo sapiens [sequence omitted]

SEQ ID NO: 5107 - DNA, 1768 bp, Homo sapiens
ggcagagcccccggagtcatggccagcccttccggcagctccgaagccactggcaagccctgaggtagggatggctggcccaggagggaggaggacgacgtccctcccgaagagaagaggctgcggctgttgctggaggggggaagcgcacagcccgaggactgcgaggacggggaggacgcgccgcggccgggcagggaggagaccggcacccagacaggtggcgacggcaaaggagcggaattctccacgagttttgagcagcctcggttttcccaccccctccaaatcatggaagaaacagggtaagagcaaagacaaggtggctgtggcctatgtctaccctctcggggcgtcccttgtcttctctcctccttgggcagggagaccatcggagtgcaacctggctggggcggggaggaggtgcagggcctggccagagcgggcctggccacgggcaagggacagcgacctcctgggccaggacaggtgagcgcggcgcaggcccgggcccggcgtgtccgcgctgcgcgggagaggccagcagagggcgccagagagccaggagcggcccgcggaggagcccgcgcccgccccgatgcccagctccgcgcctcgcggacccagcaagctcgcgctcagacgccccagctccgccgagaggacgctcgccccgggtgcttctttttccccaagtgcaggcagagcccctggagccatggccagcccttccggcagctccgaagccactggcaagccccgaggcagggatggccggcccaggagggaggaggacgacgtccctcctgaagagaagaggctgcggctgttgctggaggggggaagagcacagcccgaggactgcgaggacggggaggacgcgctgcggccgggcaaggaggacaccggcacccagacaggtggcgacggcagaggagcggaattctccacgagttttgagcagcctcgggtttcccaccacctccaaatcatggaagacacacggtgcaggcagagccccccagccgtggccagcccttccggcagctccgaagccactggcaagccccgaggcagggatggccggcccaggagggaggaggacgacgtccctcccgaagagaagaggctgcggctgtagctggaggggggaagcgcagaacccgaggactgcgaggacggggaggacgcgccgcggccaggcagggaggagaccggcacccagacaggtggcgaaggcagaggagtggtcatttttcttcttgtggcctctggaatgtgacacagaactcaagggacaggaaggagatgagttggaggctgggacaggggtccctgccagggatgctggtgactcacgtgacggtgttgatgtgtggagtccggtgcctggtttggggaatgttcgtgggatatgttccaaaggactgacagacctatcaggtgcagtggttcacacctgtaatcccagcactttgggaggccgaggctggcggatcacctaaggtcaggagttcgagaccagcctggtcaacatggcaaaactgtctctactaaaaatacagaaattagccaggtgtgatggcacacacctgcaatcccagctacttgggaggctgaggcaggagaatcgtttgcacctgggagacagaggttgcagtcagccgagattgaaccactgtacttcagccagcctgggtgacagagcgagactctgtttcaaaaataaataaataaataaaatagaattctgaattttatttttaat

SEQ ID NO: 5108 - protein, 389 aa, Homo sapiens
MSTLSGRPLSSLLLGQGDHRSATWLGRGGGAGPGQSGPGHGQGTATSWARTGERGAGPGPACPRCAGEASRGRQRARSGPRRSPRPPRCPAPRLADPASSRSDAPAPPRGRSPRVLLFPQVQAEPLEPWPALPAAPKPLASPEAGMAGPGGRRTTSLLKRRGCGCCWRGEEHSPRTARTGRTRCGRARRTPAPRQVATAEERNSPRVLSSLGFPTTSKSWKTHGAGRAPQPWPALPAAPKPLASPEAGMAGPGGRRTTSLPKRRGCGCSWRGEAQNPRTARTGRTRRGQAGRRPAPRQVAKAEEWSFFFLWPLECDTELKGQEGDELEAGTGVPARDAGDSRDGVDVWSPVPGLGNVRGICSKGLTDLSGAVVHTCNPSTLGGRGWRIT

SEQ ID NO: 5109 - DNA, 594 bp, Homo sapiens
ccgccgagaggccgctcgcgccgtatccttcctcttctccaggtgcaggcagagccccccagccgtggccagcccttccggcagctccgaagccactggcaagccccgaggcagggatggccggcccaggagggaggaggacgacgtccctcccgaagagaagaggctgcggctgtagctggaggggggaagcgcagaacccgaggactgcgaggacggggaggacgcgccgcggccaggcagggaggagaccggcacccagacaggtggcgaaggcagaggagtgcagtggttcacacctgtaatcccagcactttgggaggccgaggctggcggatcacctaaggtcaggagttcgagaccagcctggtcaacatggcaaaactgtctctactaaaaatacagaaattagccaggtgtgatggcacacacctgcaatcccagctacttgggaggctgaggcaggagaatcgtttgcacctgggagacagaggttgcagtcagccgagattgaaccactgtacttcagccagcctgggtgacagagcgagactctgtttcaaaaataaataaataaataaaatagaattctga

SEQ ID NO: 5110 - protein, 62 aa, Homo sapiens
MAGPGGRRTTSLPKRRGCGCSWRGEAQNPRTARTGRTRRGQAGRRPAPRQVAKAEECSGSHL

SEQ ID NO: 5111 - DNA, 1012 bp, Homo sapiens
gctggtacgaggatcagcagtgatttctttgaggaggagagcccgtttcttcactcacaggccatgtctgagtggatcaagaagaacagagtgcccttttatgagattttgtctgcgtagaccactagcttggactggtgctctggatggctgaggttttaatgtgactggatgtcccttggagtagctcccaggctgtgctcttgtggttgggtgctcctcctggagggagagaaaagtctctcctaggtatttggttgtccacctcaaccacttgctgagtcttccgcaagaccaggcacctcggcagagatttctgggttgtcaggcagaaccgagcattcaagggtgataactcactggagtccctgaaatccctgatggacgcaccaggcggaattctccacgagttttgagcagcctcgggtttcccaccacctccaaatcatggaagacacacggtgcaggcagagccccccagccgtggccagcccttccggcagctccgaagccactggcaagccccgaggcagggatggccggcccaggagggaggaggacgacgtccctcccgaagagaagaggctgcggctgtagctggaggggggaagcgcagaacccgaggactgcgaggacggggaggacgcgccgcggccaggcagggaggagaccggcacccagacaggtggcgaaggcagaggagtgcagtggttcacacctgtaatcccagcactttgggaggccgaggctggcggatcacctaaggtcaggagttcgagaccagcctggtcaacatggcaaaactgtctctactaaaaatacagaaattagccaggtgtgatggcacacacctgcaatcccagctacttgggaggctgaggcaggagaatcgtttgcacctgggagacagaggttgcagtcagccgagattgaaccactgtacttcagccagcctgggtgacagagcgagactctgtttcaaaaataaataaataaataaaatagaattctg

SEQ ID NO: 5112 - protein, 62 aa, Homo sapiens; identical to SEQ ID NO: 5110

SEQ ID NO: 5113 - DNA, 699 bp, Homo sapiens
gggaggaggtgcagggcctggccagagcgggcctggccacgggcaagggacagcgacctcctgggccaggacaggtgagcgcggcgcaggcccgggcccggcgtgtccgcgctgcgcgggagaggccagcagagggcgccagagagccaggagcggcccgcggaggagcccgcgcccgccccgatgcccagctccgcgcctcgcggacccagcaagctcgcgctcagacgccccagctccgccgagaggacgctcgccccgggtgcttctttttccccaagtgcaggcagagcccctggagccatggccagcccttccggcagctccgaagccactggcaagccccgaggcagggatggccggcccaggagggaggaggacgacgtccctcctgaagagaagaggctgcggctgttgctggaggggggaagagcacagcccgaggactgcgaggacggggaggacgcgctgcggccgggcaaggaggacaccggcacccagacaggtggcgacggcagaggaataaccttcactcttctctgcaacgaatcccaaaagtgtgtagttgagctgactgcaaggtgcttgacacgcaagagattccacaaatgggattcggcctctggaaagtggtggtagttccagatttatgtgaatgttactttgtttttccctataaaatctattctttaaactatc

SEQ ID NO: 5114 - protein, 151 aa, Homo sapiens; identical to SEQ ID NO: 1430

SEQ ID NO: 5115 - DNA, 1094 bp, Homo sapiens
atgtatctggtcacggtgctgaggaacgtgctcatcatcctggctgtcagctctgactcccacctccacacccccatgtacttcttcctctccagcctgtgctgggctgacatcggtttcacctcggccactgttcccaagatgactgtggacatgcagtcgcatagcagagtcatctcttatgacaaacaggagagtgccgtgggcagatgggaggagaccaatgtgcaaactgtcagctcagcagactgtggagtttctgttcttggttatgaggatccagaactgcagtcggtcctcgctttgctgtccctgtccctgtccctgaatctggtcacggtgctgaggaacctgctcagcatcctggctgtcagctctgactcccccctccacacccccatgtacttcttcctctccaacctgtgctgggctgacatcggtctcacctcggccacggttcccaaggtgattctggatatgcagtcgcatagcagagtcatctctcatgtgggctgcctgacacagatgtctttcttggtcctttttgcatgtatagaaggcatgctcctgactgtgatggcctatggctgctttgtagccatctgtcgccctctgcactacccagtcatagtgaatcctcacctctgtgtcttcttcgttttggtgtcctttttccttaacctgttggattcccagctgcacagttggattgtgttacaattcaccatcatcaagaatgtggaaatctctaattttttctgtgacccctctcagcttctcaaccttgcctgttctgacagcgtcatcaatagcatattcatatatttcgatagtactatgtttggttttcttcccatttcagggatccttttgtcttactataaaattgtcccctccattctaaggatgtcatcgtcagatgggaagtataaagccttctccacctatggctctcacctaggagttgtttgctggttttatggaacagtcattggcatgtacctggcttcagccgtgtcaccaccccccaggaatggtgtggtggcatcagtgatgtaggctgtggtcacccccatgctgaaccttttcatcta

SEQ ID NO: 5116 - protein, 352 aa, Homo sapiens
MYLVTVLRNVLIILAVSSDSHLHTPMYFFLSSLCWADIGFTSATVPKMTVDMQSHSRVISYDKQESAVGRWEETNVQTVSSADCGVSVLGYEDPELQSVLALLSLSLSLNLVTVLRNLLSILAVSSDSPLHTPMYFFLSNLCWADIGLTSATVPKVILDMQSHSRVISHVGCLTQMSFLVLFACIEGMLLTVMAYGCFVAICRPLHYPVIVNPHLCVFFVLVSFFLNLLDSQLHSWIVLQFTIIKNVEISNFFCDPSQLLNLACSDSVINSIFIYFDSTMFGFLPISGILLSYYKIVPSILRMSSSDGKYKAFSTYGSHLGVVCWFYGTVIGMYLASAVSPPPRNGVVASVM

SEQ ID NO: 5117 - DNA, 420 bp, Homo sapiens
cacgggttcatgatggctgaatgatatagagggtgacagatggctacaaacgggtcatagggatcacactcaggagcatgtctctcttccatgcctccaaaaatggcaaagagagacatgggagtcaggcagcctgcctaggagatgagtctgctgtgagattagatgtccacaatcatcttggggaccatgctggaggtgaaaccgatgtcaggcaaggacaggttggagaggaagaggtacatgggggtgtggaggtgggagtcagggctgacggccaggatgatgagcaggttccccagcaccgtgaccaggcacatggacaggaacagcccagcgaggacaggctgctgttctggatcctctgagcttctcaggtgatccgccaatctctgtcttccaagatgctgggattccagg

SEQ ID NO: 5118 - protein, 71 aa, Homo sapiens
MSTIILGTMLEVKPMSGKDRLERKRYMGVWRWESGLTARMMSRFPSTVTRHMDRNSPARTGCCSGSSELLR

SEQ ID NO: 5119 - DNA, 1632 bp, Homo sapiens
gtcagcactgaaacaggtattgccctgttcttctgatccctttttccatttgtgtcggttggcatatggcatatggacgggggattagacacagaagtcttactgactattgtatttctaggttgagaatgaagatgagattaagaatctcagagagcttcatgatttggtttactctcaagcctgcagctggtttcagaatttaagagacagatttcgaagccaaattcttcagcatttcggatcaatgcccgagagggaggaaaaccttcaggcagcccctaatggacctgcatggtgttggtggcttcttgcagttctccctgtagacccacgataccagctgtcggttttgtcaatgaagtctttgaaagaacggttgaccaagatacagcatatactgacctatttttctagagaccaatctaagtaactaactctttggatctccctttaaagtgaccctaatctggctgcattgatggccagattgtctgctgcctttgcacatctagtgctggtttcagaaatttaatgaaacttttctttttccttcgacctcctgaatcatgtggttctgcaaatgaataccttcaactaggatttagaccactaagaacttgcacagaaaaacacgcattgaatgtgtgtcgaacctctacattgtgaagttgcactatgtaccatactctaaaatgaaataagaactctttatgtctgtgagagagtgtgtgtgtgtgtgtgcgtgcgtgtgtgcttgtgggggttgggtagtgtgtgtgtattttctctggctttaaaattttaaaacaaacaaacaaaaaagccatagagagcagaacttgccgagggtcatttattgcccaagtttacaagagtagcgatacaagtttttgcaaattgaatttgcctcagatatatctgtcctaatgcttatatttgcacaagtatgtaaaatatcgtgttgaggatcattctttgttggaaacactgctcttgctgaactgtcttgaccattgactatgacacagtttcttatttatgtaaatacttgcatcacagtggccgacaggcattggatgcagaacctagagccagttttcaggaacaattgtaaacctgacatggtactgtgcatctattcataaaacactcaaaactgtgaaaatatggtttacatttaattgtacataaaggtaaagggagaactcaattcagtaccagttagtttgtacattttagggggcttttcacattaactgcccatttgtgtaatttatagtttgacatgatgtgtttgttttaaaaaaaaatgcatagtataaacccattaaggatctgggaaaagagaagaagtttaatatagaactaagcttttaaagtttgtttttgtttttaattctggtctcggtgcaaatgttagttatgccttattcatatcacagttagatcaccatgctgcaacatggtttatattcatgctgccctagaaacttttgtaattatttgttgcaaatttgtgactgtccttattaactttcttttatgtaagtaatttgtaaaagtttcttaaaatttttgcttttgcttatttaattttgaataaaagctaaattcctaatactttttctt

SEQ ID NO: 5120 - protein, 61 aa, Homo sapiens
MPEREENLQAAPNGPAWCWWLLAVLPVDPRYQLSVLSMKSLKERLTKIQHILTYFSRDQSK

SEQ ID NO: 5121 - DNA, 3577 bp, Homo sapiens
ccgggaggctccgggaccgtggcggcgggcggcggcggcgcagccctccgcgggccatgtcctctccggcggtggcgaggacctccccaggagggagtcgggagatggccccagcgccgcagggccgaggccggttctgggaagtgggcggcggcagcggccatcggctggagcgcgcggccgcggagtcggagcgctgggagctgctgctccgccgcggggagctgctggcgctgggcggccacctgaagggcgcgctggaggcgttcgcggcggcgctgcgccgcggggccccggccaggcccgagtgcctgggcgccctggtggactgcctggtgttcaactaccggctccgccacgggctgggctggagcgcggccccggttgcaggcgctgacggcggcgccggcgggctcctcagatgcctgggctgccggggcttcctgagcgagccggtgaccgtgccctgtggccacagctactgccgccgctgcctgcggagggaactccgcgcccgctgccgcctctgccgggaccggctgccgcccgccaccgccagtgccactgatgctgaagggaccgccccgcggccgccgcctctggccgccgccatcgccgcttcagacttcagaaccagcgtcgtcctcaaccacctggccgagaagtggtttccgggccagcgcgagcgggcccgggcggccggcaggctcggggagctactgcaccaggggcgctaccgggaggccctggccgccgcctgcgaggcgctgcgagcagaacccagtgacttgattgtaaaaatttacagagcggaatcatatgctggtctccaagagtttaaagcagccatagaagatttaaatgcagttctttttcaacttccagattggcctgaggtctacttcaggaaaggaaaagtactctgcgatgctggttttttaggtgatgccttacaactctttcttcagtgcttagcccttgatgaagattttgcacctgcaaagctgcaagtacaaaagattttatgtgatttattattacctgaaaacttaaaagaaggcctgaaggaatcttcctggagttcattaccatgtactaaaaacagaccttttgattttcattcagtgatggaagagtctcagtctctcaatgaacctagcccaaagcagagtgaagaaataccagaggtcacttcagagcctgtcaaaggaagcttaaaccgtgctcagtcagcacagtctataaattcaacagaaatgcctgccagagaggactgtttaaaaagagtgtcctcagaacctgttctgtcagttcaagaaaaaggtgttctgctgaaaagaaagttgtctcttttagaacaggatgtgattgtaaatgaagatggaagaaataagctgaaaaaacaaggagaaactcccaatgaagtctgtatgttttccttagcttatggtgatattccagaagaattaatcgatgtctcagatttcgagtgttctctctgcatgaggttgttttttgagccagtaacaaccccttgcggacattcgttctgtaagaattgtcttgagcgttgtttagatcatgcaccatattgtcctctttgcaaagaaagcttaaaagagtatctagcagataggaggtactgtgtcacacagctgttggaagaattaatagtgaagtatctgcctgatgaactgtctgagagaaaaaaaatatatgatgaagaaactgctgaactctcacacttgaccaagaatgttccaatatttgtttgcactatggcctaccccactgtgccttgccctctccatgtatttgagccaagatacagattgatgattcgaagaagtatacagactggaaccaaacagtttggcatgtgtgtcagtgatacacaaaatagttttgcagattatggttgtatgttacaaattagaaacgtgcatttcttaccggacggaaggtctgtggttgatacagttggaggaaagcggtttagggttttaaaaagaggaatgaaagatggatattgcactgccgacattgaatatctggaagatgttaaggttgagaatgaagatgagattaagaatctcagagagcttcatgatttggtttactctcaagcctgcagctggtttcagaatttaagagacagatttcgaagccaaattcttcagcatttcggatcaatgcccgagagggaggaaaaccttcaggcagcccctaatggacctgcatggtgttggtggcttcttgcagttctccctgtagacccacgataccagctgtcggttttgtcaatgaagtctttgaaagaacggttgaccaagatacagcatatactgacctatttttctagagaccaatctaagtaactaactctttggatctccctttaaagtgaccctaatctggctgcattgatggccagattgtctgctgcctttgcacatctagtgctggtttcagaaatttaatgaaacttttctttttccttcgacctcctgaatcatgtggttctgcaaatgaataccttcaactaggatttagaccactaagaacttgcacagaaaaacacgcattgaatgtgtgtcgaacctctacattgtgaagttgcactatgtaccatactctaaaatgaaataagaactctttatgtctgtgagagagtgtgtgtgtgtgtgtgcgtgcgtgtgtgcttgtgggggttgggtagtgtgtgtgtattttctctggctttaaaattttaaaacaaacaaacaaaaaagccatagagagcagaacttgccgagggtcatttattgcccaagtttacaagagtagcgatacaagtttttgcaaattgaatttgcctcagatatatctgtcctaatgcttatatttgcacaagtatgtaaaatatcgtgttgaggatcattctttgttggaaacactgctcttgctgaactgtcttgaccattgactatgacacagtttcttatttatgtaaatacttgcatcacagtggccgacaggcattggatgcagaacctagagccagttttcaggaacaattgtaaacctgacatggtactgtgcatctattcataaaacactcaaaactgtgaaaatatggtttacatttaattgtacataaaggtaaagggagaactcaattcagtaccagttagtttgtacattttagggggcttttcacattaactgcccatttgtgtaatttatagtttgacatgatgtgtttgttttaaaaaaaaatgcatagtataaacccattaaggatctgggaaaagagaagaagtttaatatagaactaagcttttaaagtttgtttttgtttttaattctggtctcggtgcaaatgttagttatgccttattcatatcacagttagatcaccatgctgcaacatggtttatattcatgctgccctagaaacttttgtaattatttgttgcaaatttgtgactgtccttattaactttcttttatgtaagtaatttgtaaaagtttcttaaaatttttgcttttgcttatttaattttgaataaaagctaaattcctaatactttttctt

SEQ ID NO: 5122 - protein, 773 aa, Homo sapiens; identical to SEQ ID NO: 662

SEQ ID NO: 5123 - DNA, 975 bp, Homo sapiens
cgcgcgcccgggaggctccgggaccgtggcggcgggcggcggcggcgcagccctccgcgggccatgtcctctccggcggtggcgaggacctccccaggagggagtcgggagatggccccagcgccgcagggccgaggccggttctgggaagtgggcggcggcagcggccatcggctggagcgcgcggccgcggagtcggagcgctgggagctgctgctccgccgcggggagctgctggcgctgggcggccacctgaagggcgcgctggaggcgttcgcggcggcgctgcgccgcggggccccggccaggcccgagtgcctgggcgccctggtggactgcctggtgttcaactaccggctccgccacgggctgggctggagcgcggccccggttgcaggcgctgacggcggcgccggcgggctcctcagatgcctgggctgccggggcttcctgagcgagccggtgaccgtgccctgtggccacagctactgccgccgctgcctgcggagggaactccgcgcccgctgccgcctctgccgggaccggctgccgcccgccaccgccagtgccactgatgctgaagggaccgccccgcggccgccgcctctggccgccgccatcgccgcttcagacttcagaaccagcgtcgtcctcaaccacctggccgagaagtggtttccgggccagcgcgagcgggcccgggcggccggcaggctcggggagctactgcaccaggggcgctaccgggaggccctggccgccgcctgcgaggcgctgcgagcaggtgaccgcgcggggatgcggcggggccgggccgaccgcaccctcctggccccgagggccggggacccggagcttgtctgcgccccgagagtctcctctgcttccccggggccgctgggccgctggcgtgtcgggtctcggggtgctggggggtgtgggagggggcggcgccccggggtgcttcggtcataa

SEQ ID NO: 5124 - protein, 303 aa, Homo sapiens
MSSPAVARTSPGGSREMAPAPQGRGRFWEVGGGSGHRLERAAAESERWELLLRRGELLALGGHLKGALEAFAAALRRGAPARPECLGALVDCLVFNYRLRHGLGWSAAPVAGADGGAGGLLRCLGCRGFLSEPVTVPCGHSYCRRCLRRELRARCRLCRDRLPPATASATDAEGTAPRPPPLAAAIAASDFRTSVVLNHLAEKWFPGQRERARAAGRLGELLHQGRYREALAAACEALRAGDRAGMRRGRADRTLLAPRAGDPELVCAPRVSSASPGPLGRWRVGSRGAGGCGRGRRPGVLRS

SEQ ID NO: 5125 - DNA, 1246 bp, Homo sapiens
ggacaaacccacccgagtcactctactgctgtttcctgtgtccacatggtaaactctcagcttctggccaaagaccttggtggaccctgctgacttgctcactactggcaagcaaagtgttcactgatgaatgaacaattacatttacccacagactgaaatatgatgttattttgttttgactgaaattccaactcactgtgagaatactgtgaaaaaaatcatgagaagtatcctcataggtgagtcttttcacacatctgcactagtgaatatctgaattttaaaagccactccagacctacataggtgatgaatgaagaagagtgcccttccatgaacacatgtgctggagacgtgttgaatttcttccccctcagcataatcagaggaggtgaccccaagcaccttagagaccatgggaagttcctaatgccggcctgatgcagattctcttctccacggagcaccatggccgctgggctctgccttccacacagaacgatgtgtacttgaaaacagtacactcttgcacagctgtccctggagcttccccgtggagctgttaaacttgccctccgctggctgttttccacaaagtaatatggttacatagattcacggctcatggcaatgtttcattaagacagttcttgatggccgctccacacctttctcaccacatctcacaggctgccctgctgagccaggtctccctggaacccggggctcctgcgcaggcccccattttgctccagaacacccaggaaggcggggcttgggctggaatggggacaccgattaccctctgttcaggcctttggtgccagctgaggtcgatactggtgccaggatcgagactgtgcgcatcccatcgagagcgggcagatgtgggggcgcactggaccgggcctcccaggctgacacccattcacagcagcctgagcctaatccgccactgctcgccttcctccgacgtctccacctaaaccatccttctgcacattgtgacccatcactccgccctttgtccacacatctccttccccacacccacaacgcggtggtccctgccccacaatgcaacggaaaccttgcggagtgctaggcggaagctgcgaggcctgtgtagacactgcctccgcagggctggcgcactcctccgagggccgactgaggggtgggttttttaagttgcaaaataaaagttatcgcctgtgggccctgaaggcctcttttccactgg

SEQ ID NO: 5126 - protein, 43 aa, Homo sapiens
MNEEECPSMNTCAGDVLNFFPLSIIRGGDPKHLRDHGKFLMPA

SEQ ID NO: 5127 - DNA, 504 bp, Homo sapiens
ccgccctccctctgagagtgtataactgtgcttcaacaagctttgtttcaagcttgcattttggtgttagtttgcatttctttgctcactatcacaagaaccgagactgctgatctagagctccagctctgttgatctccttggctgaagggtccatcccaactcaagatcccagaatgtcctgtatcattttaatgactggagtgtgactttgttctcagcacaatgagtaacaaagccaaaacactggagaatacgtttacgtattcaagaaaacctcagacaaggaagaatgctttcataatacagtacattaaaatcagacgaagcctcgaagggcagaatcaccgaccctgaaaaatcagagtgtactacagaagaagacgacagcgtttgagcacatttgttgaagcagcctcctctcccttatggtacgataatcccacaccgttttaccatgctctctggccttcccagaacatcaataaaaactgcatcccctga

SEQ ID NO: 5128 - protein, 43 aa, Homo sapiens
MSNKAKTLENTFTYSRKPQTRKNAFIIQYIKIRRSLEGQNHRP

SEQ ID NO: 5129 - DNA, 3984 bp, Homo sapiens
gttctctgccccctcccagctctggtgtgggcggcctccgctatggctgcgctgcgaaggctcttgtggccgccaccccgggtgtctcctccactctgcgctcaccagcccctccttgggccgtgggggcggcctgcggtgaccaccctgggccttcctggccggcccttctcctcccgagaggatgaggagagggctgtggcggaggcggcatggaggcggcggcggcgctggggggagctgagcgtggcggcggcggccggcggggggctggtcggcctggtatgctaccagctgtacggggaccccagggccggctcgccggcgaccgggcgaccctcaaagagcgcggccacggagcccgaggacccgccccgcggccgggggatgctgcccatcccagtggcggctgccaaggagacggttgctattggcagaacagacattgaagacttagacctttatgccacatctcgggagaggcgatttcgtttatttgcttctatagaatgtgaagggcagttattcatgactccgtatgattttattttggctgttacaacagatgagcccaaagttgccaaaacttggaagtcactttccaaacaggaattaaatcaaatgctcgcagaaacaccaccagtttggaaaggctcatcgaagctatttcgaaatcttaaagaaaaaggtgtgatttcttacacagaatatctttttcttttatgtattttaacaaagccacatgcagggttcagaatagctttcaacatgtttgacactgatggcaatgagatggtggataaaaaagagtttttggtgcttcaagagatattcaggaaaaaaaatgaaaagagagaaattaaaggagatgaagaaaagcgtgcaatgctgcgtcttcaactttatggataccattctcctactaatagtgtacttaaaacagatgctgaggaacttgtctccagaagctattgggatacactgagacgtaacacaagccaagcactgttttcagacctcgcagagcgtgctgatgacatcacaagtttagtaacagatactacacttcttgtacacttttttggaaagaaaggaaaagctgagctcaactttgaagatttttatagattcatggataatctccaaacagaagttctagaaatagaattcctttcctactcaaatggaatgaataccatcagtgaagaagattttgctcatattcttttacgatatacaaatgtggaaaatacatcagtatttttagaaaatgtgcgttacagtatacctgaagaaaagggcatcacatttgatgaattcaggtcatttttccagtttttaaacaacctagaagactttgcaatagccctgaatatgtataactttgcaagtcgttctatagggcaagatgaatttaaacgtgccgtctatgtagctactggactcaaattttcaccacatttagtgaacactgtcttcaagatttttgatgttgacaaagatgatcaattaagttataaagaatttattggaattatgaaagacagactccatagaggattccggggttataaaacagtccagaagtaccccactttcaaatcctgcctgaagaaagaacttcacagcagataaatactcctaaaacaaagtttaaaggattactatctgtgtgacaaataacaagaagcaacattttgagaatggaagcaggtctgaggtcagaagaagtagagaatgaaggaaaaggtgaatgctatgaaattgatattttttctggaactgaattcttaaacataaaacagataaaatgcatcttgttactacaaatgttatatatataaaatcaagttgagctttgccttgatttgctgaactctctgcactttttcattcccttcagaagtatatagatacttccggtgactacatatgaatgtactttcaatattatttttttatttattcattagaaattttcctcatttcaaaataatttatgactcatggaatgttgatcgcctaaaaatgaacatcgcattttctttgattttggactgtgaacttattttcagagatgaatattgcttgagatttataatacccttagaattaaattcctgttatttgcccagtttttaattacactgagataattttgaaaagaaatagaaattaagctactatataaaacaattgtttacgtgtacttttaacttttaaaagtacttaattaacatatgttgtttgacttgtataaagtttttaaaaattgttgtttatttgccaaagtcaacagaatgtctgttattgttttatgtatacggtaaagaaatttaaagtgtagaattttcctcccccaaaaagtcatgtgttgatagtagaagcagtggtagttgttgtaacagtaatcattgtcattgtcattatcttcttaaacatgaagctgctcctgatcataggtggtacacgttaataacactagtaaaaataacgtcttacactctgtaacttactgcatattgttaatgtatgtctagcatcaaatgagtattgtaaaagactaatataaaatggtttataagactgatgtatatattaagtagaagctaatatttttgtttcttgcaaaaggaccacttgaaaagtgatgctaaacagccagtaataataatttaaatataatttattatttcaaaagaatatgtcttaaaagggaaaataaaaactttctgttgaatcacaacaaaattagatttgtacatagagaaacaatttgataatacttaatagaaatctgttcaattaaaaatgcttagtttatacaaagatactacacaaaaatagaacaattagtctgaattaacgtatttacatattgcatatggaagataagttcatttatcttcctttctaagacatatttaatgtaggttacatacactccaactattactttgcttttgcatatgaaactagaaaacactgactttgtttttataagttattaaatgtgaaattgatctgcatcagcttatttataaaagtaatgttatttccaagaaaatgttactcttagcattgattttgtatgttagactttttacattgtttatctaatattatttatgacagtaattttaaaatatattattcataagttcaaggatcccatatagtataagaatataatttcacttgctttgaaagttgatttaattgactgactaaatgaaaatgcctacccactcatataacatacctcaggtctattttaccttacactgaatgttcttaatatgatttggtacctaaagtaattgaaaaaaatgcagtttcctttaatccttgactataagttatactatgttgcgtacatggcaaatcctgcaaatatagattaaaaattaaattagcccattgaaatcctttataattctgtcattttcccaaggaagaatagcattgtacatatgcaatctttattttattctttattgcttatcagagtgagtggatgaaaacatttgtaaggctgcaacataatattaaaatgtgaataaataaatgttctgataaaatagaaaagaaagtaaattacagtgatttccatcatattatcactcttgaattttatcatctataaaatgagagataaaaatatctcactgaattgttacttatatcaatttaaaatttgctagtggtttgaaaataataatgtactgactacatgtatgctgttattgtcagtgtttccttctataaactgttctttggaaaaattaagttatacataaaattcatattaaactttttacagaaagcatacatgataaacagtttatggtacttctcagaatcatttcataataagcaatttatttagcttaagttccaacttactgttcttattataaattgcaaagcaacctgtcttacattcttacattatcttaaaataaatatttctgcccttgaatc

SEQ ID NO: 5130 - protein, 530 aa, Homo sapiens; identical to SEQ ID NO: 664

SEQ ID NO: 5131 - DNA, 2292 bp, Homo sapiens
aattttaacaaataaaagactagcaggtatcaggagcaaccgttatggctaagactgagatagagctcccaatatagagctttccccctactagggctgaaatccagatgtctttggaaagggcacacctttgattcactggatagtggagaagtcactaaggtgcctcgtaagtgggagcataagtgggagttgctagaagtttctggggtgccaggggggccatccacagaaaagtggagtcttaaatcatcagagtgaactccctgagtgtcagagggagctggtggtggctgggcactgctggaaccgaaatctggagaagcagccctctaggagcccagcatgcctgcaggacggccctgggattctaggactgaaaagatgtggggagcagtgacttggtttggtgtgcaggcccataccatctgggaaatcccggataatctccagctgaacacttgagaaaattgcagcctgcagcatgggagaaaccacacagggaataagcatgcaggggagggtggagtgtgccctacaacagcctagagagtgaatcataccagaaccaggaaaggaaaatcccttcctcctccagcgtcctccagaaccctctactgacaaggtttaacactcggctagctagcaaaggagaaatatttccaaaatccatcttcatttattacaaagtaggccaaaatatggtgaatttggagctaagaggaaatacatcaataaacagcatagtctgcccctttgagtactcactgtccatatataccttctacgcacacttgaatgccatacaataataactctacatttcacctaacaggatactcatcatctccaaaatgaggagatgcaacaatcattgcatacagtgctgtggctatattaattgccctttagaatcatcacagttccactggatagtctgttgcccaaagactaattgtgaatttaacctctagcaacttgcatataaaatttttgttaatagaagggagcaagaagaggaaaatgtgagcatatatacataagtacatacacatgaaaagcaaaaaaggaaatattcaaaatgactacagcccttttttctgcagttggtcacaaggccctaatttttacttatggcttccttcttctactgttcattgatttcgcccacctccagccagaacctggtagagtaattcaaactctcattcctgaaagttccaagtcctcaattatcctgccttttattttggtttctgtacttttctactacacttttctattgcatatggagtactaatatacaccccaaactgtctcctgggttacagacatagtcttccttgcccctaatgtataaaggcaacccagtttcctcttggcaatagggatcagtcactccacctagtagagcaatccacctttctgcctgttgattcagtagcatgaggagtccagaatagccaaatggaaatctttctccaattcagtggaaccattgtgtctcatggtggaaaccatgttccctttaagaactcagatctctgaaatggcagagctcaaagatgccagaagcagcagcaaatattctgcaagtgtgttattaggtgttgctacggtctgaatgttggtgacctcccaaaatttatatgttgaaatctaatcacaaacgtaatagtattaagaaatggggcctttaggaagtgattaagtcatgagagtggaaccctcataaatgagattagtgccttggtaaaagaggtgcaagggaactgttcaccccttcctccaggtgaagagccacaagaagatgccatattggaagcagaaagcaagccctcgccaggcactgaatctgcttgatctgggacttcccagcatctagaactagaaacagaaccaatgggatgtacataaagagatttattgtaagaaatcggcacatgtgattatggaggctgacaaatcccaagatctgcagggggaggtggcaagctggagactcaggggagcatgtcttgaaccagagccaatgtgggtttccacagaccacggggcaagacacgttgactttacctccactcatatctgctgtacagaaaacccaacatgattaatctagcctacaatttgacagagacagaattgaatataagcagttattcctcaggtgcccccagtgattacctgctcttccaacagaacagaaaaggtcttaacgaccacgggataaagacaccattctgtgtttcaaggctggagttatccaggaataaagctatatcttcaagc

SEQ ID NO: 5132 - protein, 53 aa, Homo sapiens
MEADKSQDLQGEVASWRLRGACLEPEPMWVSTDHGARHVDFTSTHICCTENPT

SEQ ID NO: 5133 - DNA, 2174 bp, Homo sapiens
cgctctccacagcccctcccatgccagacgccggctcggcaccccctcttcgctgtgcatttctgcttcccccgaaagcccgagtagtaaagggaggctccttgcggcccccgcgggctcccagggacccgcaagttgaagcgcgagggttccacgcgggctgcggggacgcgggcctcggtgctgcagactttctcagggcgcctgggtcgcggcaggcgcggagtcccgagcgcagcagctgctccgccggcctcgcctccgacccccgccctgcgccaagcgcggaagcgctcgcgacctaactgccccgggtgccgggcgcctagggaggggccgccaccgcccgctccgccccgggggcctgcgcccagcagcccccgcctccccggaatccagaggccgagccggaggcggcggggccacggtgggagcccgcgaggtggcccgagcgagggccccgcatccccgcagagcccgcccgagggcgcagcctgccacgccaggggaggcggccgggcggcggggaacggcgggggcggagcgcagcctcccgacgccgccgcctcaccgcccccctccgcctcctcggcctccgctcgcagccgccgcctccgcctccgccgggctgaggagccgggagtccgccgcgccggctcggggctgcgggatggggagttagcgccacggcggcggcagtggccgcagcgcaccccgccgccgcccaggagcccgtccagccaggggtgccgggcccgcccagcccgccccggagccaggcccgcgggcggcggcggagctgggcaggtggatgcggctggaagatggcgccctcgggcccgggcagcagcgccaggcggcggtgccggcgggtgctgtactggatcccggtggtgttcatcaccctcctgctcggctggtcctactacgcctacgccatccagctgtgcatagtgtccatggaaaacactggcgaacaagttgtgtgcctgatggcctatcatctactttttgcaatgtttgtctggtcatactggaaaactatctttacattaccaatgaatccttcaaaagaattccatctctcttatgcagagaaagatttgttggagagagagccaagaggagaagcccatcaggaagttcttaggcgagcagccaaggatcttcccatctataccaggaccatgtctggagccatccgatactgtgacagatgccaacttataaaaccagatcgctgccatcactgctccgtctgtgataaatgtattttgaagatggatcatcattgtccatgggtgaacaattgtgttggattttcaaattataagttctttctccttttcttggcttattctctgctctactgcctttttattgcggcaacagatttacagtattttatcaaattttggacaaatggcctacctgatactcaagccaagttccatattatgtttttattctttgctgcagctatgttttctgtcagcttgtcttctctgtttggctatcattgttggctagtcagcaaaaataaatctacattagaggcattcagaagtccagtatttcgacatggaacagataagaatggattcagcttgggtttcagtaaaaacatgcgacaagtttttggtgatgagaagaagtactggttgctacccattttttcaagtctaggtgatggctgctcctttccaacttgccttgttaaccaggatcctgaacaagcatctactcctgcagggctgaattccacagctaaaaatctcgaaaaccatcagtttcctgcaaagccattgagagagtcccagagccaccttcttactgattctcagtcttggacggagagcagcataaacccaggaaaatgcaaagctggtatgagcaatcctgcattaaccatggaaaatgagacttaactcttcaagcaagataaattcatactttataaaagtatcaatgctgtagatggatggaagaggcttcccacaggaaggtgccaccagtcagttgtgcctatgtccctttggctggaaatgcagaatatgaattgattagttctctccaagccattgcttaaaatataacatgttttggatccaatacacacattgttacaactaacacaaattcctattaaatattaaaagtagttctggtttatt

SEQ ID NO: 5134 - protein, 367 aa, Homo sapiens; identical to SEQ ID NO: 666

SEQ ID NO: 5135 - DNA, 4471 bp, Homo sapiens
cgctctccacagcccctcccatgccagacgccggctcggcaccccctcttcgctgtgcatttctgcttcccccgaaagcccgagtagtaaagggaggctccttgcggcccccgcgggctcccagggacccgcaagttgaagcgcgagggttccacgcgggctgcggggacgcgggcctcggtgctgcagactttctcagggcgcctgggtcgcggcaggcgcggagtcccgagcgcagcagctgctccgccggcctcgcctccgacccccgccctgcgccaagcgcggaagcgctcgcgacctaactgccccgggtgccgggcgcctagggaggggccgccaccgcccgctccgccccgggggcctgcgcccagcagcccccgcctccccggaatccagaggccgagccggaggcggcggggccacggtgggagcccgcgaggtggcccgagcgagggccccgcatccccgcagagcccgcccgagggcgcagcctgccacgccaggggaggcggccgggcggcggggaacggcgggggcggagcgcagcctcccgacgccgccgcctcaccgcccccctccgcctcctcggcctccgctcgcagccgccgcctccgcctccgccgggctgaggagccgggagtccgccgcgccggctcggggctgcgggatggggagttagcgccacggcggcggcagtggccgcagcgcaccccgccgccgcccaggagcccgtccagccaggggtgccgggcccgcccagcccgccccggagccaggcccgcgggcggcggcggagctgggcaggtggatgcggctggaagatggcgccctcgggcccgggcagcagcgccaggcggcggtgccggcgggtgctgtactggatcccggtggtgttcatcaccctcctgctcggctggtcctactacgcctacgccatccagctgtgcatagtgtccatggaaaacactggcgaacaagttgtgtgcctgatggcctatcatctactttttgcaatgtttgtctggtcatactggaaaactatctttacattaccaatgaatccttcaaaagaattccatctctcttatgcagagaaagatttgttggagagagagccaagaggagaagcccatcaggaagttcttaggcgagcagccaaggatcttcccatctataccaggaccatgtctggagccatccgatactgtgacagatgccaacttataaaaccagatcgctgccatcactgctccgtctgtgataaatgtattttgaagatggatcatcattgtccatgggtgaacaattgtgttggattttcaaattataagttctttctccttttcttggcttattctctgctctactgcctttttattgcggcaacagatttacagtattttatcaaattttggacaaatggcctacctgatactcaagccaagttccatattatgtttttattctttgctgcagctatgttttctgtcagcttgtcttctctgtttggctatcattgttggctagtcagcaaaaataaatctacattagaggcattcagaagtccagtatttcgacatggaacagataagaatggattcagcttgggtttcagtaaaaacatgcgacaagtttttggtgatgagaagaagtactggttgctacccattttttcaagtctaggtgatggctgctcctttccaacttgccttgttaaccaggatcctgaacaagcatctactcctgcagggctgaattccacagctaaaaatctcgaaaaccatcagtttcctgcaaagccattgagagagtcccagagccaccttcttactgattctcagtcttggacggagagcagcataaacccaggaaaatgcaaagctggtatgagcaatcctgcattaaccatggaaaatgagacttaactcttcaagcaagataaattcatactttataaaagtatcaatgctgtagatggatggaagaggcttcccacaggaaggtgccaccagtcagttgtgcctatgtccctttggctggaaatgcagaatatgaattgattagttctctccaagccattgcttaaaatataacatgttttggatccaatacacacattgttacaactaacacaaattcctattaaatattaaaagtagttctggtttattaatcaacggggaaaacatcttctccaaaaaacttggaataaatccaaggaccagtttttacccaaatatatgggtagcacagtttatcacatagaaactccattaatcatctgattttccgaatctgaaaattgagactattaagatattaggatttcagagatttcaagtcacattataatgataagcattattcataaaacttgttacctttaagaaggtggaagtggcaaaccatacttcttttttttcctctgatgtgaatccagcctcagactgagtgaactgtaataattatgaattcattacagagtccaggtggcctgcagttgaagatcatcaaccatttttgcctcacttaattccagccttttgttttctgctggaaaataagtgtggacattgaagcttgagctctcaaagcagttggctggaatacttttgtcagaatacggtacatttctattacatcagaaatatattttcatctcttcttgttaaattgggaggaaatttatgatagcaattatgaagattgttttatgacattcttttgtcagtttggctttctaaaaatctctttttagattatttctcctgttgaacatagtaaaactattgaatttctcttaagaattcctaataggtcaatagatttaccctccagtgatatctatattatttctttctcgtctcatcaaaatgatgacaggtaaactatatttttccttaaacacctattacagttaaattatgcaaatcattaaataaaaatcatacaacttttggaaagttagttcaacatgaactaaaatggcatgctatttggaaatttagtttgagataaactaaagtgtgttgatgccagaatgttcagcttcagtaaatataataagctcttgtgccttgtatgcactatttaaaaaaagttttttttatttgagtccagtataattcatgtaaatgttaacaattagaataatactctgtatgcttttttgatactgattttgagaatttaaagcagattaccttttaaaactggaccaactaagtaattggtatttaatcaaagagaaaatggtaataaacttttcaaaatctttgttaaaccaaacattcaacacaaaataaactagaaggccagaggataatggaataaaagatcattgcaattacttatccttcctaaaaatatagttttatattaattgtgcttatggaagaaacaatgtcagccaagtccattttatagtttgagtgcaattctttgaacaatagaaatatctgcagtctttcacagatttgtattatgctgaagagtttcatctgacaatctgcttcaagaaatctcagaaaatatgataacattttaactttcattttagagcacgttttggtcatttttaaaaatacctaaagtgccagaccggaacctatagctactgctagaagtcttaaaaaaaccaacagcagcacaggatgtattaagaattatatgaagtcaggtttgtttttttttttttttttttttcaaagcacagtactgttagctgtttttgtggacaggattcgattaagtattccctcttgtcaaactggaagctaggggaaaaagagggatttttatcctttactcttctagagtactgttaatgcccctttcccacagtcttttatataattaaatatatgtcaatacacattagaatcagatttgaaaaagttaaaacaatttcattgttgtaattgttccctttctgttttcatatagtgaataacctttaaagggttgttttgttttgttttgaattataggagttataatctttggagatgattgcatatctcattagatatgcaatataaatttatctgagtgaacaaagtgctaaataaatagatctacattttgtacatatttatataaaatttacctttaagtatttactttaaaaaatttaatggcttaactcgaacttgaagacacatacttcaactgtccttattgtccattaaactgataattttgatttttcttgcttttatagattttactatataggaatcaagatttaagaaattttgcattaaaaatagtgtaccaatgcttcatatacgttagttatttgctattatgtagggaagaggattgttatttcaaagatatattaaagaacagttgcatctgaatataatcatgatgcattcaatgaagttcatatccatgaattcactcctaatataccctaataaagtggttgatcacctacattatctgtctataagaaactgcc

SEQ ID NO: 5136 - protein, 367 aa, Homo sapiens; identical to SEQ ID NO: 666

SEQ ID NO: 5137 - DNA, 5131 bp, Homo sapiens
cgctctccacagcccctcccatgccagacgccggctcggcaccccctcttcgctgtgcatttctgcttcccccgaaagcccgagtagtaaagggaggctccttgcggcccccgcgggctcccagggacccgcaagttgaagcgcgagggttccacgcgggctgcggggacgcgggcctcggtgctgcagactttctcagggcgcctgggtcgcggcaggcgcggagtcccgagcgcagcagctgctccgccggcctcgcctccgacccccgccctgcgccaagcgcggaagcgctcgcgacctaactgccccgggtgccgggcgcctagggaggggccgccaccgcccgctccgccccgggggcctgcgcccagcagcccccgcctccccggaatccagaggccgagccggaggcggcggggccacggtgggagcccgcgaggtggcccgagcgagggccccgcatccccgcagagcccgcccgagggcgcagcctgccacgccaggggaggcggccgggcggcggggaacggcgggggcggagcgcagcctcccgacgccgccgcctcaccgcccccctccgcctcctcggcctccgctcgcagccgccgcctccgcctccgccgggctgaggagccgggagtccgccgcgccggctcggggctgcgggatggggagttagcgccacggcggcggcagtggccgcagcgcaccccgccgccgcccaggagcccgtccagccaggggtgccgggcccgcccagcccgccccggagccaggcccgcgggcggcggcggagctgggcaggtggatgcggctggaagatggcgccctcgggcccgggcagcagcgccaggcggcggtgccggcgggtgctgtactggatcccggtggtgttcatcaccctcctgctcggctggtcctactacgcctacgccatccagctgtgcatagtgtccatggaaaacactggcgaacaagttgtgtgcctgatggcctatcatctactttttgcaatgtttgtctggtcatactggaaaactatctttacattaccaatgaatccttcaaaagaattccatctctcttatgcagagaaagatttgttggagagagagccaagaggagaagcccatcaggaagttcttaggcgagcagccaaggatcttcccatctataccaggaccatgtctggagccatccgatactgtgacagatgccaacttataaaaccagatcgctgccatcactgctccgtctgtgataaatgtattttgaagatggatcatcattgtccatgggtgaacaattgtgttggattttcaaattataagttctttctccttttcttggcttattctctgctctactgcctttttattgcggcaacagatttacagtattttatcaaattttggacaaatggcctacctgatactcaagccaagttccatattatgtttttattctttgctgcagctatgttttctgtcagcttgtcttctctgtttggctatcattgttggctagtcagcaaaaataaatctacattagaggcattcagaagtccagtatttcgacatggaacagataagaatggattcagcttgggtttcagtaaaaacatgcgacaagtttttggtgatgagaagaagtactggttgctacccattttttcaagtctaggtgatggctgctcctttccaacttgccttgttaaccaggatcctgaacaagcatctactcctgcagggctgaattccacagctaaaaatctcgaaaaccatcagtttcctgcaaagccattgagagagtcccagagccaccttcttactgattctcagtcttggacggagagcagcataaacccaggaaaatgcaaagctggtatgagcaatcctgcattaaccatggaaaatgagacttaactcttcaagcaagataaattcatactttataaaagtatcaatgctgtagatggatggaagaggcttcccacaggaaggtgccaccagtcagttgtgcctatgtccctttggctggaaatgcagaatatgaattgattagttctctccaagccattgcttaaaatataacatgttttggatccaatacacacattgttacaactaacacaaattcctattaaatattaaaagtagttctggtttattaatcaacggggaaaacatcttctccaaaaaacttggaataaatccaaggaccagtttttacccaaatatatgggtagcacagtttatcacatagaaactccattaatcatctgattttccgaatctgaaaattgagactattaagatattaggatttcagagatttcaagtcacattataatgataagcattattcataaaacttgttacctttaagaaggtggaagtggcaaaccatacttcttttttttcctctgatgtgaatccagcctcagactgagtgaactgtaataattatgaattcattacagagtccaggtggcctgcagttgaagatcatcaaccatttttgcctcacttaattccagccttttgttttctgctggaaaataagtgtggacattgaagcttgagctctcaaagcagttggctggaatacttttgtcagaatacggtacatttctattacatcagaaatatattttcatctcttcttgttaaattgggaggaaatttatgatagcaattatgaagattgttttatgacattcttttgtcagtttggctttctaaaaatctctttttagattatttctcctgttgaacatagtaaaactattgaatttctcttaagaattcctaataggtcaatagatttaccctccagtgatatctatattatttctttctcgtctcatcaaaatgatgacaggtaaactatatttttccttaaacacctattacagttaaattatgcaaatcattaaataaaaatcatacaacttttggaaagttagttcaacatgaactaaaatggcatgctatttggaaatttagtttgagataaactaaagtgtgttgatgccagaatgttcagcttcagtaaatataataagctcttgtgccttgtatgcactatttaaaaaaagttttttttatttgagtccagtataattcatgtaaatgttaacaattagaataatactctgtatgcttttttgatactgattttgagaatttaaagcagattaccttttaaaactggaccaactaagtaattggtatttaatcaaagagaaaatggtaataaacttttcaaaatctttgttaaaccaaacattcaacacaaaataaactagaaggccagaggataatggaataaaagatcattgcaattacttatccttcctaaaaatatagttttatattaattgtgcttatggaagaaacaatgtcagccaagtccattttatagtttgagtgcaattctttgaacaatagaaatatctgcagtctttcacagatttgtattatgctgaagagtttcatctgacaatctgcttcaagaaatctcagaaaatatgataacattttaactttcattttagagcacgttttggtcatttttaaaaatacctaaagtgccagaccggaacctatagctactgctagaagtcttaaaaaaaccaacagcagcacaggatgtattaagaattatatgaagtcaggtttgtttttttttttttttttttttcaaagcacagtactgttagctgtttttgtggacaggattcgattaagtattccctcttgtcaaactggaagctaggggaaaaagagggatttttatcctttactcttctagagtactgttaatgcccctttcccacagtcttttatataattaaatatatgtcaatacacattagaatcagatttgaaaaagttaaaacaatttcattgttgtaattgttccctttctgttttcatatagtgaataacctttaaagggttgttttgttttgttttgaattataggagttataatctttggagatgattgcatatctcattagatatgcaatataaatttatctgagtgaacaaagtgctaaataaatagatctacattttgtacatatttatataaaatttacctttaagtatttactttaaaaaatttaatggcttaactcgaacttgaagacacatacttcaactgtccttattgtccattaaactgataattttgatttttcttgcttttatagattttactatataggaatcaagatttaagaaattttgcattaaaaatagtgtaccaatgcttcatatacgttagttatttgctattatgtagggaagaggattgttatttcaaagatatattaaagaacagttgcatctgaatataatcatgatgcattcaatgaagttcatatccatgaattcactcctaatataccctaataaagtggttgatcacctacattatctgtctataagaaactgcctttgcactgacaatgtaaattattttaagcataaattttcctaatagtttattagagctactaatggcaaaattcatgtcttcaatgtggccataacataggtcttgggaggggtggtgagaaaataaggtatttactttgtagtagttaagtgattctgaggacaattagaaacagactataaaactcaactacactgtaatcaatagacaactattggaaatatggcatatgttgacaaacacttaactagggaaatcaaagatataaatcatgtttataaaaaattaggcacgcaatcatgtgattcatgcttcaagaaaatatatgaaaaaagtgttactccattatgttataaactagcagattttccctattttgaaatgcatgtaaacgggctcggctgattctgaaattgtactgtatcatttggtatttacttatatggtcaaatacttgtttgtaaaagtgatggttctgatacctttgatcaaacatagatacaaacctcagaaaatggtaaatgcaaagcagtttacgttgtaaatcatgatggtgtcctccagcacaaccatcccacccacacacctagactacagattctgatctgtgaatattttcaccaaagtgacatttaaacaagtggatttttcacaaata

SEQ ID NO: 5138 - protein, 367 aa, Homo sapiens; identical to SEQ ID NO: 666

SEQ ID NO: 5139 - DNA, 5186 bp, Homo sapiens
gtggaaagcaggcagatcgttgttgagggtgtagtatccaccatagacttacatggttctactgagtcagtcatggcctctgtggtctttcctcaagaagggaatctggaattggaaaggaggggggtggggctgaaacaattcagtggttgtaggaacttggagttgagttgtagccatgtgtagaaaaggaaacacccatacaactctatctaaacaggagaagtaaacttacagctgccctcaaatctgcacaacttgctggcactaggagcctcttctattttaatttgagacagggattataggattccattgagtaagctttgaaatgaggacactaagatcagggggccagccctgagatcagatttccttatttatctacattgcttagtgcagtcagtgattcagaaatggtccttccctttgccaagatgaaagtggcagtgagtttttcatggccatcattatgaggtgacgtctttattcctttttcagaactgatagattgaaagaccgacacattcctaatgatttaaatacaaacattccgtgaatgtttacccagccttcaattagataagttagattttacaccatctgtttctgtcgagtagagctgcttagctatttagagcaatgatttggtcatcaaattgctacagaaatgatgttgaattccgccacgtgtgacaacatggatgaacctggaagacattgggctacatgagaaaaagccagtcacagaaggacagatactgccttcttctgcttgtatgaggtgtaatgcccaaccttgtttttactaaccctgtttttagactctccctttcctttaatcacctagccttgtttgcacctgagttgactctcctttggctaagagagccagacagactccatcttggttctttcactggcagccccttcctcaaggacttaacttgtgcaagctgactcccagcacatccaagaatgcaattaactgatcagctactgtggcgaactatatccgcagttcccaggaattcgtccgattgataaagcccaaagccccgcgtctatcaccttgttaatagtcttaaagcccctgcacctggaactgtttactttcctgtatccatttatccttttaacttttttgcctactttacttctgtaaaattgttttaactagaccctgcctcccctttctaaaccaaagtataaaagaaaatctagcccctttttcagggccgagagaactgagcgttagctctctcttggccgccggctaaatatacggacttttaattcgtctcaaagtgtggcgttttctctaactcgctcaagcacaacagaggtatctacaatagtcagctaaaggaaagagagaccgtttggtggttgccaggggctgaagggagaaggagatggggagtgggctgcagtttagtgggtacaaagtttcaggtacgttagatgaatgagttctagagatcggctctacatccacgtgcctatactcaaccatacggtattatgcacttacagttatttcagagagtagatctcaagtcttcttaatgcagtaaattataataataaagaaatgctgagtaacacttataacctggagacttttataaacgtaaggattaagagctaccaaccaggagagatccatattctgtctctcttaatgtcagtgtctgcatgtgagaaatgtgttttaggagtgtgcctgtgtagtacaaattggagtaattatcgttcctcctttcttctgctttggatggaggtcaggaagcctatcccatctcttactctttctagtatcaccattttactgttgctctaggaacccagagcccggttcctccccaaattcttgaagtgggatggttaggaaagtccatattcaggtagtgccctgaaatatggccaaatatttgaattttttgtatccaaagtttgtaaaattatgtttgcagaggttttaagttggttggtggagcaagggtgaccagaagaggacattttaaaccctactttctagagtgacccagatcagaagtaacagggagtggcaagagtatcaagcacagaccaagaactgagagaaagcaaggaagagaacggctgcccaggacaaagcagcccagtggctgcgaggcatccgatgtcacagatcctggcaggccacacagaatccttgtatgagttttggggccaaacaggcctatatgtagatcccatcatgacttggatgacgttagaagttatacctctgtgagactgtcttctcagcatttgaaatgataataataccaacctcacagattgttgtaaggtttaaatgagatcaacattcaaagaattgagcacaaggccgggtgcggtggctcatgcctgtcatcccagcactttgggaggctgaggtgggagaatcatttgagcccaggagttcaagaacagcctggacaacaaagggagatgctatcgctacaaaaaaaaataaaattataaattaggagggcatggtggcacgcatctgtggtcccagctaccagatttaatcaatctttctgactcagcctgctgagtagctgggaccacaggtgcatgccacgatgccctgctaatttataatttaaaaaaaattttttatctccatcttctagagtccagaaatgtgagaacatagatttctatttaaggcccatagtctgtgatactttgttatgacagctgtagcaaatacaggtattatcacgaagacttggaatgcgatgaacacctgatctcatagcccagcaggtaagggaggaaaatcagggcagcctcgagtctactgtgctggaagggagatatgtttggatgttgcactcagtaggcttcccttaacacacagtcactagtttttgttatattgttaatagtgttatgcagaagcttttgatggctgatctagaggccaaagcacagaaagcaaatcttttgggtcataacctacccttaagagacttcccatatcttggtttatatgctttaacttagtattgttcatttttgtgtttgatattgtgttattctttttttttttttttttttttttgagacatagtctggctttgttgcccaggctggagtgcagtggcactatctcagctcactgcagcctccgcctcctgggctcaagggatcctcccacctcagcctcctgactagctggcatcacaggtgtgcgccaccacacccagctaattgtggggttttttttgtttgtttgttttagtagagacagagttttaccatgttgccaaggctggtctcaaactcctgggctcaagcgatccagctgccttagcttcccaaagtgctgggattacagatgtgagccaccgcacccagtcacattgtgctattcttcaggaaaaggttgccagtaatttctgggccattttccatcgttctttgataatttctagcatagtttagctcagtatagctgtttagagatgtgttctgaggtagaggctggggaaatcatcagactccatagggcgttggcataggaccaatgcatgccaagccctgttagaatctggacagggcgttgtgggttgcaggtgtgggtggggttgacaggaaaggagctctgggagacgtagggcaaaagtttaaaaatttactggtttagtttttttctcattctactaattcacccacattgtaatttatttgcatttttctgcttattcacgcttaaaaggctttccagcagtttattcctaacaacttggcatttcacgctgcagaaaattttagcgttactacatgctaattattcactatgcacttcttcccctagattgttaataaactgctagcactaaactttaggaaactcctactcctaacatgtcacagtttggtgatgaatttatcctccatatttgatgaacagaccttaataatgcgccaaattctattctaggtgcttttaccttctagtttaattctcaaaagagctcggtgagataaacattgagataatgttcagagaatctaaataacttgttcaacgtaaaacatcacacaggattcaaacctcagtgagggtcatggaaaagacacaagtaaatgaaaatacaggttgtgtgagatgctaagagacgaataatgtattgccatagtgtctgactagacaggaaaagctggtatttaaactgcaccctgaaggaagagaaagaaggagccaagcgtggagtcaggtgtggagcttttcagactgggcaaagacgctaaggtttggtgtgtttttgaaacaggagctcagtgtggctgcagcttagtgagcaaagggactagtgaccagaagtggtcttggaggacagagaggaagagccagatcatgcttgaccactgaggctgaagtgaggagattggactttattttactgtaaattgagtgcagagccttgggagggttcttagtgagatgatatcactgaattgcattttaaatgagatcatggttttcttattgcaaaatgaattttcagggaattgtgtggggatccattgaggtagtcgattgccttgccccgtgtttgtggttagtagactgttaggaatatcaggactggcttgtatgttaactgagaaagtacaaactgaaaaccctgtgtttggaattcaagttttgcaccatcgaagacttattgctaacctttgcttctattttgaagctacttatctgtccttgacaaagcagttcctgcttatttactgatcagtttgttgttagaatgacttttgccttaggtcttcaaaagtcaagattttttcaccgagaatacatcacggtaggatttaagataattttatagccagagaaaccttcaagataaagtgcaaattttagtttaaacagtaaaattaaagcgccgctcagctgagtgccgtgatcaagatcacacatattgggaggattgggctggagtccaggtctcctaccacccagttcactgccagtgcagaggatcaagggagggtacaatgttagcttggttaagacacaagaaagcccagagtgacagaagcatcatgcacaagaggaaagacgtgtgaggtgagtttggagagaaaggcaggcgttttgagttatcaataaaatcacaatgacatataaggacaac

SEQ ID NO: 5140 - protein, 82 aa, Homo sapiens [sequence omitted]

SEQ ID NO: 5141 - DNA, 854 bp, Homo sapiens
taaagaagctgactcaaatggcagagggcagcctaaaggagaaacaactggcaattatcccgggtaatatgatcttggctgccttgatggtaattaccgcggcgtaaatcaacaggattacctttcccttaataatcttcaaaatgtccacgtgaaggacaggaagatgtttaatgggaagaccaaacatcgtcagtgctcaagtccagtagataacaaagaacagaaagaaaacaaaactttggtattttactggaatctgagtgaataaatagggaccacaggacaaatggcaaacaactgcttgagttacatcagaaggaaagaagaaatgatgaacccagatttccagtaagaaactgttacacaatacgattaatggagctaacaagtgcctattacacattagaaaatcttctagaggattttaaaacaaaaggaacaacttgtccagagtataatcgatgcttccagttaaatttcacaattttgcacctcagggaatacttttgtttttcttagagagcaaataaactgaccatttcaccttggcaattattaacctgccttgttttttataactaggaaaaatttggcttatctccatattttagttgagatgacatattaattcatatttttgtgggtaaaatgttattacccttaatacaaagcaaagtttcagctggacttcgtttttacttaatcttcaatggaacattattgaagttacagtacaaaaattctctgaatgaacataataataagttgtaaaatatatatatctttataaagatatattattggatctttcacaaaaagtcatacaagtggggaaaaaagaaaaatatcag

SEQ ID NO: 5142 - protein, 47 aa, Homo sapiens
MELTSAYYTLENLLEDFKTKGTTCPEYNRCFQLNFTILHLREYFCFS

SEQ ID NO: 5143 - DNA, 581 bp, Homo sapiens
aaagatcctggaaggtgccagcaagtgaggttaggtttcccactgtagatgtaatggaaacatggtttccccaccaacttcgaggcttgagagcattcagaaaaagtttggtcaaccttgtaggggaaccagcccgctataccacccgcgggttctccccttcccagtggagacgagggaatgagaaaagaaataaagacaaacacacaaagttcaagagttaacaaaagtgggtccaggggtccatcgcaatgtggaaactgcgacagccctgagctctggattccactgatatttactgaataatccttaaagtccaactaattggttaacagaacaggacgtgaaagcagacagcccgtcagaccacaggcctgtgcatcaaaggagcggtccactccaagcaccatcagcagggcagcagagctctctgcctctgggaacgagcgagagatagaagactttccccttatcctcagaggacttctcctcttttacaagcaacctcctgctgttcccttctggggaatggagcaggggtcgcttcccttcccacaagacctttgttcagggactcaagt

SEQ ID NO: 5144 - protein, 56 aa, Homo sapiens
METWFPHQLRGLRAFRKSLVNLVGEPARYTTRGFSPSQWRRGNEKRNKDKHTKFKS

SEQ ID NO: 5145 - DNA, 6617 bp, Homo sapiens
ggtcacatgactccagtctagctcgcattgcggctcccgcccgggcgagttctcgcccccgcgcggccgttgccgaggagacggcgcatgtcccgccgcgcgttgccccctctgcagtacccccgcccctcttctcccaccacaatgagatcctaagatggcggtggctgcggcggttggcgctgcgtagctgaggtcgaaaaggcggccactggggccgaggcagccaggaaacgtgtgggcctctctgctgcggtctccgagggccgaccgctgccggcggcgggtcgtgggggctgactgtcgctctgcctttgacaggagaggctgcttcttgtagaggaaacagctttgaagtgtggagcgggaaaggagcagtttctgagctgcaaaaactagtttctaaacagagagttaattgttaaatccagtatggccacaggaggaggtccctttgaagatggcatgaatgatcaggatttaccaaactggagtaatgagaatgttgatgacaggctcaacaatatggattggggtgcccaacagaagaaagcaaatagatcatcagaaaagaataagaaaaagtttggtgtagaaagtgataaaagagtaaccaatgatatttctccggagtcgtcaccaggagttggaaggcgaagaacaaagactccacatacgttcccacacagtagatacatgagtcagatgtctgtcccagagcaggcagaattagagaaactgaaacagcggataaacttcagtgatttagatcagagaagcattggaagtgattcccaaggtagagcaacagctgctaacaacaaacgtcagcttagtgaaaaccgaaagcccttcaactttttgcctatgcagattaatactaacaagagcaaagatgcatctacaaaccccccaaacagagaaacgattggatcagcacagtgtaaagagttgtttgcttctgctttaagtaatgacctcttgcaaaactgtcaggtgtctgaagaagatgggaggggagaacctgcaatggagagcagccagattgtaagcaggcttgttcaaattcgcgattatattactaaagctagttccatgcgggaagatcttgtagagaaaaatgagagatctgctaatgttgagcgccttactcatctaatagatcaccttaaagaacaagagaagtcatatatgaaatttcttaaaaaaatccttgccagagatcctcagcaggagcctatggaagagatagaaaatttgaagaaacaacatgatttattaaaaagaatgttacaacagcaggagcaactaagagctctacagggacggcaggctgcacttctagctctgcaacataaagcagagcaagctattgcagtgatggatgattctgttgttgcagaaactgcaggtagcttatctggcgtcagtatcacatctgaactaaatgaagaattgaatgacttaattcagcgttttcataatcagcttcgtgattctcagcctccagctgttccagacaatagaagacaggcagaaagtctttcattaactagggaggtttcccagagcaggaaaccatcagcttcagaacgtttacctgatgagaaagtcgaactttttagcaaaatgagagtgctacaggaaaagaaacaaaaaatggacaaattgcttggagaacttcatacacttcgagatcagcatcttaacaattcatcatcctctccacaaaggagtgtcgatcagagaagtacttcagctccctctgcttctgtaggcttggcaccggttgtcaatggagaatccaatagcctcacatcatctgttccttatcctactgcttctctagtatctcagaatgagagtgaaaacgaaggccacctcaatccatctgaaaaactccagaagttaaatgaagttcgaaagagattgaatgagctaagagaattagttcattattatgaacaaacgtcagacatgatgacagatgctgtgaatgaaaacaggaaagatgaagaaactgaagagtcagaatatgattctgagcatgaaaattccgagcctgttactaacattcgaaatccacaagtagcttccacttggaatgaagtaaatagtcatagtaatgcacagtgtgtttctaataatagagatgggcgaacagttaattctaattgtgaaattaacaacagatctgctgccaacataagggctctaaacatgcctccttctttagattgtcgatataatagagaaggggaacaggagattcatgttgcacaaggtgaagatgatgaggaggaggaggaagaagcagaagaggagggagtcagtggagcttcattatctagtcacaggagcagtctggttgatgagcatccagaagatgctgaatttgaacagaagatcaaccgacttatggctgcaaaacagaaacttagacagttacaagatcttgttgctatggtacaggatgatgatgcagctcaaggagttatctctgccagtgcatcaaatttggatgatttctacccagcagaagaagacaccaagcaaaattcaaataacactagaggaaatgccaataaaacacagaaagatactggagtaaatgaaaaggcaagagagaaattttatgaggctaaactacagcagcaacagagagagctaaaacaattgcaggaagaaagaaagaaactgattgacattcaggagaaaattcaagcattgcaaacggcatgccctgacttacagctgtcagctgctagtgtgggtaactgtcccaccaaaaaatatatgccagctgttacttcaaccccaactgttaatcaacacgagaccagtacaagcaaatctgtttttgagcctgaagattcttcaatagtagataatgagttgtggtcagaaatgagaagacatgaaatgttgagggaggagctgcgacagagaagaaagcagcttgaagctctgatggctgaacatcagaggaggcaaggtctagctgaaactgcatctccagtggctgtgtcattgagaagtgatggatctgagaacctatgtactcctcagcaaagtagaacagaaaaaacgatggcaacttggggagggtctacccagtgtgcactagatgaagaaggagatgaagacggttacctttctgaaggaattgttcggacagatgaagaggaggaagaagagcaagatgccagttccaatgataacttttctgtgtgtccttctaacagtgtgaatcataactcctacaatggaaaggaaactaaaaataggtggaagaacaattgccctttttcggcagatgaaaattatcgtcctttagccaagacaaggcaacagaatatcagcatgcaacggcaagaaaaccttcgttgggtgtcagagctctcttacgtagaagagaaagaacaatggcaagaacaaatcaatcagctaaagaaacagcttgattttagtgtcagtatttgtcagactttgatgcaagaccagcagactctatcttgtctgctacaaactcttctcacgggtccttacagtgttatgcccagcaatgttgcatctcctcaagtacacttcataatgcaccagttgaaccagtgctatactcagctaacatggcaacagaataatgttcagaggttgaaacaaatgctaaatgaacttatgcgccagcaaaatcagcatccagaaaaacctggaggcaaggaaagaggcagtagtgcatcgcaccctccttctcccagtttattttgtcctttcagctttccaacacagcctgtaaatctcttcaatatacctggatttactaacttttcatcatttgcaccaggtatgaatttcagccctttatttccttctaattttggagatttttctcagaatatctctacacccagtgaacagcagcaacccttagcccagaattcttcaggaaaaacagaatatatggcttttccaaaaccttttgaaagcagttcctctattggagcagagaaaccaaggaataaaaaactgcctgaagaggaggtggaaagcagtaggacaccatggttatatgaacaagaaggtgaagtagagaaaccatttatcaagactggattttcagtgtctgtagaaaaatctacaagtagtaaccgcaaaaatcaattagatacaaacggaagaagacgccagtttgatgaagaatcactggaaagctttagcagtatgcctgatccagtagatccaacaacagtgactaaaacattcaagacaagaaaagcgtctgcacaggccagcctggcatctaaagataaaactcccaagtcaaaaagtaagaagaggaattctactcagctgaaaagcagagttaaaaacatcaggtatgaaagtgccagtatgtctagcacatgtgaaccttgcaaaagtaggaacagacattcagcccagactgaagagcctgttcaagcaaaagtattcagcagaaagaatcatgagcaactggaaaaaataataaaatgtaataggtctacagaaatatcttcagaaactgggagtgatttttccatgtttgaagctttgcgagatactatttattctgaagtagctacattaatttctcaaaatgaatctcgtccacattttcttattgaactcttccatgagctgcagctactaaacacagactacttgagacagagggctttatatgcattgcaggacatagtatccagacatatttctgagagccatgaaaaaggagaaaatgtaaagtcagtaaactctggtacttggatagcatcaaactcagaacttactcctagtgagagccttgctactactgatgatgaaacttttgagaagaactttgaaagagaaacccataaaataagtgagcaaaatgatgctgataatgctagtgtcctgtctgtatcatcaaattttgagccttttgcaacagatgatctaggtaacaccgtgattcacttagatcaagcattagccagaatgagagaatatgagcgtatgaagactgaggctgaaagtaactcaaatatgagatgcacctgcaggattattgaggatggagatggtgctggtgcaggtactacagttaataatttagaagaaactcccgttattgaaaatcgtagttcacaacaacctgtaagtgaagtttctaccatcccatgtcctagaattgatactcagcagctggaccggcaaattaaagcaattatgaaagaagtcattccttttttgaaggagcacatggatgaagtatgctcctcgcagcttctaacttcagtaaggcgcatggttttgacccttacccagcaaaatgatgagagcaaagagtttgtaaagttctttcataaacaacttggaagtatattacaggattcactggcaaaatttgctggcagaaaactgaaagactgtggagaagatcttcttgtagagatatctgaagtgttgttcaatgaattggctttctttaagcttatgcaagatttggataataatagtataactgttaaacagagatgcaaaaggaaaatagaagcaactggagtgatacaatcttgtgccaaagaggctaaaaggattcttgaagatcatggctcacctgctggagagattgatgatgaagacaaagacaaggatgaaactgaaacagttaagcagactcaaacatctgaggtgtatgatggtcccaaaaatgtaagatctgatatttctgatcaagaggaagatgaagaaagtgaaggatgtccagtgtctattaatttgtctaaagctgaaactcaggctttaactaattatggaagtggagaagatgaaaatgaggatgaagaaatggaagaatttgaagaaggccctgtggatgtccagacttccctccaggctaacactgaagctactgaagaaaatgaacatgatgaacaggtcctacaacgtgactttaaaaagacagcagaaagcaaaaatgtcccattggaacgagaagccactagtaaaaatgaccaaaataactgtcctgtgaaaccctgttacctcaatatcttggaagatgagcaacctttaaatagtgctgcccataaggagtcacctcctactgttgattcaactcaacagcctaaccctttgccgttacgtttacctgaaatggaacccttagtgcctagagtcaaagaagttaaatctgctcaggaaactcctgaaagctctctggctggaagtcctgatactgaatctccagtgttagtgaatgactatgaagcagaatctggtaatataagtcaaaagtctgatgaagaagattttgtaaaagttgaagatttaccactgaaactgacaatatattcagaggcagatctaagaaagaaaatggtagaagaagaacagaaaaaccatttatctggtgaaatatgtgaaatgcagaccgaagaattagctggaaattctgagacactaaaagaacctgaaacggtgggagcccagagtatatgagatgtcttcagaggctcatctaactctgtccttacatactcaatgcatatatgaaaacaatactaaataaacatctgatctgtataaaaatgtaaattagtttgacactg

SEQ ID NO: 5146 - protein, 2024 aa, Homo sapiens
MATGGGPFEDGMNDQDLPNWSNENVDDRLNNMDWGAQQKKANRSSEKNKKKFGVESDKRVTNDISPESSPGVGRRRTKTPHTFPHSRYMSQMSVPEQAELEKLKQRINFSDLDQRSIGSDSQGRATAANNKRQLSENRKPFNFLPMQINTNKSKDASTNPPNRETIGSAQCKELFASALSNDLLQNCQVSEEDGRGEPAMESSQIVSRLVQIRDYITKASSMREDLVEKNERSANVERLTHLIDHLKEQEKSYMKFLKKILARDPQQEPMEEIENLKKQHDLLKRMLQQQEQLRALQGRQAALLALQHKAEQAIAVMDDSVVAETAGSLSGVSITSELNEELNDLIQRFHNQLRDSQPPAVPDNRRQAESLSLTREVSQSRKPSASERLPDEKVELFSKMRVLQEKKQKMDKLLGELHTLRDQHLNNSSSSPQRSVDQRSTSAPSASVGLAPVVNGESNSLTSSVPYPTASLVSQNESENEGHLNPSEKLQKLNEVRKRLNELRELVHYYEQTSDMMTDAVNENRKDEETEESEYDSEHENSEPVTNIRNPQVASTWNEVNSHSNAQCVSNNRDGRTVNSNCEINNRSAANIRALNMPPSLDCRYNREGEQEIHVAQGEDDEEEEEEAEEEGVSGASLSSHRSSLVDEHPEDAEFEQKINRLMAAKQKLRQLQDLVAMVQDDDAAQGVISASASNLDDFYPAEEDTKQNSNNTRGNANKTQKDTGVNEKAREKFYEAKLQQQQRELKQLQEERKKLIDIQEKIQALQTACPDLQLSAASVGNCPTKKYMPAVTSTPTVNQHETSTSKSVFEPEDSSIVDNELWSEMRRHEMLREELRQRRKQLEALMAEHQRRQGLAETASPVAVSLRSDGSENLCTPQQSRTEKTMATWGGSTQCALDEEGDEDGYLSEGIVRTDEEEEEEQDASSNDNFSVCPSNSVNHNSYNGKETKNRWKNNCPFSADENYRPLAKTRQQNISMQRQENLRWVSELSYVEEKEQWQEQINQLKKQLDFSVSICQTLMQDQQTLSCLLQTLLTGPYSVMPSNVASPQVHFIMHQLNQCYTQLTWQQNNVQRLKQMLNELMRQQNQHPEKPGGKERGSSASHPPSPSLFCPFSFPTQPVNLFNIPGFTNFSSFAPGMNFSPLFPSNFGDFSQNISTPSEQQQPLAQNSSGKTEYMAFPKPFESSSSIGAEKPRNKKLPEEEVESSRTPWLYEQEGEVEKPFIKTGFSVSVEKSTSSNRKNQLDTNGRRRQFDEESLESFSSMPDPVDPTTVTKTFKTRKASAQASLASKDKTPKSKSKKRNSTQLKSRVKNIRYESASMSSTCEPCKSRNRHSAQTEEPVQAKVFSRKNHEQLEKIIKCNRSTEISSETGSDFSMFEALRDTIYSEVATLISQNESRPHFLIELFHELQLLNTDYLRQRALYALQDIVSRHISESHEKGENVKSVNSGTWIASNSELTPSESLATTDDETFEKNFERETHKISEQNDADNASVLSVSSNFEPFATDDLGNTVIHLDQALARMREYERMKTEAESNSNMRCTCRIIEDGDGAGAGTTVNNLEETPVIENRSSQQPVSEVSTIPCPRIDTQQLDRQIKAIMKEVIPFLKEHMDEVCSSQLLTSVRRMVLTLTQQNDESKEFVKFFHKQLGSILQDSLAKFAGRKLKDCGEDLLVEISEVLFNELAFFKLMQDLDNNSITVKQRCKRKIEATGVIQSCAKEAKRILEDHGSPAGEIDDEDKDKDETETVKQTQTSEVYDGPKNVRSDISDQEEDEESEGCPVSINLSKAETQALTNYGSGEDENEDEEMEEFEEGPVDVQTSLQANTEATEENEHDEQVLQRDFKKTAESKNVPLEREATSKNDQNNCPVKPCYLNILEDEQPLNSAAHKESPPTVDSTQQPNPLPLRLPEMEPLVPRVKEVKSAQETPESSLAGSPDTESPVLVNDYEAESGNISQKSDEEDFVKVEDLPLKLTIYSEADLRKKMVEEEQKNHLSGEICEMQTEELAGNSETLKEPETVGAQSI

SEQ ID NO: 5147 - DNA, 8192 bp, Homo sapiens
ggtcacatgactccagtctagctcgcattgcggctcccgcccgggcgagttctcgcccccgcgcggccgttgccgaggagacggcgcatgtcccgccgcgcgttgccccctctgcagtacccccgcccctcttctcccaccacaatgagatcctaagatggcggtggctgcggcggttggcgctgcgtagctgaggtcgaaaaggcggccactggggccgaggcagccaggaaacgtgtgggcctctctgctgcggtctccgagggccgaccgctgccggcggcgggtcgtgggggctgactgtcgctctgcctttgacaggagaggctgcttcttgtagaggaaacagctttgaagtgtggagcgggaaaggagcagtttctgagctgcaaaaactagtttctaaacagagagttaattgttaaatccagtatggccacaggaggaggtccctttgaagatggcatgaatgatcaggatttaccaaactggagtaatgagaatgttgatgacaggctcaacaatatggattggggtgcccaacagaagaaagcaaatagatcatcagaaaagaataagaaaaagtttggtgtagaaagtgataaaagagtaaccaatgatatttctccggagtcgtcaccaggagttggaaggcgaagaacaaagactccacatacgttcccacacagtagatacatgagtcagatgtctgtcccagagcaggcagaattagagaaactgaaacagcggataaacttcagtgatttagatcagagaagcattggaagtgattcccaaggtagagcaacagctgctaacaacaaacgtcagcttagtgaaaaccgaaagcccttcaactttttgcctatgcagattaatactaacaagagcaaagatgcatctacaaaccccccaaacagagaaacgattggatcagcacagtgtaaagagttgtttgcttctgctttaagtaatgacctcttgcaaaactgtcaggtgtctgaagaagatgggaggggagaacctgcaatggagagcagccagattgtaagcaggcttgttcaaattcgcgattatattactaaagctagttccatgcgggaagatcttgtagagaaaaatgagagatctgctaatgttgagcgccttactcatctaatagatcaccttaaagaacaagagaagtcatatatgaaatttcttaaaaaaatccttgccagagatcctcagcaggagcctatggaagagatagaaaatttgaagaaacaacatgatttattaaaaagaatgttacaacagcaggagcaactaagagctctacagggacggcaggctgcacttctagctctgcaacataaagcagagcaagctattgcagtgatggatgattctgttgttgcagaaactgcaggtagcttatctggcgtcagtatcacatctgaactaaatgaagaattgaatgacttaattcagcgttttcataatcagcttcgtgattctcagcctccagctgttccagacaatagaagacaggcagaaagtctttcattaactagggaggtttcccagagcaggaaaccatcagcttcagaacgtttacctgatgagaaagtcgaactttttagcaaaatgagagtgctacaggaaaagaaacaaaaaatggacaaattgcttggagaacttcatacacttcgagatcagcatcttaacaattcatcatcctctccacaaaggagtgtcgatcagagaagtacttcagctccctctgcttctgtaggcttggcaccggttgtcaatggagaatccaatagcctcacatcatctgttccttatcctactgcttctctagtatctcagaatgagagtgaaaacgaaggccacctcaatccatctgaaaaactccagaagttaaatgaagttcgaaagagattgaatgagctaagagaattagttcattattatgaacaaacgtcagacatgatgacagatgctgtgaatgaaaacaggaaagatgaagaaactgaagagtcagaatatgattctgagcatgaaaattccgagcctgttactaacattcgaaatccacaagtagcttccacttggaatgaagtaaatagtcatagtaatgcacagtgtgtttctaataatagagatgggcgaacagttaattctaattgtgaaattaacaacagatctgctgccaacataagggctctaaacatgcctccttctttagattgtcgatataatagagaaggggaacaggagattcatgttgcacaaggtgaagatgatgaggaggaggaggaagaagcagaagaggagggagtcagtggagcttcattatctagtcacaggagcagtctggttgatgagcatccagaagatgctgaatttgaacagaagatcaaccgacttatggctgcaaaacagaaacttagacagttacaagatcttgttgctatggtacaggatgatgatgcagctcaaggagttatctctgccagtgcatcaaatttggatgatttctacccagcagaagaagacaccaagcaaaattcaaataacactagaggaaatgccaataaaacacagaaagatactggagtaaatgaaaaggcaagagagaaattttatgaggctaaactacagcagcaacagagagagctaaaacaattgcaggaagaaagaaagaaactgattgacattcaggagaaaattcaagcattgcaaacggcatgccctgacttacagctgtcagctgctagtgtgggtaactgtcccaccaaaaaatatatgccagctgttacttcaaccccaactgttaatcaacacgagaccagtacaagcaaatctgtttttgagcctgaagattcttcaatagtagataatgagttgtggtcagaaatgagaagacatgaaatgttgagggaggagctgcgacagagaagaaagcagcttgaagctctgatggctgaacatcagaggaggcaaggtctagctgaaactgcatctccagtggctgtgtcattgagaagtgatggatctgagaacctatgtactcctcagcaaagtagaacagaaaaaacgatggcaacttggggagggtctacccagtgtgcactagatgaagaaggagatgaagacggttacctttctgaaggaattgttcggacagatgaagaggaggaagaagagcaagatgccagttccaatgataacttttctgtgtgtccttctaacagtgtgaatcataactcctacaatggaaaggaaactaaaaataggtggaagaacaattgccctttttcggcagatgaaaattatcgtcctttagccaagacaaggcaacagaatatcagcatgcaacggcaagaaaaccttcgttgggtgtcagagctctcttacgtagaagagaaagaacaatggcaagaacaaatcaatcagctaaagaaacagcttgattttagtgtcagtatttgtcagactttgatgcaagaccagcagactctatcttgtctgctacaaactcttctcacgggtccttacagtgttatgcccagcaatgttgcatctcctcaagtacacttcataatgcaccagttgaaccagtgctatactcagctaacatggcaacagaataatgttcagaggttgaaacaaatgctaaatgaacttatgcgccagcaaaatcagcatccagaaaaacctggaggcaaggaaagaggcagtagtgcatcgcaccctccttctcccagtttattttgtcctttcagctttccaacacagcctgtaaatctcttcaatatacctggatttactaacttttcatcatttgcaccaggtatgaatttcagccctttatttccttctaattttggagatttttctcagaatatctctacacccagtgaacagcagcaacccttagcccagaattcttcaggaaaaacagaatatatggcttttccaaaaccttttgaaagcagttcctctattggagcagagaaaccaaggaataaaaaactgcctgaagaggaggtggaaagcagtaggacaccatggttatatgaacaagaaggtgaagtagagaaaccatttatcaagactggattttcagtgtctgtagaaaaatctacaagtagtaaccgcaaaaatcaattagatacaaacggaagaagacgccagtttgatgaagaatcactggaaagctttagcagtatgcctgatccagtagatccaacaacagtgactaaaacattcaagacaagaaaagcgtctgcacaggccagcctggcatctaaagataaaactcccaagtcaaaaagtaagaagaggaattctactcagctgaaaagcagagttaaaaacatcaggtatgaaagtgccagtatgtctagcacatgtgaaccttgcaaaagtaggaacagacattcagcccagactgaagagcctgttcaagcaaaagtattcagcagaaagaatcatgagcaactggaaaaaataataaaatgtaataggtctacagaaatatcttcagaaactgggagtgatttttccatgtttgaagctttgcgagatactatttattctgaagtagctacattaatttctcaaaatgaatctcgtccacattttcttattgaactcttccatgagctgcagctactaaacacagactacttgagacagagggctttatatgcattgcaggacatagtatccagacatatttctgagagccatgaaaaaggagaaaatgtaaagtcagtaaactctggtacttggatagcatcaaactcagaacttactcctagtgagagccttgctactactgatgatgaaacttttgagaagaactttgaaagagaaacccataaaataagtgagcaaaatgatgctgataatgctagtgtcctgtctgtatcatcaaattttgagccttttgcaacagatgatctaggtaacaccgtgattcacttagatcaagcattagccagaatgagagaatatgagcgtatgaagactgaggctgaaagtaactcaaatatgagatgcacctgcaggattattgaggatggagatggtgctggtgcaggtactacagttaataatttagaagaaactcccgttattgaaaatcgtagttcacaacaacctgtaagtgaagtttctaccatcccatgtcctagaattgatactcagcagctggaccggcaaattaaagcaattatgaaagaagtcattccttttttgaaggagcacatggatgaagtatgctcctcgcagcttctaacttcagtaaggcgcatggttttgacccttacccagcaaaatgatgagagcaaagagtttgtaaagttctttcataaacaacttggaagtatattacaggattcactggcaaaatttgctggcagaaaactgaaagactgtggagaagatcttcttgtagagatatctgaagtgttgttcaatgaattggctttctttaagcttatgcaagatttggataataatagtataactgttaaacagagatgcaaaaggaaaatagaagcaactggagtgatacaatcttgtgccaaagaggctaaaaggattcttgaagatcatggctcacctgctggagagattgatgatgaagacaaagacaaggatgaaactgaaacagttaagcagactcaaacatctgaggtgtatgatggtcccaaaaatgtaagatctgatatttctgatcaagaggaagatgaagaaagtgaaggatgtccagtgtctattaatttgtctaaagctgaaactcaggctttaactaattatggaagtggagaagatgaaaatgaggatgaagaaatggaagaatttgaagaaggccctgtggatgtccagacttccctccaggctaacactgaagctactgaagaaaatgaacatgatgaacaggtcctacaacgtgactttaaaaagacagcagaaagcaaaaatgtcccattggaacgagaagccactagtaaaaatgaccaaaataactgtcctgtgaaaccctgttacctcaatatcttggaagatgagcaacctttaaatagtgctgcccataaggagtcacctcctactgttgattcaactcaacagcctaaccctttgccgttacgtttacctgaaatggaacccttagtgcctagagtcaaagaagttaaatctgctcaggaaactcctgaaagctctctggctggaagtcctgatactgaatctccagtgttagtgaatgactatgaagcagaatctggtaatataagtcaaaagtctgatgaagaagattttgtaaaagttgaagatttaccactgaaactgacaatatattcagaggcagatctaagaaagaaaatggtagaagaagaacagaaaaaccatttatctggtgaaatatgtgaaatgcagaccgaagaattagctggaaattctgagacactaaaagaacctgaaacggtgggagcccagagtatatgagatgtcttcagaggctcatctaactctgtccttacatactcaatgcatatatgaaaacaatactaaataaacatctgatctgtataaaaatgtaaattagtttgacactgcttttttgataggtgtggtcatttctccccatggtagtttaaaacatcagaaactgaattctggacagatttaagccttgacacactgtgtttttttttttttcccccttcttttttgggtcttcatttttttccccattgtgatgtttggtaacgaatttaaaatgtagttttaaataaagtttggacttatctataaagtatcttttttggaaattatattgaattctatacagcaagtcaatgttttatataactttaggctgctcagagaagagcaatggttaagagttagttagagaaatatattatttgttataaagcccatccattaggccagtcttccaactaatgccagtgttgctgctgttgggtctgatgttcttcttttagatacctgcaggtcctattcctgtgcaagaatagggcagattatcaagatatccaggatacctatgaagttattatagaatatttattaatccattgaaattggataataagtttagaacataggttctcagtatctagaacttacatcattatcatctgtttgttaggatttgaaattctggaaaatatttatctacatcgcctcagactaaaagtaaaaaaaataagctttatataattagggagatttctgcacagagaagtaacattgtggttaattttaaatgaaaaacttaactttttcaagtggggataaataatacaactaaatttctgtaatagtaagattctgtatgccttcagataaacttgcctattgagatggtaatttaaagccaaagcatagcagtttcttttgtgtgtagtgaggttgaagcagatttgcaggtgaagtattgaaagtttatgtgactttaagtcagcttttgaaaagtgattgatttgctttttatcccaaactgtccatatacccagtaaggcttcaaaaaaccagtcaacaatgagtaagtcaatcttatagattcttcttcctcgaataaaatacaaagaattagttccaataagtattttaactttgttaacaactgaaataccccataaaaaaagaacttgttgagagtatttctttaaaatggttacttgctgcccaggcaccatggctcactcctgtaatcccagcaccttgggaggccgaggcgggcagatcacgaggtcaagagattgagaccatcctgcccaacatgggggaaaccccgtctctactaaaaataaaaaaattagctgggagaggtggcacgtgcctgtagtcctagctacttgggaggctaaggcaggagaatagcctgaacccgggaggtggaggttgcaggttgcagtgagccgagatcatgccactgcactccagcctggcaacagagcgagactctgtctcaaaaaaaaaaaaaaaaaaaaaaaaaagttaacttgctgtatacctcagtgtaatgtccattcaaggagtattaaatgaggatttccctgcgaggacatttactgtattgctacttaaattatggaagacaatatatcttcaactttaataaaacctattcagaaaattaccaattcagaattcggagttct

SEQ ID NO: 5148 - protein, 2024 aa, Homo sapiens; identical to SEQ ID NO: 5146

SEQ ID NO: 5149 - DNA, 2158 bp, Homo sapiens
tgccccctctgcagtacccccgcccctcttctcccaccacaatgagatcctaagatggcggtggctgcggcggttggcgctgcgtagctgaggtcgaaaaggcggccactggggccgaggcagccaggaaacgtgtgggcctctctgctgcggtctccgagggccgaccgctgccggcggcgggtcgtgggggctgactgtcgctctgcctttgacaggagaggctgcttcttgtagaggaaacagctttgaagtgtggagcgggaaaggagcagtttctgagctgcaaaaactagtttctaaacagagagttaattgttaaatccagtatggccacaggaggaggtccctttgaagatggcatgaatgatcaggatttaccaaactggagtaatgagaatgttgatgacaggctcaacaatatggattggggtgcccaacagaagaaagcaaatagatcatcagaaaagaataagaaaaagtttggtgtagaaagtgataaaagagtaaccaatgatatttctccggagtcgtcaccaggagttggaaggcgaagaacaaagactccacatacgttcccacacagtagatacatgagtcagatgtctgtcccagagcaggcagaattagagaaactgaaacagcggataaacttcagtgatttagatcagagaagcattggaagtgattcccaaggtagagcaacagctgctaacaacaaacgtcagcttagtgaaaaccgaaagcccttcaactttttgcctatgcagattaatactaacaagagcaaagatgcatctacaaaccccccaaacagagaaacgattggatcagcacagtgtaaagagttgtttgcttctgctttaagtaatgacctcttgcaaaactgtcaggtgtctgaagaagatgggaggggagaacctgcaatggagagcagccagattgtaagcaggcttgttcaaattcgcgattatattactaaagctagttccatgcgggaagatcttgtagagaaaaatgagagatctgctaatgttgagcgccttactcatctaatagatcaccttaaagaacaagagaagtcatatatgaaatttcttaaaaaaatccttgctagagaaaatgaggaggaggatgttcggactatagattcagctgtgggatctggttctgtagctgagagcacatcgctaaacatagatgtgcagtctgaggcttcagataccacggccagagatcctcagcaggagcctatggaagagatagaaaatttgaagaaacaacatgatttattaaaaagaatgttacaacagcaggagcaactaagagctctacagggacggcaggctgcacttctagctctgcaacataaagcagagcaagctattgcagtgatggatgattctgttgttgcagaaactgcaggtagcttatctggcgtcagtatcacatctgaactaaatgaagaattgaatgacttaattcagcgttttcataatcagcttcgtgattctcagcctccagctgttccagacaatagaagacaggcagaaagtctttcattaactagggaggtttcccagagcaggaaaccatcagcttcagaacgtttacctgatgagaaagtcgaactttttagcaaaatgagagtgctacaggaaaagaaacaaaaaatggacaaattgcttggagaacttcatacacttcgagatcagcatcttaacaattcatcatcctctccacaaaggagtgtcgatcagagaagtacttcagctccctctgcttctgtaggcttggcaccggttgtcaatggagaatccaatagcctcacatcatctgttccttatcctactgcttctctagtatctcagaatgagagtgaaaacgaaggccacctcaatccatctgaaaaactccagtaaaacatttataatcattgtttacatgaagttaaataatagggataaattctgtttttttttttatgttgaaaattctgcaaaacgagatttatttaatattgttgtaaacattcttaagggataggtagaagaggcgtgtgtgtgttgtgtgggcataatttgagttgtctaagagatgtgatgtaacatagtttctgtgaactgatgttactttcttgtttttcaaataaaggatc

SEQ ID NO: 5150 - protein, 530 aa, Homo sapiens
MATGGGPFEDGMNDQDLPNWSNENVDDRLNNMDWGAQQKKANRSSEKNKKKFGVESDKRVTNDISPESSPGVGRRRTKTPHTFPHSRYMSQMSVPEQAELEKLKQRINFSDLDQRSIGSDSQGRATAANNKRQLSENRKPFNFLPMQINTNKSKDASTNPPNRETIGSAQCKELFASALSNDLLQNCQVSEEDGRGEPAMESSQIVSRLVQIRDYITKASSMREDLVEKNERSANVERLTHLIDHLKEQEKSYMKFLKKILARENEEEDVRTIDSAVGSGSVAESTSLNIDVQSEASDTTARDPQQEPMEEIENLKKQHDLLKRMLQQQEQLRALQGRQAALLALQHKAEQAIAVMDDSVVAETAGSLSGVSITSELNEELNDLIQRFHNQLRDSQPPAVPDNRRQAESLSLTREVSQSRKPSASERLPDEKVELFSKMRVLQEKKQKMDKLLGELHTLRDQHLNNSSSSPQRSVDQRSTSAPSASVGLAPVVNGESNSLTSSVPYPTASLVSQNESENEGHLNPSEKLQ

SEQ ID NO: 5151 - DNA, 752 bp, Homo sapiens
accacaatgagatcctaagatggcggtggctgcggcggttggcgctgcgtagctgaggtcgaaaaggcggccactggggccgaggcagccaggaaacgtgtgggcctctctgctgcggtctccgagggccgaccgctgccggcggcgggtcgtgggggctgactgtcgctctgcctttgacaggagaggctgcttcttgtagaggaaacagctttgaagtgtggagcgggaaaggagcagtttctgagctgcaaaaactagtttctaaacaggtaatttgacattattatctgtattatcctttgtattagagttggagaagactttatggtggacactgctgtcacagttacagtgcatgactgaggatcctctctgcttagtaaacaaactttctgggttcaccgccctgtttgctctgcttttcggcgtgctgctttggcctgccggtatatctttgttcggaaaggccctgtcattcctaattattaattactagaatggtttatgcagtaccgtttgaaatttatttgtcttcacagaattttttcaacctgtttgaatttgtcctataactggatagcctctctttccaaatccatttaatctcaagttctctcctacaacattcctattaattggctgttcatgaactctacttgtcgaacttgttataccttgaccgaaatttagttgtctaaaattactttattattattttttgtacttcgatctccctttcctggtataaa

SEQ ID NO: 5152 - protein, 46 aa, Homo sapiens
MTEDPLCLVNKLSGFTALFALLFGVLLWPAGISLFGKALSFLIINY

SEQ ID NO: 5153 - DNA, 682 bp, Homo sapiens
tccctctataatggatatttgtatatatcggatgtgattcttatgtctcctaatattaaaaattgctaacttggaattctagtagagatttggggtcatgtaaggtctgccatatacttcgaattggaatatactcattaagatgagtatcaaagaacagtgaaggttagatttattactgttagctcatgcttccaaagggtattgcaaagatacctccaagacatatttactgttttgtattctatttataccaggccttcctagcattgtaaattgagttacctgtactgttacacaatggaaaccgatttcccttttagtttgagttagttgcaactgataacagttgtcactttttttactcaagggtatgaaagtgccagtatgtctagcacatgtgaaccttgcaaaagtaggaacagacattcagcccagactgaagagcctgttcaagcaaaagtattcagcagaaagaatcatgagcaactggaaaaaataataaaatgtaataggtctacagaaatatcttcaggctggagtgcagtggtgcgacctcggctcactgcaacctctgcctcccgggttcgagcgattctcctgcctcagcccactgagtagctgggactacagcacatgctaggagaatactacagcagtctaacagaaatgcatgcaatga

SEQ ID NO: 5154 - protein, 77 aa, Homo sapiens
MSSTCEPCKSRNRHSAQTEEPVQAKVFSRKNHEQLEKIIKCNRSTEISSGWSAVVRPRLTATSASRVRAILLPQPTE

SEQ ID NO: 5155 - DNA, 846 bp, Homo sapiens
atgctgaatgagacaatgatagtacatgcatactatctacacacgcaaatccatgacaatgacatggctgattctctgatcatgccaatgtcaggtggttttgtattaaacaatgatgaagagcagaaaaatgatggttccagcgcaggacccgcagaagccgcgctctcagccggaattgcctcagatgttccaggcagaagcccaggaggcctccaggaaccgccagaccggcaggaggaacgtcgaggtccaaggcacaagtcagaggttcctggtctgcaggggcccaaggcctgcgtcactacggaggcggcaaacgtggagcgcaggcaccttccaggcaccctgctctcccgctgtgtgcgactgaaggcgataccttctattatcgccttttctgctaaattaaacaaaaaacaggttatcacacaatacgggaaagctttaaacctctataggtctgaaggatctcttcatctctctggtcgctatcaccggggacatgccgtccccagctcagtgacaaaaatgctgagtttcttccgtagaacactagggagtcggtctatgggtaaacatgcagagaaggaacgactccgagaagcacaatgcgctgccacacatattcctgcccctggagattccaggtccatcatcacgtgtcaggtgtcccttctggatggtactgatgttagtgtggacttgccaaaaaaagccaaagggcaagagttgtttgatcagattatgtatcacctggatcttattgaaagtggctattttgatctgagatttatggattcagcacaaatgtttctacatgctagctggcttggaaacttctag

SEQ ID NO: 5156 - protein, 281 aa, Homo sapiens [sequence omitted]

SEQ ID NO: 5157 - DNA, 2344 bp, Homo sapiens
tctggaagccaggcgggcagggcagagaccccggctcctgcgcccctcctagctcccagagagcgtggatcgcgggcggggctcaccgagcgagctgtcccagagggaggagctgaaatctgaacctctcagctgtgattggatctttcttgcaaaagagaggaaaaaaaaaccctcccagccaaaacgggctcagttcgtaaaggagccgggtgacttcagaggcgccggcccgtccgtctgccgcacctgagcacggcccctgcccgagcctggcccgccgcgatgctgtagggaccgccgtgtcctcccgccggaccgttatccgcgccgggcgcccgccagacccgctggcaagatgccgcgctccttcctggtcaagaagcatttcaacgcctccaaaaagccaaactacagcgaactggacacacatacagtgattatttccccgtatctctatgagagttactccatgcctgtcataccacaaccagagatcctcagctcaggagcatacagccccatcactgtgtggactaccgctgctccattccacgcccagctacccaatggcctctctcctctttccggatactcctcatctttggggcgagtgagtccccctcctccatctgacacctcctccaaggaccacagtggctcagaaagccccattagtgatgaagaggaaagactacagtccaagctttcagacccccatgccattgaagctgaaaagtttcagtgcaatttatgcaataagacctattcaactttttctgggctggccaaacataagcagctgcactgcgatgcccagtctagaaaatctttcagctgtaaatactgtgacaaggaatatgtgagcctgggcgccctgaagatgcatattcggacccacacattaccttgtgtttgcaagatctgcggcaaggcgttttccagaccctggttgcttcaaggacacattagaactcacacgggggagaagcctttttcttgccctcactgcaacagagcatttgcagacaggtcaaatctgagggctcatctgcagacccattctgatgtaaagaaataccagtgcaaaaactgctccaaaaccttctccagaatgtctctcctgcacaaacatgaggaatctggctgctgtgtagcacactgagtgacgcaatcaatgtttactcgaacagaatgcatttcttcactccgaagccaaatgacaaataaagtccaaaggcattttctcctgtgctgaccaaccaaataatatgtatagacacacacacatatgcacacacacacacacacacccacagagagagagctgcaagagcatggaattcatgtgtttaaagataatcctttccatgtgaagtttaaaattactatatatttgctgatggctagattgagagaataaaagacagtaacctttctcttcaaagataaaatgaaaagcacattgcatcttttcttcctaaaaaaatgcaaagatttacattgctgccaaatcatttcaactgaaaagaacagtattgctttgtaatagagtctgtaataggatttcccataggaagagatctgccagacgcgaactcaggtgccttaaaaagtattccaagtttactccattacatgtcggttgtctggttgccattgttgaactaaagcctttttttgattacctgtagtgctttaaagtatatttttaaaagggaggaaaaaaataacaagaacaaaacacaggagaatgtattaaaagtatttttgttttgttttgtttttgccaattaacagtatgtgccttgggggaggagggaaagattagctttgaacattcctggcgcatgctccattgtcttactattttaaaacattttaataatttttgaaaattaattaaagatgggaataagtgcaaaagaggattcttacaaattcattaatgtacttaaactatttcaaatgcataccacaaatgcaataatacaataccccttccaagtgcctttttaaattgtatagttgatgagtcaatgtaaatttgtgtttatttttatatgattgaatgagttctgtatgaaactgagatgttgtctatagctatgtctataaacaacctgaagacttgtgaaatcaatgtttcttttttaaaaaacaattttcaagttttttttacaataaacagttttgatttaaaatctcgtttgtatactattttcagagactttacttgcttcatgattagtaccaaaccactgtacaaagaattgtttgttaacaagaaaaaaatgaataatgcttattatgcatctgaagtgttattttatgtgttagatta

SEQ ID NO: 5158 - protein, 268 aa, Homo sapiens; identical to SEQ ID NO: 670

SEQ ID NO: 5159 - DNA, 1510 bp, Homo sapiens
cacggacctaccactggccctgcgtatgtggtgcagcctctcttcaatccctaagaactggttctttcaaagcatgtattttctgaagaaactttagaaccacgtttattttaaaagaacgaattggagaaaacaaatcgattaatgctcacagcttcttgggtgctttctcacgggtaaagccatggcatccgtaccttccattggttgccttctagccagaaatcagtattatcgaaagtccagtgtttcttcagttagttctttaactagctctgattctgttaacttcatagatgacgacaaaccacagcaagggttgcctgaagtggcagaatccacctggtggtttaaatcgtttttccattctgaacctgtgctttcaaatgtgagaataaaagatctgtctgctactgggtcgctgtcaggaagatcatagcaccctttccagttcaatcactcaagagtggtggagaagtcatatgccaaactgtgtcattgtttggcgggggatggactgagaatcagaggaaagggtctaaatttgttttgctcataccttcaggaaaagaataaccattgtctagttgttgtcttaaataaccttaggataacactgctgattttgattagcttctgtgtggtgcaaattactagacaggttgaattgggagtttgtgtgcagttgttttcagacattttgaactcaaacacactgactagcacagttgtaatttaatatatttaaactacttattttggattttagacatttgaatgcctagtaactaaatggaatagaaagaatctataataaagggattcatagatgccaatgttgaaatatagtgattctgatgaatttcctatctaagacaaatttagaatcattatttaaaattagaatcattatttaaagtatttttaaaagccaatgcaagattgattgttggaaagatgttttcttgacactctttatcaagtttattcatttgaattatctggacagtgtttcatttatttatcccctcctctctgactactataaaatcaacccagattacagatgagcactttgtagctgatcatctttgcactgccatttgatgaacatgttggtaacggttgcctgccttatgtagcatgaacagttgattctgacaatcaagatcctctgcctgctgcagtggtccatacatgaacagctccccttcagcgccccagctattccaggactcttctccattgtaagaagacagaaatgtgtctgagatctcatttatgagacaagatcacagcagccactgatataaaaaaagtttaggcatttttctcaacacaaagactatcgctggaagtggcacttgctacctggtgcatctttgaaaagtgtgcctttagaaacaagacacccttttaaagtaatatgtcttcaaatgttgtgacttacataaagtagctctttcattttttatatcatttttattaaaaaaacttaagttagactctt

SEQ ID NO: 5160 - protein, 84 aa, Homo sapiens
MASVPSIGCLLARNQYYRKSSVSSVSSLTSSDSVNFIDDDKPQQGLPEVAESTWWFKSFFHSEPVLSNVRIKDLSATGSLSGRS

SEQ ID NO: 5161 - DNA, 869 bp, Homo sapiens
cacggacctaccactggccctgcgtatgtggtgcagcctctcttcaatccctaagaactggttctttcaaagcatgtattttctgaagaaactttagaaccacgtttattttaaaagaacgaattggagaaaacaaatcgattaatgctcacagcttcttgggtgctttctcacgggtaaagccatggcatccgtaccttccattggttgccttctagccagaaatcagtattatcgaaagtccagtgtttcttcagttagttctttaactagctctgattctgttaacttcatagatgacgacaaaccacagcaagggttgcctgaagtggcagaatccacctggtggtttaaatcgtttttccattctgaacctgtgctttcaaatgtgagaataaaagatctgtctgctactggattacagatgagcactttgtagctgatcatctttgcactgccatttgatgaacatgttggtaacggttgcctgccttatgtagcatgaacagttgattctgacaatcaagatcctctgcctgctgcagtggtccatacatgaacagctccccttcagcgccccagctattccaggactcttctccattgtaagaagacagaaatgtgtctgagatctcatttatgagacaagatcacagcagccactgatataaaaaaagtttaggcatttttctcaacacaaagactatcgctggaagtggcacttgctacctggtgcatctttgaaaagtgtgcctttagaaacaagacacccttttaaagtaatatgtcttcaaatgttgtgacttacataaagtagctctttcattttttatatcatttttattaaaaaaacttaagttagactcttt

SEQ ID NO: 5162 - protein, 84 aa, Homo sapiens
MASVPSIGCLLARNQYYRKSSVSSVSSLTSSDSVNFIDDDKPQQGLPEVAESTWWFKSFFHSEPVLSNVRIKDLSATGLQMSTL

SEQ ID NO: 5163 - DNA, 1266 bp, Homo sapiens
cacggacctaccactggccctgcgtatgtggtgcagcctctcttcaatccctaagaactggttctttcaaagcatgtattttctgaagaaactttagaaccacgtttattttaaaagaacgaattggagaaaacaaatcgattaatgctcacagcttcttgggtgctttctcacgggtaaagccatggcatccgtaccttccattggttgccttctagccagaaatcagtattatcgaaagtccagtgtttcttcagttagttctttaactagctctgattctgttaacttcatagatgacgacaaaccacagcaagggttgcctgaagtggcagaatccacctggtggtttaaatcgtttttccattctgaacctgtgctttcaaatgtgagaataaaagatctgtctgctactggcatgaacagttgattctgacaatcaagatcctctgcctgctgcagtggtccatacatgaacagctccccttcagcgccccagctattccaggactcttctccattgtaagaagacagaaatgtgtctgagatctcatttatgagacaagatcacagcagccactgatataaaaaaagtttaggcatttttctcaacacaaagactatcgctggaagtggcacttgctacctggtgcatctttgaaaagtgtgcctttagaaacaagacacccttttaaagtaatatgtcttcaaatgttgtgacttacataaagtagctctttcattttttatatcatttttattaaaaaaacttaagttagactctttttctgtctgttgagtgatttatttattatgccttaaaactgacttgtcaatgtttcacataatggtttaaagggcattgaattcgaaattttagaaaataattgtaaaaattcaatttttttaaaagaatgaaggttggaaatagcatatgtatcattaagtatattagagctaatcaattggtcattgtatagactttaaaatttatgactttaaataatatttaataacatggaaaattatattatggcattaaaaattagcataatacaccatatatggtacaatcgtagttgtattaaaaagttacatatgcataaagatagactggaaggaactgtaccaaaatgctgacagggctatttctggagatgggattatgggcgtttttcattctctttttaatatatttttccatatctcccaatttttctaatatgacaagtattgtgcgtaattagaaaataataaatgttaata

SEQ ID NO: 5164 - protein, 81 aa, Homo sapiens; identical to SEQ ID NO: 1436

SEQ ID NO: 5165 - DNA, 267 bp, Homo sapiens
gagatcaaggaagaggaacacgataaaatgcttatggctccaagaagaaatagggtgagagataggaccacaaattgtttactcatttcaaccagtaaacatgtcctgcaatgtcaatctgtctttctgccacagcagttctgcgcctcctgagttgtttccatctccctccagtcattcaggaccaccaatgagatttgtgatatttggaaaactgccacccagtgcctccttttcctaatctgctgaataaagttaataagacta

SEQ ID NO: 5166 - protein, 41 aa, Homo sapiens
MLMAPRRNRVRDRTTNCLLISTSKHVLQCQSVFLPQQFCAS

SEQ ID NO: 5167 - DNA, 768 bp, Homo sapiens
aaaagatcttctaccttctacccttgctgccttggaacctgggaccaccatgctgtgaagactccagggacatgaggccatgtggagagagtcccaaccattacaaccatcccagccatttagcctgatcccccacactgagtctgttattggtgttcttgtaatctcccaggatagaaatcaagagagatcaccagccacagcagcaaagaaaaagagaaagcttcatttagctggtgcacagggaaaggcagcaccatggaagtagttaacagttctgcagaacattttagaaatggtaacataagtataaacaacaaaacagtgagattctgataccaacttccagttcctcctcaccaagacttcgtgaaaactcttcagctcatctggcaaaacaaacaggcaaagacgcagataccaggacacttccttttgaacacttggctgcagaagctaagagacatgggatacgcgaattgattcttacataatatgagagatatagggctggaccacacgtgattcccgtggcacgctgcttctgagcactctacagccgccctctagccaaacccagcaccggtcagatggggagaaaccagagataggaaagtgctcgcacgtgggaggtcacagtggagcctccgtgagaaccttcaccagaagaaggttacaggccatgaactgcagactcaggaagataaattggcaaagcagcaccgcgatggaagagctcctggcagcaatgtaaatactggagcccag

SEQ ID NO: 5168 - protein, 62 aa, Homo sapiens
MWRESQPLQPSQPFSLIPHTESVIGVLVISQDRNQERSPATAAKKKRKLHLAGAQGKAAPWK

SEQ ID NO: 5169 - DNA, 476 bp, Homo sapiens
aaacgaacctgactaggggctacatgaaagccatactgtgcttcctcctccttctcatgaatccctttcctcccttctcttttccatcccccatagatcagaaatgtgaaggcggttaggaaatgtccagactccaaacagaaaaaactgtgatcctcagcagacacaagacataatattggattatctgcagcttcatcctgggaaaaatataggagactgaagggaaacaggaaaataagtaaacacccatagaaaaataaaatcaacatcctgaaataggaatttctgaggatatgcttcccatttgagagatgaaaacctcgaggcacagaaataccataaaattgtctaaattacacatgcaaattaatcttggggctagaacttgatggaatatctatgttcttagacaatgctaattgattataggaactgcctttaggaccagaacaagaatctaatgtctaaatggt

SEQ ID NO: 5170 - protein, 31 aa, Homo sapiens
MKAILCFLLLLMNPFPPFSFPSPIDQKCEGG

SEQ ID NO: 5171 - DNA, 604 bp, Homo sapiens
ggcttgaccagaagcaggaagagtaggaaatgttattttaaaaagtcccgtttttcacactgctgatgtctggagagtcgagataagctttgagcctacttccaaatctctgggtgctcctccaagcgtgctggaaatgggggtgtgaaacatagcttgctgaggtgggattggacagggatcaagacgcaacagaattggcactgtcaagaggcaagataaggcatttgcaattggcagtgtttcaaaggactccagatttctccaaagaacctagatttcccaggtactgaacatgtgcaaaatagaaacaaacattcaagatgagtgagtgatgagttctgcctgtggtcagaagaaaacaacactcccaactctgcaacctgatcacttccctacttagtcctgtttgtggagccgccttattaacgacattagaacaaagatatgaaggtgatgtacaatcattactagtttttaaccaaagattttggtcacaataaggaccaatagctgtttctttggacctctgagcccatctctgctggaaaggtatttgatacattttagcatgcaggaaacaataaacatttacatttatttt

SEQ ID NO: 5172 - protein, 45 aa, Homo sapiens
LAEVGLDRDQDATELALSRGKIRHLQLAVFQRTPDFSKEPRFPRY

SEQ ID NO: 5173 - DNA, 586 bp, Homo sapiens
tgtaaacgctcgcagattgaatgacgaaataaaagaagaaactacagcacagtcaattttctccatgacagcctgagagatgtagctggtgctgccacttttccttcatttttccctgccttgaatatggtggtgatgcctggagcttcagcagccatcttatggccatgaaatggcaagcatgagaatgaaagaaaatgcactcatcatgaaaggaggaagagcagaagaaatctgggtcactggtgatatcaatggatagctgaagcagtgctgctctggatggaaaatgccctgggttctccgagacttaacaccccgccttgtgaacgcgagcaagattattctctctgagcagctcttttcacatgtgataagcttggcaagttgccctggattgaattctcacccactgtcttcacccaacccagcagagaagaaggcttgtgactgtgtaaggtgaaaatggatataccatttctgggaagagaaaagaagccaattaaaagtggggcatgtcattacactgaccagaaatgaacgtacctttttagaaataaagaatctgtatattcctgtggctctg

SEQ ID NO: 5174 - protein, 57 aa, Homo sapiens; identical to SEQ ID NO: 1438

SEQ ID NO: 5175 - DNA, 866 bp, Homo sapiens
ggcttggtgaaccctcaaaaaggctgtcaaacacccagaggccttggggatcaggaaggagctatcatgtggtctttcatctaagagagaattgtcctgcctgatgggcttcaaaccaccagaacatcagttcttcctggttctgcagtagtctccaaccttcagactcaaacttcagcacctgttcttcagattttggacttgcagcctctataatcacatgagccaattccttatataaatttatttatacatgctgacagttggttctgtttctctggataaccctgactgttagagctgttacctcaaatttgttttcttatatttggtgtctgttttggagtacttacaagtgcttaaaatgttctttttcaattaggtgagtctcagtctctaagataatttttttattgttctattttatagattacatgttaatgtcaattaagctataaacattttattgctgatacattatcaaaatgcttttcaaacagccatttccaacagtctattctttggcaaaaaaacaatgccattctcttgccatggccaaatgtgagtgctactaacaggtaaactcttaatttgtaagtgaggctgaaatcttaaaatgccttcctgaaacttatacatgattgattttgtttatttgtgtaatttctttgttctatggtttcagcttcaattgctgagaaaatgtcaagattatttcctgagaatttcctttgtggctaagacaaaggagaagttttaattttactagaaactgtgaaacgaggcttttaaaaagtttcattaaaaaaaaaattagggaagaataggcatattcagaaaacctactttcatttaggctggattgg

SEQ ID NO: 5176 - protein, 40 aa, Homo sapiens
MIDFVYLCNFFVLWFQLQLLRKCQDYFLRISFVAKTKEKF

SEQ ID NO: 5177 - DNA, 406 bp, Homo sapiens
agaggaattcagaattcagcgggggtacattctcagctgatggagatggtcaaggggttaccgccagtctgtttcttgcgctgataatttttctagacattaaatctcaccatttgttcccaacaaagaaagaaagacaggaccaccagactctacagggtgatctgacactaacaacttaacaaccattctactgagtcaacaaatttctcctctgtgtacagacttcaaccgaagaatctaatactactgtgaagtgctgctgggcaggacacacgttcaggagacacagtaggggaacagatgaggccagagtggcccacagccggggtgaagagcccccaattatttataaagtgtttgctgcctcatttatgaaaataaatagtgcaaagctgttacaagt

SEQ ID NO: 5178 - protein, 59 aa, Homo sapiens
RNSEFSGGTFSADGDGQGVTASLFLALIIFLDIKSHHLFPTKKERQDHQTLQGDLTLTT

SEQ ID NO: 5179 - DNA, 496 bp, Homo sapiens
aagttaagattgccacctggaaactttgggctcctcttacctttaaggcaacaggctaagaaaggagttacagtgttatctggggtgattgaccaggactgtgaagatgaaatcagtctactactccacaacggagatggagatggtcaaggggttaccgccagtctgtttcttgcgctgataatttttctagacattaaatctcaccatttgttcccaacaaagaaagaaagacaggaccaccagactctacagggtgatctgacactaacaacttaacaaccattctactgagtcaacaaatttctcctctgtgtacagacttcaaccgaagaatctaatactactgtgaagtgctgctgggcaggacacacgttcaggagacacagtaggggaacagatgaggccagagtggcccacagccggggtgaagagcccccaattatttataaagtgtttgctgcctcatttatgaaaataaatagtgcaaagctgt

SEQ ID NO: 5180 - protein, 92 aa, Homo sapiens
KLRLPPGNFGLLLPLRQQAKKGVTVLSGVIDQDCEDEISLLLHNGDGDGQGVTASLFLALIIFLDIKSHHLFPTKKERQDHQTLQGDLTLTT

SEQ ID NO: 5181 - DNA, 3421 bp, Homo sapiens
acatgcatttccctgctgctatgtgaaatgtgcgtcttctccttccgccatgattaagtaagcaaacattttcctctaattcagattctttaaacaaaagttgcaaatgaatgtagccttcatctattgtaaaattaaagatggagatggtcaaggggttaccgccagtctgtttcttgcgctgataatttttctagacattaaatctcaccatttgttcccaacaaagaaagaaagacaggaccaccagactctacagggaagccaagaggaagaagggaaggagcccagaaatggagagaagctggactctagggatggatctggggatgctccacaaagtgcagctgtggagaatgcagaagaagagttggctagtgggacattcccactgaggagcatggcagggggaatgtctaatattcactaagagaattcttgaaatgtaacatttagatgaaactcttcaagtttccttaaaatacaaattcatgactctctttctttctctctctctctttctctctctctttggtatgttaaagtaatcaaggaaagggattttgttttataactgggttacacaggggagagaccagaatagctgaaagctgtgagacatgaagaaaattcaagatttaggagacatgcagaacatcagtgtctaggcaaaatggcagactgaccaacccccacacactgaatccctagagatattaggacagggatattgagaaaaatttacctttaagttgtaaaggacaaggcaactcaacatattgaatgccttgttgacaaccaggggctaatatttgggatgcatattgggcatagatgcacagaaaataatttatcagtgacattaataatatgacatctctttgttgagaatttactgctgtcttaatatcacaactctaaggggtcaacatccagaataaacttcttatcttacatatttaaaattatttgctaggctacatttttcttagaaaaatgcatatctgaaacagaatattgatttttttcctgggtcatacataaagaccatcagaaattaattattgaaaaaacactgctatactcattagagatatattttaattagattaattttgcattaacagtccatgagaagttacaactaacttgcaacgagacattaacatgcatcatgtttgatataagtaaaaatggaaatgattagaagtatacaaatataaagtatgttgctagtatatgcaagcttaaaaaacttttacctgatagaattagcaagagcagctatgttgagcttctttcagttaaaagtcattttcggctatgtctccctaaggatagaaatatcactgcttttgatctcatttagaattctgctcacttttaggaaagtagggctgtttggaaatggtcagccatatccttactgaatttcctagggcttgactgcacctactctagttaacaagtaagatatagttatatattgtattataacttctcaaagcacttatattttgattttccttcttttatgttcattatcttcatttggactactccatgtgacaaaagcagttatttttcttctaccccctaaactggaccacatcgatgctcttaggtccaaatcatattctttaagaaacaagtgttcactgaatgatttactgcattatataataggtactatacaagacacctgaggccccccacaccgtgaaaacagatgtttcttcctggagcttgcccaataggagagaaatttttaatttaccctttctcagtaaaccattatacaaaacagaagtgaaattatggacccagtgaactcaatctggctgacttgcaacccctatgtgttcataaacccactgaaatatataatttgttgtttatattaaatatgcactgaagcatgattagataaacattgaaagtaaattttaattttaaccatcagtggaagtatatggggtgatttaagtcattcatattagtttatttttatcaggtgttcctccttgtccatagtgaaatacaatacagagattatagcctgtggcttgacaggacatcttatagttggtaacaggactacattaaaaggaaaaaacaataaataaggatgtctaattatacagataaagaaagcaagttcactcactcctccaggacagcaccagagacaacgttagaaccaagagtttcaaaacctcgccttgtatggtttgcctgatgccatgattaaagaaaagggggtggggaactaagagaggaagccaaagagaaagaattcagtaccaaacagcaatattcagatgttttattaaataataggaggtgttttgaccttgctggtgaacagaggtgatctcaaaacatttgacagatataattaaggccataaggcaataattgcaaaagtcaaggagcccttgccacctccaaagcatcacgtgtggatgcaggaaccatattaacaacatgggtagtcaaggagaaagcagatagaataaagctgtacccagcaatataaagggacatgcaagtgtgtgttgtgcttaagagtaaacttagggaaaaaagctccccataacctcgagaaacgtttctggatctgagatatccattagcacatttagaaggtacctatttccattattgtgaaggagttgtaaatgaaataaacaactttaaataatacctcccttggtcaaactgcattaagtattccctgatggaattcattcatcatcattcaaacagaatggtttgcaactcaacctgcctagtgtggggtctggaattcccaccacagtcactgtgccttaagcactgttgcagcagaaggacttgaagtaacacatgaatatataatgccaatttgcatgtcagcatggattgttgaaattgaagttagttaattgtcacattgtaacaggaaaagaatccaagttttggagctggttggaactgagttttcatcttctttctctgctacttaactgtgttatcctgaacaagatactcaacctccatgagacacagtgaccatgtgaaatatatatgtaaaatgtctggcaaacatctgattcatgtaggtacccaaaattagatcattttcattttcttttgcttccttggaagttcaaaacaaaattctgaggtaagtttcaattaaaatgggtcaggcagacagattccagcaaggtcaaagcatccttttttctttaataaaatatctgaatatctgaacaagaaacaacttctgtttctcaaggttgaaatgatgaattattgaacttctgttgctgtttgttttctctcttatctccttactactacatataaatgagatatcttgctatcccactgatatctcaaattcagtatttcccaaataaaacgtaatcttttc

SEQ ID NO: 5182 - protein, 107 aa, Homo sapiens; identical to SEQ ID NO: 672

SEQ ID NO: 5183 - DNA, 350 bp, Homo sapiens
agctttcactatagaagtgcccacgagctcttccaaacatattttcctttttaaataagcacatcttctagatggagatggtcaaggggttaccgccagtctgtttcttgcgctgataatttttctagacattaaatctcaccatttgttcccaacaaagaaagaaagacaggaccaccagatctagggatggatctggggatgctccacaaagtgcagctgtggagaatgcagaagaagagttggctagtgggacattcccactgaggagcatggcagggggaatgtctaatattcactaagagaattcttgaaatgtaacatttagatgaaactcttcaagtttcctt

SEQ ID NO: 5184 - protein, 42 aa, Homo sapiens
AHLLDGDGQGVTASLFLALIIFLDIKSHHLFPTKKERQDHQI

SEQ ID NO: 5185 - DNA, 266 bp, Homo sapiens
gaagacagaaataaaactaaaagctaattctctctggacttggaaaggaaggagtatcagagaagcagagaagagaaaaaagcttagaaagcaggaaagaagctgaaagcatttggaagacatcgtgaactctttgaaggcagaaactaaatgaaattcaccttcatatttacagggaccagcacagcctctagaacagaatgggtgctcaaatcaatatttctttaaaagaataaatgaatgaataaataaatgaatgcaagtgg

SEQ ID NO: 5186 - protein, 35 aa, Homo sapiens
KLILSGLGKEGVSEKQRREKSLESRKEAESIWKTS

SEQ ID NO: 5187 - DNA, 3262 bp, Homo sapiens
ttgtggacatcggatacccaaggagacgaagctgaagcaggagaaggaggggaaaattaaccggccttccaacttttgtctgcctcattctaaaatttacacagtagaccatttgtcatccatgctgtcccacaaatagttttttgtttacgatttatgacaggtttatgttacttctatttgaatttctatatttcccatgtggtttttatgtttaatattaggggagtagagccagttaacatttagggagttatctgttttcatcttgaggtcccatgatcccctctcttcctccccaccctgaaaaaaatgagttcctattttttctgggagagggggggattgattagaaaaaaatgtagtgtgttccatttaaaattttggcatatggcattttctaacttaggaagccacaatgttcttggcccatcatgacattgggtagcattaactgtaagttttgtgcttccaaatcactttttggtttttaagaatttcttgatactcttatagcctgccttcaattttgatcctttattctttctatttgtcaggtgcacaagattaccttcctgttttagccttctgtcttgtcaccaaccattcttacttggtggccatgtacttggaaaaaggccgcatgatctttctggctccactcagtgtctaaggcaccctgcttcctttgcttgcatcccacagactatttccctcatcctatttactgcagcaaatctctccttagttgatgagactgtgtttatctccctttaaaaccctacctatcctgaatggtctgtcattgtctgcctttaaaatccttcctctttcttcctcctctattctctaaataatgatggggctaagttatacccaaagctcactttacaaaatatttcctcagtactttgcagaaaacaccaaacaaaaatgccattttaaaaaaggtgtattttttcttttagaatgtaagctcctcaagagcagggacaatgttttctgtatgttctattgtgcctagtacactgtaaatgctcaataaatattgatgatgggaggcagtgagtcttgatgataagggtgagaaactgaaatcccaaacactgttttgttgcttgttttattatgacctcagattaaattgggaaatattggcccttttgaataattgtcccaaatattacattcaaataaaagtgcaatggagaccttggggtctttatttccaggagaaaagataccttctgcatctagggcaacaatccttttccctcgcagctctttcttttacctcacttactgatttctcctgacccccaagccaaggaggtaaaataattatatatatatatatatatatatatatatatatataaagtaattatattttatagctagactgaagaggtgggaatttttttgttgttttttttttttttggagacaagagtcttgctctgtcacccaggcttgagtgcagtggtgcgatctcggctgagtgcaacctccgcctgctgggttcaagcgattctcctgcctcagcctcccaagtagctgggattacaggtgcccgccaccacacctggctaatttttgtgtttttagtagagacagggtttcaccatgttgtccaggctggtcttgaattcccgacctcaggcaatccgcccatctcaacctcccaaagtgctgggattacaggcataagccaccgcgcccagtagagatgtgatattattcaagtaaataaaacctgaaacttggcacatttgcctatttaatgtgcatcagtcatctgaactaggttgatcctggaataatgaaaacacttcactagtattaactaatgttttctacatagtagttcccaatagattaaggaaaatttccaacctgagattctttgttttggaatttgaataatgtgtttgtaactattccttgattgtcccaaatccaggctttacgtctgcttttgtcaatgtaacatcctagtgccaggaaattggaaaatccaatgactttttgtgtgtaaagtactggaatttttttgttcgtttgtttttaagacggagtgtcaactctcgcccaggctggggtgcagtggcctgatctcggctcactgcaaccttctcctcccaggctgaagtgattctcctgcctcagcctcgcaagtagctgggactgcaggcatgtgccaccactcctggctaattatttgtatttttagtagagagagggtttcaccgtgttagccatgatggtctcattctcctgaccttgtgatccgcccacctcggcctcccaaagtgctgggattacaggcgtgagccactgtgcccaccctggtatgttttttttaaattggccacttaagagttgtccttcagaaagtggagcagcagtgtgattagtaaaaacgatgggctttcctgcagctctggcttatggtctttgtttttccagttaacagctgttacttcatgctgttatagggggtggggggagaaagagaaagaatatgtctagtggcttaattttggggctcaatttgtttattatgtttttcctgcaaaagagtcaccagtcttgtcatggctcaatgcatattttaaaatgagtcaaagccaatttggaagctgctatcttaggttatttgtagtcaggcttcaaatggagagtgaaactttgactttgaaaactggtgctctatgctcaatgatggtcttacacattcctctagggaaaggtcaagaaataaatttggcttgattgtattctctcatttaccatataggaaatactatggtagaactgaaaatatgtacaatagtaaagtggtggctgagactgggcacttggaaaatagacttggattcttttctaagtgtgaaactaattaaatacttttatgtgactggtagtagtcacagtctccttgattgattctagttccttttcaaagtggagagacctgaatatagattgtaacaggatgtccaaccttgccagacaagcaggcatatatgtctctgggatgcagaagcagttacaagttaatatatttaagcataatgttagccaatcctaggtgataccagagatgtgaatatttgatcatatttgagttcattccttgaaagtccaaacctaactggtcttaattgattacttcttagtattccgaattttagaatttaaaaccctatgaattttcagtttgtgcttacattttctaacattggatgtttgctttggc

SEQ ID NO: 5188 - protein, 63 aa, Homo sapiens [sequence omitted]

SEQ ID NO: 5189 - DNA, 4920 bp, Homo sapiens
cagaacatccagtcatggataaaaatgagctggttcagaaggccaaactggccgagcaggctgagcgatatgatgacatggcagcctgcatgaagtctgtaactgagcaaggagctgaattatccaatgaggagaggaatcttctctcagttgcttataaaaatgttgtaggagcccgtaggtcatcttggagggtcgtctcaagtattgaacaaaagacggaaggtgctgagaaaaaacagcagatggctcgagaatacagagagaaaattgagacggagctaagagatatctgcaatgatgtactgtctcttttggaaaagttcttgatccccaatgcttcacaagcagagagcaaagtcttctatttgaaaatgaaaggagattactaccgttacttggctgaggttgccgctggtgatgacaagaaagggattgtcgatcagtcacaacaagcataccaagaagcttttgaaatcagcaaaaaggaaatgcaaccaacacatcctatcagactgggtctggcccttaacttctctgtgttctattatgagattctgaactccccagagaaagcctgctctcttgcaaagacagcttttgatgaagccattgctgaacttgatacattaagtgaagagtcatacaaagacagcacgctaataatgcaattactgagagacaacttgacattgtggacatcggatacccaaggagacgaagctgaagcaggagaaggaggggaaaattaaccggccttccaacttttgtctgcctcattctaaaatttacacagtagaccatttgtcatccatgctgtcccacaaatagttttttgtttacgatttatgacaggtttatgttacttctatttgaatttctatatttcccatgtggtttttatgtttaatattaggggagtagagccagttaacatttagggagttatctgttttcatcttgaggtggccaatatggggatgtggaatttttatacaagttataagtgtttggcatagtacttttggtacattgtggcttcaaaagggccagtgtaaaactgcttccatgtctaagcaaagaaaactgcctacatactggtttgtcctggcggggaataaaagggatcattggttccagtcacaggtgtagtaattgtgggtactttaaggtttggagcacttacaaggctgtggtagaatcataccccatggataccacatattaaaccatgtatatctgtggaatactcaatgtgtacacctttgactacagctgcagaagtgttcctttagacaaagttgtgacccattttactctggataagggcagaaacggttcacattccattatttgtaaagttacctgctgttagctttcattatttttgctacactcattttatttgtatttaaatgttttaggcaacctaagaacaaatgtaaaagtaaagatgcaggaaaaatgaattgcttggtattcattacttcatgtatatcaagcacagcagtaaaacaaaaacccatgtatttaacttttttttaggatttttgcttttgtgatttttttttttttgatacttgcctaacatgcatgtgctgtaaaaatagttaacagggaaataacttgagatgatggctagctttgtttaatgtcttatgaaattttcatgaacaatccaagcataattgttaagaacacgtgtattaaattcatgtaagtggaataaaagttttatgaatggacttttcaactactttctctacagcttttcatgtaaattagtcttggttctgaaacttctctaaaggaaattgtacattttttgaaatttattccttattccctcttggcagctaatgggctcttaccaagtttaaacacaaaatttatcataacaaaaatactactaatataactactgtttccatgtcccatgatcccctctcttcctccccaccctgaaaaaaatgagttcctattttttctgggagagggggggattgattagaaaaaaatgtagtgtgttccatttaaaattttggcatatggcattttctaacttaggaagccacaatgttcttggcccatcatgacattgggtagcattaactgtaagttttgtgcttccaaatcactttttggtttttaagaatttcttgatactcttatagcctgccttcaattttgatcctttattctttctatttgtcaggtgcacaagattaccttcctgttttagccttctgtcttgtcaccaaccattcttacttggtggccatgtacttggaaaaaggccgcatgatctttctggctccactcagtgtctaaggcaccctgcttcctttgcttgcatcccacagactatttccctcatcctatttactgcagcaaatctctccttagttgatgagactgtgtttatctccctttaaaaccctacctatcctgaatggtctgtcattgtctgcctttaaaatccttcctctttcttcctcctctattctctaaataatgatggggctaagttatacccaaagctcactttacaaaatatttcctcagtactttgcagaaaacaccaaacaaaaatgccattttaaaaaaggtgtattttttcttttagaatgtaagctcctcaagagcagggacaatgttttctgtatgttctattgtgcctagtacactgtaaatgctcaataaatattgatgatgggaggcagtgagtcttgatgataagggtgagaaactgaaatcccaaacactgttttgttgcttgttttattatgacctcagattaaattgggaaatattggcccttttgaataattgtcccaaatattacattcaaataaaagtgcaatggagaccttggggtctttatttccaggagaaaagataccttctgcatctagggcaacaatccttttccctcgcagctctttcttttacctcacttactgatttctcctgacccccaagccaaggaggtaaaataattatatatatatatatatatatatatatatatatataaagtaattatattttatagctagactgaagaggtgggaatttttttgttgttttttttttttttggagacaagagtcttgctctgtcacccaggcttgagtgcagtggtgcgatctcggctgagtgcaacctccgcctgctgggttcaagcgattctcctgcctcagcctcccaagtagctgggattacaggtgcccgccaccacacctggctaatttttgtgtttttagtagagacagggtttcaccatgttgtccaggctggtcttgaattcccgacctcaggcaatccgcccatctcaacctcccaaagtgctgggattacaggcataagccaccgcgcccagtagagatgtgatattattcaagtaaataaaacctgaaacttggcacatttgcctatttaatgtgcatcagtcatctgaactaggttgatcctggaataatgaaaacacttcactagtattaactaatgttttctacatagtagttcccaatagattaaggaaaatttccaacctgagattctttgttttggaatttgaataatgtgtttgtaactattccttgattgtcccaaatccaggctttacgtctgcttttgtcaatgtaacatcctagtgccaggaaattggaaaatccaatgactttttgtgtgtaaagtactggaatttttttgttcgtttgtttttaagacggagtgtcaactctcgcccaggctggggtgcagtggcctgatctcggctcactgcaaccttctcctcccaggctgaagtgattctcctgcctcagcctcgcaagtagctgggactgcaggcatgtgccaccactcctggctaattatttgtatttttagtagagagagggtttcaccgtgttagccatgatggtctcattctcctgaccttgtgatccgcccacctcggcctcccaaagtgctgggattacaggcgtgagccactgtgcccaccctggtatgttttttttaaattggccacttaagagttgtccttcagaaagtggagcagcagtgtgattagtaaaaacgatgggctttcctgcagctctggcttatggtctttgtttttccagttaacagctgttacttcatgctgttatagggggtggggggagaaagagaaagaatatgtctagtggcttaattttggggctcaatttgtttattatgtttttcctgcaaaagagtcaccagtcttgtcatggctcaatgcatattttaaaatgagtcaaagccaatttggaagctgctatcttaggttatttgtagtcaggcttcaaatggagagtgaaactttgactttgaaaactggtgctctatgctcaatgatggtcttacacattcctctagggaaaggtcaagaaataaatttggcttgattgtattctctcatttaccatataggaaatactatggtagaactgaaaatatgtacaatagtaaagtggtggctgagactgggcacttggaaaatagacttggattcttttctaagtgtgaaactaattaaatacttttatgtgactggtagtagtcacagtctccttgattgattctagttccttttcaaagtggagagacctgaatatagattgtaacaggatgtccaaccttgccagacaagcaggcatatatgtctctgggatgcagaagcagttacaagttaatatatttaagcataatgttagccaatcctaggtgataccagagatgtgaatatttgatcatatttgagttcattccttgaaagtccaaacctaactggtcttaattgattacttcttagtattccgaattttagaatttaaaaccctatgaattttcagtttgtgcttacattttctaacattggatgtttgctttggc

SEQ ID NO: 5190 - protein, 245 aa, Homo sapiens; identical to SEQ ID NO: 674

SEQ ID NO: 5191 - DNA, 4831 bp, Homo sapiens
cagaacatccagtcatggataaaaatgagctggttcagaaggccaaactggccgagcaggctgagcgatatgatgacatggcagcctgcatgaagtctgtaactgagcaaggagctgaattatccaatgaggagaggaatcttctctcagttgcttataaaaatgttgtaggagcccgtaggtcatcttggagggtcgtctcaagtattgaacaaaagacggaaggtgctgagaaaaaacagcagatggctcgagaatacagagagaaaattgagacggagctaagagatatctgcaatgatgtactgtctcttttggaaaagttcttgatccccaatgcttcacaagcagagagcaaagtcttctatttgaaaatgaaaggagattactaccgttacttggctgaggttgccgctggtgatgacaagaaagggattgtcgatcagtcacaacaagcataccaagaagcttttgaaatcagcaaaaaggaaatgcaaccaacacatcgcttttgatgaagccattgctgaacttgatacattaagtgaagagtcatacaaagacagcacgctaataatgcaattactgagagacaacttgacattgtggacatcggatacccaaggagacgaagctgaagcaggagaaggaggggaaaattaaccggccttccaacttttgtctgcctcattctaaaatttacacagtagaccatttgtcatccatgctgtcccacaaatagttttttgtttacgatttatgacaggtttatgttacttctatttgaatttctatatttcccatgtggtttttatgtttaatattaggggagtagagccagttaacatttagggagttatctgttttcatcttgaggtggccaatatggggatgtggaatttttatacaagttataagtgtttggcatagtacttttggtacattgtggcttcaaaagggccagtgtaaaactgcttccatgtctaagcaaagaaaactgcctacatactggtttgtcctggcggggaataaaagggatcattggttccagtcacaggtgtagtaattgtgggtactttaaggtttggagcacttacaaggctgtggtagaatcataccccatggataccacatattaaaccatgtatatctgtggaatactcaatgtgtacacctttgactacagctgcagaagtgttcctttagacaaagttgtgacccattttactctggataagggcagaaacggttcacattccattatttgtaaagttacctgctgttagctttcattatttttgctacactcattttatttgtatttaaatgttttaggcaacctaagaacaaatgtaaaagtaaagatgcaggaaaaatgaattgcttggtattcattacttcatgtatatcaagcacagcagtaaaacaaaaacccatgtatttaacttttttttaggatttttgcttttgtgatttttttttttttgatacttgcctaacatgcatgtgctgtaaaaatagttaacagggaaataacttgagatgatggctagctttgtttaatgtcttatgaaattttcatgaacaatccaagcataattgttaagaacacgtgtattaaattcatgtaagtggaataaaagttttatgaatggacttttcaactactttctctacagcttttcatgtaaattagtcttggttctgaaacttctctaaaggaaattgtacattttttgaaatttattccttattccctcttggcagctaatgggctcttaccaagtttaaacacaaaatttatcataacaaaaatactactaatataactactgtttccatgtcccatgatcccctctcttcctccccaccctgaaaaaaatgagttcctattttttctgggagagggggggattgattagaaaaaaatgtagtgtgttccatttaaaattttggcatatggcattttctaacttaggaagccacaatgttcttggcccatcatgacattgggtagcattaactgtaagttttgtgcttccaaatcactttttggtttttaagaatttcttgatactcttatagcctgccttcaattttgatcctttattctttctatttgtcaggtgcacaagattaccttcctgttttagccttctgtcttgtcaccaaccattcttacttggtggccatgtacttggaaaaaggccgcatgatctttctggctccactcagtgtctaaggcaccctgcttcctttgcttgcatcccacagactatttccctcatcctatttactgcagcaaatctctccttagttgatgagactgtgtttatctccctttaaaaccctacctatcctgaatggtctgtcattgtctgcctttaaaatccttcctctttcttcctcctctattctctaaataatgatggggctaagttatacccaaagctcactttacaaaatatttcctcagtactttgcagaaaacaccaaacaaaaatgccattttaaaaaaggtgtattttttcttttagaatgtaagctcctcaagagcagggacaatgttttctgtatgttctattgtgcctagtacactgtaaatgctcaataaatattgatgatgggaggcagtgagtcttgatgataagggtgagaaactgaaatcccaaacactgttttgttgcttgttttattatgacctcagattaaattgggaaatattggcccttttgaataattgtcccaaatattacattcaaataaaagtgcaatggagaccttggggtctttatttccaggagaaaagataccttctgcatctagggcaacaatccttttccctcgcagctctttcttttacctcacttactgatttctcctgacccccaagccaaggaggtaaaataattatatatatatatatatatatatatatatatatataaagtaattatattttatagctagactgaagaggtgggaatttttttgttgttttttttttttttggagacaagagtcttgctctgtcacccaggcttgagtgcagtggtgcgatctcggctgagtgcaacctccgcctgctgggttcaagcgattctcctgcctcagcctcccaagtagctgggattacaggtgcccgccaccacacctggctaatttttgtgtttttagtagagacagggtttcaccatgttgtccaggctggtcttgaattcccgacctcaggcaatccgcccatctcaacctcccaaagtgctgggattacaggcataagccaccgcgcccagtagagatgtgatattattcaagtaaataaaacctgaaacttggcacatttgcctatttaatgtgcatcagtcatctgaactaggttgatcctggaataatgaaaacacttcactagtattaactaatgttttctacatagtagttcccaatagattaaggaaaatttccaacctgagattctttgttttggaatttgaataatgtgtttgtaactattccttgattgtcccaaatccaggctttacgtctgcttttgtcaatgtaacatcctagtgccaggaaattggaaaatccaatgactttttgtgtgtaaagtactggaatttttttgttcgtttgtttttaagacggagtgtcaactctcgcccaggctggggtgcagtggcctgatctcggctcactgcaaccttctcctcccaggctgaagtgattctcctgcctcagcctcgcaagtagctgggactgcaggcatgtgccaccactcctggctaattatttgtatttttagtagagagagggtttcaccgtgttagccatgatggtctcattctcctgaccttgtgatccgcccacctcggcctcccaaagtgctgggattacaggcgtgagccactgtgcccaccctggtatgttttttttaaattggccacttaagagttgtccttcagaaagtggagcagcagtgtgattagtaaaaacgatgggctttcctgcagctctggcttatggtctttgtttttccagttaacagctgttacttcatgctgttatagggggtggggggagaaagagaaagaatatgtctagtggcttaattttggggctcaatttgtttattatgtttttcctgcaaaagagtcaccagtcttgtcatggctcaatgcatattttaaaatgagtcaaagccaatttggaagctgctatcttaggttatttgtagtcaggcttcaaatggagagtgaaactttgactttgaaaactggtgctctatgctcaatgatggtcttacacattcctctagggaaaggtcaagaaataaatttggcttgattgtattctctcatttaccatataggaaatactatggtagaactgaaaatatgtacaatagtaaagtggtggctgagactgggcacttggaaaatagacttggattcttttctaagtgtgaaactaattaaatacttttatgtgactggtagtagtcacagtctccttgattgattctagttccttttcaaagtggagagacctgaatatagattgtaacaggatgtccaaccttgccagacaagcaggcatatatgtctctgggatgcagaagcagttacaagttaatatatttaagcataatgttagccaatcctaggtgataccagagatgtgaatatttgatcatatttgagttcattccttgaaagtccaaacctaactggtcttaattgattacttcttagtattccgaattttagaatttaaaaccctatgaattttcagtttgtgcttacattttctaacattggatgtttgctttggc

SEQ ID NO: 5192 - protein, 166 aa, Homo sapiens
MDKNELVQKAKLAEQAERYDDMAACMKSVTEQGAELSNEERNLLSVAYKNVVGARRSSWRVVSSIEQKTEGAEKKQQMAREYREKIETELRDICNDVLSLLEKFLIPNASQAESKVFYLKMKGDYYRYLAEVAAGDDKKGIVDQSQQAYQEAFEISKKEMQPTHRF

SEQ ID NO: 5193 - DNA, 5528 bp, Homo sapiens
gatcgtcatgtgcagtatgaggtcttcacgtgaaagctttatttgggtaggaaaacctagcctacgagaaacgggtccgtgcggtcacgcctgactgcctgtctccgggtcaaggctgccaggaccagctccagccctccgcccgagaaggctgtcctttcccctcggaactctggcttccctaaagcggccgcgcctccttccaggcctcacctcctgccggctccgcccggcccggcccacctcgcccccacctcggcgcccacccattgtcccctcgcgcagtcaccgagcgcagatcccgcgctctcgattggaacgcctccccatcactcagccacactcaggggctggacgcctcactcccgtttccgagccataaaaggtctaggaccgcttcccccgagccagcagcgtttgacgtcatcgtgcgtgtggtgcccctgctgccggggctggtgattggaggaaaccccgtgtctgcggagcggctgtagcctgtgagcagcgagatccagggacagagtctcagcctcgccgctgctgccgccgccgccgcccagagactgctgagcccgtccgtccgccgccaccacccactccggacacagaacatccagtcatggataaaaatgagctggttcagaaggccaaactggccgagcaggctgagcgatatgatgacatggcagcctgcatgaagtctgtaactgagcaaggagctgaattatccaatgaggagaggaatcttctctcagttgcttataaaaatgttgtaggagcccgtaggtcatcttggagggtcgtctcaagtattgaacaaaagacggaaggtgctgagaaaaaacagcagatggctcgagaatacagagagaaaattgagacggagctaagagatatctgcaatgatgtactgtctcttttggaaaagttcttgatccccaatgcttcacaagcagagagcaaagtcttctatttgaaaatgaaaggagattactaccgttacttggctgaggttgccgctggtgatgacaagaaagggattgtcgatcagtcacaacaagcataccaagaagcttttgaaatcagcaaaaaggaaatgcaaccaacacatcctatcagactgggtctggcccttaacttctctgtgttctattatgagattctgaactccccagagaaagcctgctctcttgcaaagacagcttttgatgaagccattgctgaacttgatacattaagtgaagagtcatacaaagacagcacgctaataatgcaattactgagagacaacttgacattgtggacatcggatacccaaggagacgaagctgaagcaggagaaggaggggaaaattaaccggccttccaacttttgtctgcctcattctaaaatttacacagtagaccatttgtcatccatgctgtcccacaaatagttttttgtttacgatttatgacaggtttatgttacttctatttgaatttctatatttcccatgtggtttttatgtttaatattaggggagtagagccagttaacatttagggagttatctgttttcatcttgaggtggccaatatggggatgtggaatttttatacaagttataagtgtttggcatagtacttttggtacattgtggcttcaaaagggccagtgtaaaactgcttccatgtctaagcaaagaaaactgcctacatactggtttgtcctggcggggaataaaagggatcattggttccagtcacaggtgtagtaattgtgggtactttaaggtttggagcacttacaaggctgtggtagaatcataccccatggataccacatattaaaccatgtatatctgtggaatactcaatgtgtacacctttgactacagctgcagaagtgttcctttagacaaagttgtgacccattttactctggataagggcagaaacggttcacattccattatttgtaaagttacctgctgttagctttcattatttttgctacactcattttatttgtatttaaatgttttaggcaacctaagaacaaatgtaaaagtaaagatgcaggaaaaatgaattgcttggtattcattacttcatgtatatcaagcacagcagtaaaacaaaaacccatgtatttaacttttttttaggatttttgcttttgtgatttttttttttttgatacttgcctaacatgcatgtgctgtaaaaatagttaacagggaaataacttgagatgatggctagctttgtttaatgtcttatgaaattttcatgaacaatccaagcataattgttaagaacacgtgtattaaattcatgtaagtggaataaaagttttatgaatggacttttcaactactttctctacagcttttcatgtaaattagtcttggttctgaaacttctctaaaggaaattgtacattttttgaaatttattccttattccctcttggcagctaatgggctcttaccaagtttaaacacaaaatttatcataacaaaaatactactaatataactactgtttccatgtcccatgatcccctctcttcctccccaccctgaaaaaaatgagttcctattttttctgggagagggggggattgattagaaaaaaatgtagtgtgttccatttaaaattttggcatatggcattttctaacttaggaagccacaatgttcttggcccatcatgacattgggtagcattaactgtaagttttgtgcttccaaatcactttttggtttttaagaatttcttgatactcttatagcctgccttcaattttgatcctttattctttctatttgtcaggtgcacaagattaccttcctgttttagccttctgtcttgtcaccaaccattcttacttggtggccatgtacttggaaaaaggccgcatgatctttctggctccactcagtgtctaaggcaccctgcttcctttgcttgcatcccacagactatttccctcatcctatttactgcagcaaatctctccttagttgatgagactgtgtttatctccctttaaaaccctacctatcctgaatggtctgtcattgtctgcctttaaaatccttcctctttcttcctcctctattctctaaataatgatggggctaagttatacccaaagctcactttacaaaatatttcctcagtactttgcagaaaacaccaaacaaaaatgccattttaaaaaaggtgtattttttcttttagaatgtaagctcctcaagagcagggacaatgttttctgtatgttctattgtgcctagtacactgtaaatgctcaataaatattgatgatgggaggcagtgagtcttgatgataagggtgagaaactgaaatcccaaacactgttttgttgcttgttttattatgacctcagattaaattgggaaatattggcccttttgaataattgtcccaaatattacattcaaataaaagtgcaatggagaccttggggtctttatttccaggagaaaagataccttctgcatctagggcaacaatccttttccctcgcagctctttcttttacctcacttactgatttctcctgacccccaagccaaggaggtaaaataattatatatatatatatatatatatatatatatatataaagtaattatattttatagctagactgaagaggtgggaatttttttgttgttttttttttttttggagacaagagtcttgctctgtcacccaggcttgagtgcagtggtgcgatctcggctgagtgcaacctccgcctgctgggttcaagcgattctcctgcctcagcctcccaagtagctgggattacaggtgcccgccaccacacctggctaatttttgtgtttttagtagagacagggtttcaccatgttgtccaggctggtcttgaattcccgacctcaggcaatccgcccatctcaacctcccaaagtgctgggattacaggcataagccaccgcgcccagtagagatgtgatattattcaagtaaataaaacctgaaacttggcacatttgcctatttaatgtgcatcagtcatctgaactaggttgatcctggaataatgaaaacacttcactagtattaactaatgttttctacatagtagttcccaatagattaaggaaaatttccaacctgagattctttgttttggaatttgaataatgtgtttgtaactattccttgattgtcccaaatccaggctttacgtctgcttttgtcaatgtaacatcctagtgccaggaaattggaaaatccaatgactttttgtgtgtaaagtactggaatttttttgttcgtttgtttttaagacggagtgtcaactctcgcccaggctggggtgcagtggcctgatctcggctcactgcaaccttctcctcccaggctgaagtgattctcctgcctcagcctcgcaagtagctgggactgcaggcatgtgccaccactcctggctaattatttgtatttttagtagagagagggtttcaccgtgttagccatgatggtctcattctcctgaccttgtgatccgcccacctcggcctcccaaagtgctgggattacaggcgtgagccactgtgcccaccctggtatgttttttttaaattggccacttaagagttgtccttcagaaagtggagcagcagtgtgattagtaaaaacgatgggctttcctgcagctctggcttatggtctttgtttttccagttaacagctgttacttcatgctgttatagggggtggggggagaaagagaaagaatatgtctagtggcttaattttggggctcaatttgtttattatgtttttcctgcaaaagagtcaccagtcttgtcatggctcaatgcatattttaaaatgagtcaaagccaatttggaagctgctatcttaggttatttgtagtcaggcttcaaatggagagtgaaactttgactttgaaaactggtgctctatgctcaatgatggtcttacacattcctctagggaaaggtcaagaaataaatttggcttgattgtattctctcatttaccatataggaaatactatggtagaactgaaaatatgtacaatagtaaagtggtggctgagactgggcacttggaaaatagacttggattcttttctaagtgtgaaactaattaaatacttttatgtgactggtagtagtcacagtctccttgattgattctagttccttttcaaagtggagagacctgaatatagattgtaacaggatgtccaaccttgccagacaagcaggcatatatgtctctgggatgcagaagcagttacaagttaatatatttaagcataatgttagccaatcctaggtgataccagagatgtgaatatttgatcatatttgagttcattccttgaaagtccaaacctaactggtcttaattgattacttcttagtattccgaattttagaatttaaaaccctatgaattttcagtttgtgcttacattttctaacattggatgtttgctttggc

SEQ ID NO: 5194 - protein, 245 aa, Homo sapiens; identical to SEQ ID NO: 674

SEQ ID NO: 5195 - DNA, 5023 bp, Homo sapiens
gggctcccgtcccggctcatcacccggcctgtggcccactcccaccgccagctggaaccctggggactacgacgtccctcaaaccttgcttctaggagataaaaagaacatccagtcatggataaaaatgagctggttcagaaggccaaactggccgagcaggctgagcgatatgatgacatggcagcctgcatgaagtctgtaactgagcaaggagctgaattatccaatgaggagaggaatcttctctcagttgcttataaaaatgttgtaggagcccgtaggtcatcttggagggtcgtctcaagtattgaacaaaagacggaaggtgctgagaaaaaacagcagatggctcgagaatacagagagaaaattgagacggagctaagagatatctgcaatgatgtactgtctcttttggaaaagttcttgatccccaatgcttcacaagcagagagcaaagtcttctatttgaaaatgaaaggagattactaccgttacttggctgaggttgccgctggtgatgacaagaaagggattgtcgatcagtcacaacaagcataccaagaagcttttgaaatcagcaaaaaggaaatgcaaccaacacatcctatcagactgggtctggcccttaacttctctgtgttctattatgagattctgaactccccagagaaagcctgctctcttgcaaagacagcttttgatgaagccattgctgaacttgatacattaagtgaagagtcatacaaagacagcacgctaataatgcaattactgagagacaacttgacattgtggacatcggatacccaaggagacgaagctgaagcaggagaaggaggggaaaattaaccggccttccaacttttgtctgcctcattctaaaatttacacagtagaccatttgtcatccatgctgtcccacaaatagttttttgtttacgatttatgacaggtttatgttacttctatttgaatttctatatttcccatgtggtttttatgtttaatattaggggagtagagccagttaacatttagggagttatctgttttcatcttgaggtggccaatatggggatgtggaatttttatacaagttataagtgtttggcatagtacttttggtacattgtggcttcaaaagggccagtgtaaaactgcttccatgtctaagcaaagaaaactgcctacatactggtttgtcctggcggggaataaaagggatcattggttccagtcacaggtgtagtaattgtgggtactttaaggtttggagcacttacaaggctgtggtagaatcataccccatggataccacatattaaaccatgtatatctgtggaatactcaatgtgtacacctttgactacagctgcagaagtgttcctttagacaaagttgtgacccattttactctggataagggcagaaacggttcacattccattatttgtaaagttacctgctgttagctttcattatttttgctacactcattttatttgtatttaaatgttttaggcaacctaagaacaaatgtaaaagtaaagatgcaggaaaaatgaattgcttggtattcattacttcatgtatatcaagcacagcagtaaaacaaaaacccatgtatttaacttttttttaggatttttgcttttgtgatttttttttttttgatacttgcctaacatgcatgtgctgtaaaaatagttaacagggaaataacttgagatgatggctagctttgtttaatgtcttatgaaattttcatgaacaatccaagcataattgttaagaacacgtgtattaaattcatgtaagtggaataaaagttttatgaatggacttttcaactactttctctacagcttttcatgtaaattagtcttggttctgaaacttctctaaaggaaattgtacattttttgaaatttattccttattccctcttggcagctaatgggctcttaccaagtttaaacacaaaatttatcataacaaaaatactactaatataactactgtttccatgtcccatgatcccctctcttcctccccaccctgaaaaaaatgagttcctattttttctgggagagggggggattgattagaaaaaaatgtagtgtgttccatttaaaattttggcatatggcattttctaacttaggaagccacaatgttcttggcccatcatgacattgggtagcattaactgtaagttttgtgcttccaaatcactttttggtttttaagaatttcttgatactcttatagcctgccttcaattttgatcctttattctttctatttgtcaggtgcacaagattaccttcctgttttagccttctgtcttgtcaccaaccattcttacttggtggccatgtacttggaaaaaggccgcatgatctttctggctccactcagtgtctaaggcaccctgcttcctttgcttgcatcccacagactatttccctcatcctatttactgcagcaaatctctccttagttgatgagactgtgtttatctccctttaaaaccctacctatcctgaatggtctgtcattgtctgcctttaaaatccttcctctttcttcctcctctattctctaaataatgatggggctaagttatacccaaagctcactttacaaaatatttcctcagtactttgcagaaaacaccaaacaaaaatgccattttaaaaaaggtgtattttttcttttagaatgtaagctcctcaagagcagggacaatgttttctgtatgttctattgtgcctagtacactgtaaatgctcaataaatattgatgatgggaggcagtgagtcttgatgataagggtgagaaactgaaatcccaaacactgttttgttgcttgttttattatgacctcagattaaattgggaaatattggcccttttgaataattgtcccaaatattacattcaaataaaagtgcaatggagaccttggggtctttatttccaggagaaaagataccttctgcatctagggcaacaatccttttccctcgcagctctttcttttacctcacttactgatttctcctgacccccaagccaaggaggtaaaataattatatatatatatatatatatatatatatatatataaagtaattatattttatagctagactgaagaggtgggaatttttttgttgttttttttttttttggagacaagagtcttgctctgtcacccaggcttgagtgcagtggtgcgatctcggctgagtgcaacctccgcctgctgggttcaagcgattctcctgcctcagcctcccaagtagctgggattacaggtgcccgccaccacacctggctaatttttgtgtttttagtagagacagggtttcaccatgttgtccaggctggtcttgaattcccgacctcaggcaatccgcccatctcaacctcccaaagtgctgggattacaggcataagccaccgcgcccagtagagatgtgatattattcaagtaaataaaacctgaaacttggcacatttgcctatttaatgtgcatcagtcatctgaactaggttgatcctggaataatgaaaacacttcactagtattaactaatgttttctacatagtagttcccaatagattaaggaaaatttccaacctgagattctttgttttggaatttgaataatgtgtttgtaactattccttgattgtcccaaatccaggctttacgtctgcttttgtcaatgtaacatcctagtgccaggaaattggaaaatccaatgactttttgtgtgtaaagtactggaatttttttgttcgtttgtttttaagacggagtgtcaactctcgcccaggctggggtgcagtggcctgatctcggctcactgcaaccttctcctcccaggctgaagtgattctcctgcctcagcctcgcaagtagctgggactgcaggcatgtgccaccactcctggctaattatttgtatttttagtagagagagggtttcaccgtgttagccatgatggtctcattctcctgaccttgtgatccgcccacctcggcctcccaaagtgctgggattacaggcgtgagccactgtgcccaccctggtatgttttttttaaattggccacttaagagttgtccttcagaaagtggagcagcagtgtgattagtaaaaacgatgggctttcctgcagctctggcttatggtctttgtttttccagttaacagctgttacttcatgctgttatagggggtggggggagaaagagaaagaatatgtctagtggcttaattttggggctcaatttgtttattatgtttttcctgcaaaagagtcaccagtcttgtcatggctcaatgcatattttaaaatgagtcaaagccaatttggaagctgctatcttaggttatttgtagtcaggcttcaaatggagagtgaaactttgactttgaaaactggtgctctatgctcaatgatggtcttacacattcctctagggaaaggtcaagaaataaatttggcttgattgtattctctcatttaccatataggaaatactatggtagaactgaaaatatgtacaatagtaaagtggtggctgagactgggcacttggaaaatagacttggattcttttctaagtgtgaaactaattaaatacttttatgtgactggtagtagtcacagtctccttgattgattctagttccttttcaaagtggagagacctgaatatagattgtaacaggatgtccaaccttgccagacaagcaggcatatatgtctctgggatgcagaagcagttacaagttaatatatttaagcataatgttagccaatcctaggtgataccagagatgtgaatatttgatcatatttgagttcattccttgaaagtccaaacctaactggtcttaattgattacttcttagtattccgaattttagaatttaaaaccctatgaattttcagtttgtgcttacattttctaacattggatgtttgctttggc

SEQ ID NO: 5196 - protein, 245 aa, Homo sapiens; identical to SEQ ID NO: 674

SEQ ID NO: 5197 - DNA, 1235 bp, Homo sapiens
ttgtggacatcggatacccaaggagacgaagctgaagcaggagaaggaggggaaaattaaccggccttccaacttttgtctgcctcattctaaaatttacacagtagaccatttgtcatccatgctgtcccacaaatagttttttgtttacgatttatgacaggtttatgttacttctatttgaatttctatatttcccatgtggtttttatgtttaatattaggggagtagagccagttaacatttagggagttatctgttttcatcttgaggtcccatgatcccctctcttcctccccaccctgaaaaaaatgagttcctattttttctgggagagggggggattgattagaaaaaaatgtagtgtgttccatttaaaattttggcatatggcattttctaacttaggaagccacaatgttcttggcccatcatgacattgggtagcattaactgtaagttttgtgcttccaaatcactttttggtttttaagaatttcttgatactcttatagcctgccttcaattttgatcctttattctttctatttgtcaggtgcacaagattaccttcctgttttagccttctgtcttgtcaccaaccattcttacttggtggccatgtacttggaaaaaggccgcatgatctttctggctccactcagtgtctaaggcaccctgcttcctttgcttgcatcccacagactatttccctcatcctatttactgcagcaaatctctccttagttgatgagactgtgtttatctccctttaaaaccctacctatcctgaatggtctgtcattgtctgcctttaaaatccttcctctttcttcctcctctattctctaaataatgatggggctaagttatacccaaagctcactttacaaaatatttcctcagtactttgcagaaaacaccaaacaaaaatgccattttaaaaaaggtgtattttttcttttagaatgtaagctcctcaagagcagggacaatgttttctgtatgttctattgtgcctagtacactgtaaatgctcaataaatattgatgatgggaggcagtgagtcttgatgataagggtgagaaactgaaatcccaaacactgttttgttgcttgttttattatgacctcagattaaattgggaaatattggcccttttgaataattgtcccaaatattacattcaaataaaagtgcaatggagaccttggggtctttatttccaggag

SEQ ID NO: 5198 - protein, 55 aa, Homo sapiens
MMGLSYTQSSLYKIFPQYFAENTKQKCHFKKGVFFLLECKLLKSRDNVFCMFYCA

SEQ ID NO: 5199 - DNA, 2893 bp, Homo sapiens
cagaacatccagtcatggataaaaatgagctggttcagaaggccaaactggccgagcaggctgagcgatatgatgacatggcagcctgcatgaagtctgtaactgagcaaggagctgaattatccaatgaggagaggaatcttctctcagttgcttataaaaatgttgtaggagcccgtaggtcatcttggagggtcgtctcaagtattgaacaaaagacggaaggtgctgagaaaaaacagcagatggctcgagaatacagagagaaaattgagacggagctaagagatatctgcaatgatgtactgtctcttttggaaaagttcttgatccccaatgcttcacaagcagagagcaaagtcttctatttgaaaatgaaaggagattactaccgttacttggctgaggttgccgctggtgatgacaagaaagggattgtcgatcagtcacaacaagcataccaagaagcttttgaaatcagcaaaaaggaaatgcaaccaacacatcctatcagactgggtctggcccttaacttctctgtgttctattatgagattctgaactccccagagaaagcctgctctcttgcaaagacagcttttgatgaagccattgctgaacttgatacattaagtgaagagtcatacaaagacagcacgctaataatgcaattactgagagacaacttgacattgtggacatcggatacccaaggagacgaagctgaagcaggagaaggaggggaaaattaaccggccttccaacttttgtctgcctcattctaaaatttacacagtagaccatttgtcatccatgctgtcccacaaatagttttttgtttacgatttatgacaggtttatgttacttctatttgaatttctatatttcccatgtggtttttatgtttaatattaggggagtagagccagttaacatttagggagttatctgttttcatcttgaggtggccaatatggggatgtggaatttttatacaagttataagtgtttggcatagtacttttggtacattgtggcttcaaaagggccagtgtaaaactgcttccatgtctaagcaaagaaaactgcctacatactggtttgtcctggcggggaataaaagggatcattggttccagtcacaggtgtagtaattgtgggtactttaaggtttggagcacttacaaggctgtggtagaatcataccccatggataccacatattaaaccatgtatatctgtggaatactcaatgtgtacacctttgactacagctgcagaagtgttcctttagacaaagttgtgacccattttactctggataagggcagaaacggttcacattccattatttgtaaagttacctgctgttagctttcattatttttgctacactcattttatttgtatttaaatgttttaggcaacctaagaacaaatgtaaaagtaaagatgcaggaaaaatgaattgcttggtattcattacttcatgtatatcaagcacagcagtaaaacaaaaacccatgtatttaacttttttttaggatttttgcttttgtgatttttttttttttgatacttgcctaacatgcatgtgctgtaaaaatagttaacagggaaataacttgagatgatggctagctttgtttaatgtcttatgaaattttcatgaacaatccaagcataattgttaagaacacgtgtattaaattcatgtaagtggaataaaagttttatgaatggacttttcaactactttctctacagcttttcatgtaaattagtcttggttctgaaacttctctaaaggaaattgtacattttttgaaatttattccttattccctcttggcagctaatgggctcttaccaagtttaaacacaaaatttatcataacaaaaatactactaatataactactgtttccatgtcccatgatcccctctcttcctccccaccctgaaaaaaatgagttcctattttttctgggagagggggggattgattagaaaaaaatgtagtgtgttccatttaaaattttggcatatggcattttctaacttaggaagccacaatgttcttggcccatcatgacattgggtagcattaactgtaagttttgtgcttccaaatcactttttggtttttaagaatttcttgatactcttatagcctgccttcaattttgatcctttattctttctatttgtcaggtgcacaagattaccttcctgttttagccttctgtcttgtcaccaaccattcttacttggtggccatgtacttggaaaaaggccgcatgatctttctggctccactcagtgtctaaggcaccctgcttcctttgcttgcatcccacagactatttccctcatcctatttactgcagcaaatctctccttagttgatgagactgtgtttatctccctttaaaaccctacctatcctgaatggtctgtcattgtctgcctttaaaatccttcctctttcttcctcctctattctctaaataatgatggggctaagttatacccaaagctcactttacaaaatatttcctcagtactttgcagaaaacaccaaacaaaaatgccattttaaaaaaggtgtattttttcttttagaatgtaagctcctcaagagcagggacaatgttttctgtatgttctattgtgcctagtacactgtaaatgctcaataaatattgatgatgggaggcagtgagtcttgatgataagggtgagaaactgaaatcccaaacactgttttgttgcttgttttattatgacctcagattaaattgggaaatattggcccttttgaataattgtcccaaatattacattcaaataaaagtgcaatggagaccttggggtctttatttccaggag

SEQ ID NO: 5200 - protein, 245 aa, Homo sapiens; identical to SEQ ID NO: 674

SEQ ID NO: 5201 - DNA, 2804 bp, Homo sapiens
cagaacatccagtcatggataaaaatgagctggttcagaaggccaaactggccgagcaggctgagcgatatgatgacatggcagcctgcatgaagtctgtaactgagcaaggagctgaattatccaatgaggagaggaatcttctctcagttgcttataaaaatgttgtaggagcccgtaggtcatcttggagggtcgtctcaagtattgaacaaaagacggaaggtgctgagaaaaaacagcagatggctcgagaatacagagagaaaattgagacggagctaagagatatctgcaatgatgtactgtctcttttggaaaagttcttgatccccaatgcttcacaagcagagagcaaagtcttctatttgaaaatgaaaggagattactaccgttacttggctgaggttgccgctggtgatgacaagaaagggattgtcgatcagtcacaacaagcataccaagaagcttttgaaatcagcaaaaaggaaatgcaaccaacacatcgcttttgatgaagccattgctgaacttgatacattaagtgaagagtcatacaaagacagcacgctaataatgcaattactgagagacaacttgacattgtggacatcggatacccaaggagacgaagctgaagcaggagaaggaggggaaaattaaccggccttccaacttttgtctgcctcattctaaaatttacacagtagaccatttgtcatccatgctgtcccacaaatagttttttgtttacgatttatgacaggtttatgttacttctatttgaatttctatatttcccatgtggtttttatgtttaatattaggggagtagagccagttaacatttagggagttatctgttttcatcttgaggtggccaatatggggatgtggaatttttatacaagttataagtgtttggcatagtacttttggtacattgtggcttcaaaagggccagtgtaaaactgcttccatgtctaagcaaagaaaactgcctacatactggtttgtcctggcggggaataaaagggatcattggttccagtcacaggtgtagtaattgtgggtactttaaggtttggagcacttacaaggctgtggtagaatcataccccatggataccacatattaaaccatgtatatctgtggaatactcaatgtgtacacctttgactacagctgcagaagtgttcctttagacaaagttgtgacccattttactctggataagggcagaaacggttcacattccattatttgtaaagttacctgctgttagctttcattatttttgctacactcattttatttgtatttaaatgttttaggcaacctaagaacaaatgtaaaagtaaagatgcaggaaaaatgaattgcttggtattcattacttcatgtatatcaagcacagcagtaaaacaaaaacccatgtatttaacttttttttaggatttttgcttttgtgatttttttttttttgatacttgcctaacatgcatgtgctgtaaaaatagttaacagggaaataacttgagatgatggctagctttgtttaatgtcttatgaaattttcatgaacaatccaagcataattgttaagaacacgtgtattaaattcatgtaagtggaataaaagttttatgaatggacttttcaactactttctctacagcttttcatgtaaattagtcttggttctgaaacttctctaaaggaaattgtacattttttgaaatttattccttattccctcttggcagctaatgggctcttaccaagtttaaacacaaaatttatcataacaaaaatactactaatataactactgtttccatgtcccatgatcccctctcttcctccccaccctgaaaaaaatgagttcctattttttctgggagagggggggattgattagaaaaaaatgtagtgtgttccatttaaaattttggcatatggcattttctaacttaggaagccacaatgttcttggcccatcatgacattgggtagcattaactgtaagttttgtgcttccaaatcactttttggtttttaagaatttcttgatactcttatagcctgccttcaattttgatcctttattctttctatttgtcaggtgcacaagattaccttcctgttttagccttctgtcttgtcaccaaccattcttacttggtggccatgtacttggaaaaaggccgcatgatctttctggctccactcagtgtctaaggcaccctgcttcctttgcttgcatcccacagactatttccctcatcctatttactgcagcaaatctctccttagttgatgagactgtgtttatctccctttaaaaccctacctatcctgaatggtctgtcattgtctgcctttaaaatccttcctctttcttcctcctctattctctaaataatgatggggctaagttatacccaaagctcactttacaaaatatttcctcagtactttgcagaaaacaccaaacaaaaatgccattttaaaaaaggtgtattttttcttttagaatgtaagctcctcaagagcagggacaatgttttctgtatgttctattgtgcctagtacactgtaaatgctcaataaatattgatgatgggaggcagtgagtcttgatgataagggtgagaaactgaaatcccaaacactgttttgttgcttgttttattatgacctcagattaaattgggaaatattggcccttttgaataattgtcccaaatattacattcaaataaaagtgcaatggagaccttggggtctttatttccaggag

SEQ ID NO: 5202 - protein, 166 aa, Homo sapiens; identical to SEQ ID NO: 5192

SEQ ID NO: 5203 - DNA, 3501 bp, Homo sapiens
gatcgtcatgtgcagtatgaggtcttcacgtgaaagctttatttgggtaggaaaacctagcctacgagaaacgggtccgtgcggtcacgcctgactgcctgtctccgggtcaaggctgccaggaccagctccagccctccgcccgagaaggctgtcctttcccctcggaactctggcttccctaaagcggccgcgcctccttccaggcctcacctcctgccggctccgcccggcccggcccacctcgcccccacctcggcgcccacccattgtcccctcgcgcagtcaccgagcgcagatcccgcgctctcgattggaacgcctccccatcactcagccacactcaggggctggacgcctcactcccgtttccgagccataaaaggtctaggaccgcttcccccgagccagcagcgtttgacgtcatcgtgcgtgtggtgcccctgctgccggggctggtgattggaggaaaccccgtgtctgcggagcggctgtagcctgtgagcagcgagatccagggacagagtctcagcctcgccgctgctgccgccgccgccgcccagagactgctgagcccgtccgtccgccgccaccacccactccggacacagaacatccagtcatggataaaaatgagctggttcagaaggccaaactggccgagcaggctgagcgatatgatgacatggcagcctgcatgaagtctgtaactgagcaaggagctgaattatccaatgaggagaggaatcttctctcagttgcttataaaaatgttgtaggagcccgtaggtcatcttggagggtcgtctcaagtattgaacaaaagacggaaggtgctgagaaaaaacagcagatggctcgagaatacagagagaaaattgagacggagctaagagatatctgcaatgatgtactgtctcttttggaaaagttcttgatccccaatgcttcacaagcagagagcaaagtcttctatttgaaaatgaaaggagattactaccgttacttggctgaggttgccgctggtgatgacaagaaagggattgtcgatcagtcacaacaagcataccaagaagcttttgaaatcagcaaaaaggaaatgcaaccaacacatcctatcagactgggtctggcccttaacttctctgtgttctattatgagattctgaactccccagagaaagcctgctctcttgcaaagacagcttttgatgaagccattgctgaacttgatacattaagtgaagagtcatacaaagacagcacgctaataatgcaattactgagagacaacttgacattgtggacatcggatacccaaggagacgaagctgaagcaggagaaggaggggaaaattaaccggccttccaacttttgtctgcctcattctaaaatttacacagtagaccatttgtcatccatgctgtcccacaaatagttttttgtttacgatttatgacaggtttatgttacttctatttgaatttctatatttcccatgtggtttttatgtttaatattaggggagtagagccagttaacatttagggagttatctgttttcatcttgaggtggccaatatggggatgtggaatttttatacaagttataagtgtttggcatagtacttttggtacattgtggcttcaaaagggccagtgtaaaactgcttccatgtctaagcaaagaaaactgcctacatactggtttgtcctggcggggaataaaagggatcattggttccagtcacaggtgtagtaattgtgggtactttaaggtttggagcacttacaaggctgtggtagaatcataccccatggataccacatattaaaccatgtatatctgtggaatactcaatgtgtacacctttgactacagctgcagaagtgttcctttagacaaagttgtgacccattttactctggataagggcagaaacggttcacattccattatttgtaaagttacctgctgttagctttcattatttttgctacactcattttatttgtatttaaatgttttaggcaacctaagaacaaatgtaaaagtaaagatgcaggaaaaatgaattgcttggtattcattacttcatgtatatcaagcacagcagtaaaacaaaaacccatgtatttaacttttttttaggatttttgcttttgtgatttttttttttttgatacttgcctaacatgcatgtgctgtaaaaatagttaacagggaaataacttgagatgatggctagctttgtttaatgtcttatgaaattttcatgaacaatccaagcataattgttaagaacacgtgtattaaattcatgtaagtggaataaaagttttatgaatggacttttcaactactttctctacagcttttcatgtaaattagtcttggttctgaaacttctctaaaggaaattgtacattttttgaaatttattccttattccctcttggcagctaatgggctcttaccaagtttaaacacaaaatttatcataacaaaaatactactaatataactactgtttccatgtcccatgatcccctctcttcctccccaccctgaaaaaaatgagttcctattttttctgggagagggggggattgattagaaaaaaatgtagtgtgttccatttaaaattttggcatatggcattttctaacttaggaagccacaatgttcttggcccatcatgacattgggtagcattaactgtaagttttgtgcttccaaatcactttttggtttttaagaatttcttgatactcttatagcctgccttcaattttgatcctttattctttctatttgtcaggtgcacaagattaccttcctgttttagccttctgtcttgtcaccaaccattcttacttggtggccatgtacttggaaaaaggccgcatgatctttctggctccactcagtgtctaaggcaccctgcttcctttgcttgcatcccacagactatttccctcatcctatttactgcagcaaatctctccttagttgatgagactgtgtttatctccctttaaaaccctacctatcctgaatggtctgtcattgtctgcctttaaaatccttcctctttcttcctcctctattctctaaataatgatggggctaagttatacccaaagctcactttacaaaatatttcctcagtactttgcagaaaacaccaaacaaaaatgccattttaaaaaaggtgtattttttcttttagaatgtaagctcctcaagagcagggacaatgttttctgtatgttctattgtgcctagtacactgtaaatgctcaataaatattgatgatgggaggcagtgagtcttgatgataagggtgagaaactgaaatcccaaacactgttttgttgcttgttttattatgacctcagattaaattgggaaatattggcccttttgaataattgtcccaaatattacattcaaataaaagtgcaatggagaccttggggtctttatttccaggag

SEQ ID NO: 5204 - protein, 245 aa, Homo sapiens; identical to SEQ ID NO: 674

SEQ ID NO: 5205 - DNA, 2996 bp, Homo sapiens
gggctcccgtcccggctcatcacccggcctgtggcccactcccaccgccagctggaaccctggggactacgacgtccctcaaaccttgcttctaggagataaaaagaacatccagtcatggataaaaatgagctggttcagaaggccaaactggccgagcaggctgagcgatatgatgacatggcagcctgcatgaagtctgtaactgagcaaggagctgaattatccaatgaggagaggaatcttctctcagttgcttataaaaatgttgtaggagcccgtaggtcatcttggagggtcgtctcaagtattgaacaaaagacggaaggtgctgagaaaaaacagcagatggctcgagaatacagagagaaaattgagacggagctaagagatatctgcaatgatgtactgtctcttttggaaaagttcttgatccccaatgcttcacaagcagagagcaaagtcttctatttgaaaatgaaaggagattactaccgttacttggctgaggttgccgctggtgatgacaagaaagggattgtcgatcagtcacaacaagcataccaagaagcttttgaaatcagcaaaaaggaaatgcaaccaacacatcctatcagactgggtctggcccttaacttctctgtgttctattatgagattctgaactccccagagaaagcctgctctcttgcaaagacagcttttgatgaagccattgctgaacttgatacattaagtgaagagtcatacaaagacagcacgctaataatgcaattactgagagacaacttgacattgtggacatcggatacccaaggagacgaagctgaagcaggagaaggaggggaaaattaaccggccttccaacttttgtctgcctcattctaaaatttacacagtagaccatttgtcatccatgctgtcccacaaatagttttttgtttacgatttatgacaggtttatgttacttctatttgaatttctatatttcccatgtggtttttatgtttaatattaggggagtagagccagttaacatttagggagttatctgttttcatcttgaggtggccaatatggggatgtggaatttttatacaagttataagtgtttggcatagtacttttggtacattgtggcttcaaaagggccagtgtaaaactgcttccatgtctaagcaaagaaaactgcctacatactggtttgtcctggcggggaataaaagggatcattggttccagtcacaggtgtagtaattgtgggtactttaaggtttggagcacttacaaggctgtggtagaatcataccccatggataccacatattaaaccatgtatatctgtggaatactcaatgtgtacacctttgactacagctgcagaagtgttcctttagacaaagttgtgacccattttactctggataagggcagaaacggttcacattccattatttgtaaagttacctgctgttagctttcattatttttgctacactcattttatttgtatttaaatgttttaggcaacctaagaacaaatgtaaaagtaaagatgcaggaaaaatgaattgcttggtattcattacttcatgtatatcaagcacagcagtaaaacaaaaacccatgtatttaacttttttttaggatttttgcttttgtgatttttttttttttgatacttgcctaacatgcatgtgctgtaaaaatagttaacagggaaataacttgagatgatggctagctttgtttaatgtcttatgaaattttcatgaacaatccaagcataattgttaagaacacgtgtattaaattcatgtaagtggaataaaagttttatgaatggacttttcaactactttctctacagcttttcatgtaaattagtcttggttctgaaacttctctaaaggaaattgtacattttttgaaatttattccttattccctcttggcagctaatgggctcttaccaagtttaaacacaaaatttatcataacaaaaatactactaatataactactgtttccatgtcccatgatcccctctcttcctccccaccctgaaaaaaatgagttcctattttttctgggagagggggggattgattagaaaaaaatgtagtgtgttccatttaaaattttggcatatggcattttctaacttaggaagccacaatgttcttggcccatcatgacattgggtagcattaactgtaagttttgtgcttccaaatcactttttggtttttaagaatttcttgatactcttatagcctgccttcaattttgatcctttattctttctatttgtcaggtgcacaagattaccttcctgttttagccttctgtcttgtcaccaaccattcttacttggtggccatgtacttggaaaaaggccgcatgatctttctggctccactcagtgtctaaggcaccctgcttcctttgcttgcatcccacagactatttccctcatcctatttactgcagcaaatctctccttagttgatgagactgtgtttatctccctttaaaaccctacctatcctgaatggtctgtcattgtctgcctttaaaatccttcctctttcttcctcctctattctctaaataatgatggggctaagttatacccaaagctcactttacaaaatatttcctcagtactttgcagaaaacaccaaacaaaaatgccattttaaaaaaggtgtattttttcttttagaatgtaagctcctcaagagcagggacaatgttttctgtatgttctattgtgcctagtacactgtaaatgctcaataaatattgatgatgggaggcagtgagtcttgatgataagggtgagaaactgaaatcccaaacactgttttgttgcttgttttattatgacctcagattaaattgggaaatattggcccttttgaataattgtcccaaatattacattcaaataaaagtgcaatggagaccttggggtctttatttccaggag

SEQ ID NO: 5206 - protein, 245 aa, Homo sapiens; identical to SEQ ID NO: 674

SEQ ID NO: 5207 - DNA, 1456 bp, Homo sapiens
acatattaaaccatgtatatctgtggaatactcaatgtgtacacctttgactacagctgcagaagtgttcctttagacaaagttgtgacccattttactctggataagggcagaaacggttcacattccattatttgtaaagttacctgctgttagctttcattatttttgctacactcattttatttgtatttaaatgttttaggcaacctaagaacaaatgtaaaagtaaagatgcaggaaaaatgaattgcttggtattcattacttcatgtatatcaagcacagcagtaaaacaaaaacccatgtatttaacttttttttaggatttttgcttttgtgatttttttttttttgatacttgcctaacatgcatgtgctgtaaaaatagttaacagggaaataacttgagatgatggctagctttgtttaatgtcttatgaaattttcatgaacaatccaagcataattgttaagaacacgtgtattaaattcatgtaagtggaataaaagttttatgaatggacttttcaactactttctctacagcttttcatgtaaattagtcttggttctgaaacttctctaaaggaaattgtacattttttgaaatttattccttattccctcttggcagctaatgggctcttaccaagtttaaacacaaaatttatcataacaaaaatactactaatataactactgtttccatgtcccatgatcccctctcttcctccccaccctgaaaaaaatgagttcctattttttctgggagagggggggattgattagaaaaaaatgtagtgtgttccatttaaaattttggcatatggcattttctaacttaggaagccacaatgttcttggcccatcatgacattgggtagcattaactgtaagttttgtgcttccaaatcactttttggtttttaagaatttcttgatactcttatagcctgccttcaattttgatcctttattctttctatttgtcaggtgcacaagattaccttcctgttttagccttctgtcttgtcaccaaccattcttacttggtggccatgtacttggaaaaaggccgcatgatctttctggctccactcagtgtctaaggcaccctgcttcctttgcttgcatcccacagactatttccctcatcctatttactgcagcaaatctctccttagttgatgagactgtgtttatctccctttaaaaccctacctatcctgaatggtctgtcattgtctgcctttaaaatccttcctctttcttcctcctctattcttaaatattgatgatgggaggcagtgagtcttgatgataagggtgagaaactgaaatcccaaacactgttttgttgcttgttttattatgacctcagattaaattgggaaatattggcccttttgaataattgtcccaaatattacattcaaataaaagtgcaatggag

SEQ ID NO: 5208 - protein, 35 aa, Homo sapiens [sequence omitted]

SEQ ID NO: 5209 - DNA, 1109 bp, Homo sapiens
ttgtggacatcggatacccaaggagacgaagctgaagcaggagaaggaggggaaaattaaccggccttccaacttttgtctgcctcattctaaaatttacacagtagaccatttgtcatccatgctgtcccacaaatagttttttgtttacgatttatgacaggtttatgttacttctatttgaatttctatatttcccatgtggtttttatgtttaatattaggggagtagagccagttaacatttagggagttatctgttttcatcttgaggtcccatgatcccctctcttcctccccaccctgaaaaaaatgagttcctattttttctgggagagggggggattgattagaaaaaaatgtagtgtgttccatttaaaattttggcatatggcattttctaacttaggaagccacaatgttcttggcccatcatgacattgggtagcattaactgtaagttttgtgcttccaaatcactttttggtttttaagaatttcttgatactcttatagcctgccttcaattttgatcctttattctttctatttgtcaggtgcacaagattaccttcctgttttagccttctgtcttgtcaccaaccattcttacttggtggccatgtacttggaaaaaggccgcatgatctttctggctccactcagtgtctaaggcaccctgcttcctttgcttgcatcccacagactatttccctcatcctatttactgcagcaaatctctccttagttgatgagactgtgtttatctccctttaaaaccctacctatcctgaatggtctgtcattgtctgcctttaaaatccttcctctttcttcctcctctattctctaaataatgatggggctaagttatacccaaagctcactttacaaaatatttcctcagtactttgcagaaaacaccaaacaaaaatgccattttaaaaaaggtgtattttttcttttagaatgtaagctcctcaagagcagggacaatgttttctgtatgttctattgtgcctagtacactgtaaatgctcaataaatattgatgatgggaggcagtgagtcttgatgataagggtgagaaactgaaatcccaaacactg

SEQ ID NO: 5210 - protein, 55 aa, Homo sapiens; identical to SEQ ID NO: 5198

SEQ ID NO: 5211 - DNA, 2678 bp, Homo sapiens
cagaacatccagtcatggataaaaatgagctggttcagaaggccaaactggccgagcaggctgagcgatatgatgacatggcagcctgcatgaagtctgtaactgagcaaggagctgaattatccaatgaggagaggaatcttctctcagttgcttataaaaatgttgtaggagcccgtaggtcatcttggagggtcgtctcaagtattgaacaaaagacggaaggtgctgagaaaaaacagcagatggctcgagaatacagagagaaaattgagacggagctaagagatatctgcaatgatgtactgtctcttttggaaaagttcttgatccccaatgcttcacaagcagagagcaaagtcttctatttgaaaatgaaaggagattactaccgttacttggctgaggttgccgctggtgatgacaagaaagggattgtcgatcagtcacaacaagcataccaagaagcttttgaaatcagcaaaaaggaaatgcaaccaacacatcgcttttgatgaagccattgctgaacttgatacattaagtgaagagtcatacaaagacagcacgctaataatgcaattactgagagacaacttgacattgtggacatcggatacccaaggagacgaagctgaagcaggagaaggaggggaaaattaaccggccttccaacttttgtctgcctcattctaaaatttacacagtagaccatttgtcatccatgctgtcccacaaatagttttttgtttacgatttatgacaggtttatgttacttctatttgaatttctatatttcccatgtggtttttatgtttaatattaggggagtagagccagttaacatttagggagttatctgttttcatcttgaggtggccaatatggggatgtggaatttttatacaagttataagtgtttggcatagtacttttggtacattgtggcttcaaaagggccagtgtaaaactgcttccatgtctaagcaaagaaaactgcctacatactggtttgtcctggcggggaataaaagggatcattggttccagtcacaggtgtagtaattgtgggtactttaaggtttggagcacttacaaggctgtggtagaatcataccccatggataccacatattaaaccatgtatatctgtggaatactcaatgtgtacacctttgactacagctgcagaagtgttcctttagacaaagttgtgacccattttactctggataagggcagaaacggttcacattccattatttgtaaagttacctgctgttagctttcattatttttgctacactcattttatttgtatttaaatgttttaggcaacctaagaacaaatgtaaaagtaaagatgcaggaaaaatgaattgcttggtattcattacttcatgtatatcaagcacagcagtaaaacaaaaacccatgtatttaacttttttttaggatttttgcttttgtgatttttttttttttgatacttgcctaacatgcatgtgctgtaaaaatagttaacagggaaataacttgagatgatggctagctttgtttaatgtcttatgaaattttcatgaacaatccaagcataattgttaagaacacgtgtattaaattcatgtaagtggaataaaagttttatgaatggacttttcaactactttctctacagcttttcatgtaaattagtcttggttctgaaacttctctaaaggaaattgtacattttttgaaatttattccttattccctcttggcagctaatgggctcttaccaagtttaaacacaaaatttatcataacaaaaatactactaatataactactgtttccatgtcccatgatcccctctcttcctccccaccctgaaaaaaatgagttcctattttttctgggagagggggggattgattagaaaaaaatgtagtgtgttccatttaaaattttggcatatggcattttctaacttaggaagccacaatgttcttggcccatcatgacattgggtagcattaactgtaagttttgtgcttccaaatcactttttggtttttaagaatttcttgatactcttatagcctgccttcaattttgatcctttattctttctatttgtcaggtgcacaagattaccttcctgttttagccttctgtcttgtcaccaaccattcttacttggtggccatgtacttggaaaaaggccgcatgatctttctggctccactcagtgtctaaggcaccctgcttcctttgcttgcatcccacagactatttccctcatcctatttactgcagcaaatctctccttagttgatgagactgtgtttatctccctttaaaaccctacctatcctgaatggtctgtcattgtctgcctttaaaatccttcctctttcttcctcctctattctctaaataatgatggggctaagttatacccaaagctcactttacaaaatatttcctcagtactttgcagaaaacaccaaacaaaaatgccattttaaaaaaggtgtattttttcttttagaatgtaagctcctcaagagcagggacaatgttttctgtatgttctattgtgcctagtacactgtaaatgctcaataaatattgatgatgggaggcagtgagtcttgatgataagggtgagaaactgaaatcccaaacactg

SEQ ID NO: 5212 - protein, 166 aa, Homo sapiens; identical to SEQ ID NO: 5192

SEQ ID NO: 5213 - DNA, 2979 bp, Homo sapiens
ccgccccctcccctctccctcggccgccccctcctttccctccccctcgcgcagcctccgcgctgggcgctgcggcggcgggacccggccctcccccaccccgggaggcggtggcgcggcggggaggggccgggggcctcggggacccaagcgcgagggaaaggcctggccgagagcgggccggagcccaggcctggcgcggcggcgcccgccagaacatccagtcatggataaaaatgagctggttcagaaggccaaactggccgagcaggctgagcgatatgatgacatggcagcctgcatgaagtctgtaactgagcaaggagctgaattatccaatgaggagaggaatcttctctcagttgcttataaaaatgttgtaggagcccgtaggtcatcttggagggtcgtctcaagtattgaacaaaagacggaaggtgctgagaaaaaacagcagatggctcgagaatacagagagaaaattgagacggagctaagagatatctgcaatgatgtactgtctcttttggaaaagttcttgatccccaatgcttcacaagcagagagcaaagtcttctatttgaaaatgaaaggagattactaccgttacttggctgaggttgccgctggtgatgacaagaaagggattgtcgatcagtcacaacaagcataccaagaagcttttgaaatcagcaaaaaggaaatgcaaccaacacatcctatcagactgggtctggcccttaacttctctgtgttctattatgagattctgaactccccagagaaagcctgctctcttgcaaagacagcttttgatgaagccattgctgaacttgatacattaagtgaagagtcatacaaagacagcacgctaataatgcaattactgagagacaacttgacattgtggacatcggatacccaaggagacgaagctgaagcaggagaaggaggggaaaattaaccggccttccaacttttgtctgcctcattctaaaatttacacagtagaccatttgtcatccatgctgtcccacaaatagttttttgtttacgatttatgacaggtttatgttacttctatttgaatttctatatttcccatgtggtttttatgtttaatattaggggagtagagccagttaacatttagggagttatctgttttcatcttgaggtggccaatatggggatgtggaatttttatacaagttataagtgtttggcatagtacttttggtacattgtggcttcaaaagggccagtgtaaaactgcttccatgtctaagcaaagaaaactgcctacatactggtttgtcctggcggggaataaaagggatcattggttccagtcacaggtgtagtaattgtgggtactttaaggtttggagcacttacaaggctgtggtagaatcataccccatggataccacatattaaaccatgtatatctgtggaatactcaatgtgtacacctttgactacagctgcagaagtgttcctttagacaaagttgtgacccattttactctggataagggcagaaacggttcacattccattatttgtaaagttacctgctgttagctttcattatttttgctacactcattttatttgtatttaaatgttttaggcaacctaagaacaaatgtaaaagtaaagatgcaggaaaaatgaattgcttggtattcattacttcatgtatatcaagcacagcagtaaaacaaaaacccatgtatttaacttttttttaggatttttgcttttgtgatttttttttttttgatacttgcctaacatgcatgtgctgtaaaaatagttaacagggaaataacttgagatgatggctagctttgtttaatgtcttatgaaattttcatgaacaatccaagcataattgttaagaacacgtgtattaaattcatgtaagtggaataaaagttttatgaatggacttttcaactactttctctacagcttttcatgtaaattagtcttggttctgaaacttctctaaaggaaattgtacattttttgaaatttattccttattccctcttggcagctaatgggctcttaccaagtttaaacacaaaatttatcataacaaaaatactactaatataactactgtttccatgtcccatgatcccctctcttcctccccaccctgaaaaaaatgagttcctattttttctgggagagggggggattgattagaaaaaaatgtagtgtgttccatttaaaattttggcatatggcattttctaacttaggaagccacaatgttcttggcccatcatgacattgggtagcattaactgtaagttttgtgcttccaaatcactttttggtttttaagaatttcttgatactcttatagcctgccttcaattttgatcctttattctttctatttgtcaggtgcacaagattaccttcctgttttagccttctgtcttgtcaccaaccattcttacttggtggccatgtacttggaaaaaggccgcatgatctttctggctccactcagtgtctaaggcaccctgcttcctttgcttgcatcccacagactatttccctcatcctatttactgcagcaaatctctccttagttgatgagactgtgtttatctccctttaaaaccctacctatcctgaatggtctgtcattgtctgcctttaaaatccttcctctttcttcctcctctattctctaaataatgatggggctaagttatacccaaagctcactttacaaaatatttcctcagtactttgcagaaaacaccaaacaaaaatgccattttaaaaaaggtgtattttttcttttagaatgtaagctcctcaagagcagggacaatgttttctgtatgttctattgtgcctagtacactgtaaatgctcaataaatattgatgatgggaggcagtgagtcttgatgataagggtgagaaactgaaatcccaaacactg

SEQ ID NO: 5214 - protein, 245 aa, Homo sapiens; identical to SEQ ID NO: 674

SEQ ID NO: 5215 - DNA, 3375 bp, Homo sapiens
gatcgtcatgtgcagtatgaggtcttcacgtgaaagctttatttgggtaggaaaacctagcctacgagaaacgggtccgtgcggtcacgcctgactgcctgtctccgggtcaaggctgccaggaccagctccagccctccgcccgagaaggctgtcctttcccctcggaactctggcttccctaaagcggccgcgcctccttccaggcctcacctcctgccggctccgcccggcccggcccacctcgcccccacctcggcgcccacccattgtcccctcgcgcagtcaccgagcgcagatcccgcgctctcgattggaacgcctccccatcactcagccacactcaggggctggacgcctcactcccgtttccgagccataaaaggtctaggaccgcttcccccgagccagcagcgtttgacgtcatcgtgcgtgtggtgcccctgctgccggggctggtgattggaggaaaccccgtgtctgcggagcggctgtagcctgtgagcagcgagatccagggacagagtctcagcctcgccgctgctgccgccgccgccgcccagagactgctgagcccgtccgtccgccgccaccacccactccggacacagaacatccagtcatggataaaaatgagctggttcagaaggccaaactggccgagcaggctgagcgatatgatgacatggcagcctgcatgaagtctgtaactgagcaaggagctgaattatccaatgaggagaggaatcttctctcagttgcttataaaaatgttgtaggagcccgtaggtcatcttggagggtcgtctcaagtattgaacaaaagacggaaggtgctgagaaaaaacagcagatggctcgagaatacagagagaaaattgagacggagctaagagatatctgcaatgatgtactgtctcttttggaaaagttcttgatccccaatgcttcacaagcagagagcaaagtcttctatttgaaaatgaaaggagattactaccgttacttggctgaggttgccgctggtgatgacaagaaagggattgtcgatcagtcacaacaagcataccaagaagcttttgaaatcagcaaaaaggaaatgcaaccaacacatcctatcagactgggtctggcccttaacttctctgtgttctattatgagattctgaactccccagagaaagcctgctctcttgcaaagacagcttttgatgaagccattgctgaacttgatacattaagtgaagagtcatacaaagacagcacgctaataatgcaattactgagagacaacttgacattgtggacatcggatacccaaggagacgaagctgaagcaggagaaggaggggaaaattaaccggccttccaacttttgtctgcctcattctaaaatttacacagtagaccatttgtcatccatgctgtcccacaaatagttttttgtttacgatttatgacaggtttatgttacttctatttgaatttctatatttcccatgtggtttttatgtttaatattaggggagtagagccagttaacatttagggagttatctgttttcatcttgaggtggccaatatggggatgtggaatttttatacaagttataagtgtttggcatagtacttttggtacattgtggcttcaaaagggccagtgtaaaactgcttccatgtctaagcaaagaaaactgcctacatactggtttgtcctggcggggaataaaagggatcattggttccagtcacaggtgtagtaattgtgggtactttaaggtttggagcacttacaaggctgtggtagaatcataccccatggataccacatattaaaccatgtatatctgtggaatactcaatgtgtacacctttgactacagctgcagaagtgttcctttagacaaagttgtgacccattttactctggataagggcagaaacggttcacattccattatttgtaaagttacctgctgttagctttcattatttttgctacactcattttatttgtatttaaatgttttaggcaacctaagaacaaatgtaaaagtaaagatgcaggaaaaatgaattgcttggtattcattacttcatgtatatcaagcacagcagtaaaacaaaaacccatgtatttaacttttttttaggatttttgcttttgtgatttttttttttttgatacttgcctaacatgcatgtgctgtaaaaatagttaacagggaaataacttgagatgatggctagctttgtttaatgtcttatgaaattttcatgaacaatccaagcataattgttaagaacacgtgtattaaattcatgtaagtggaataaaagttttatgaatggacttttcaactactttctctacagcttttcatgtaaattagtcttggttctgaaacttctctaaaggaaattgtacattttttgaaatttattccttattccctcttggcagctaatgggctcttaccaagtttaaacacaaaatttatcataacaaaaatactactaatataactactgtttccatgtcccatgatcccctctcttcctccccaccctgaaaaaaatgagttcctattttttctgggagagggggggattgattagaaaaaaatgtagtgtgttccatttaaaattttggcatatggcattttctaacttaggaagccacaatgttcttggcccatcatgacattgggtagcattaactgtaagttttgtgcttccaaatcactttttggtttttaagaatttcttgatactcttatagcctgccttcaattttgatcctttattctttctatttgtcaggtgcacaagattaccttcctgttttagccttctgtcttgtcaccaaccattcttacttggtggccatgtacttggaaaaaggccgcatgatctttctggctccactcagtgtctaaggcaccctgcttcctttgcttgcatcccacagactatttccctcatcctatttactgcagcaaatctctccttagttgatgagactgtgtttatctccctttaaaaccctacctatcctgaatggtctgtcattgtctgcctttaaaatccttcctctttcttcctcctctattctctaaataatgatggggctaagttatacccaaagctcactttacaaaatatttcctcagtactttgcagaaaacaccaaacaaaaatgccattttaaaaaaggtgtattttttcttttagaatgtaagctcctcaagagcagggacaatgttttctgtatgttctattgtgcctagtacactgtaaatgctcaataaatattgatgatgggaggcagtgagtcttgatgataagggtgagaaactgaaatcccaaacactg

SEQ ID NO: 5216 - protein, 245 aa, Homo sapiens; identical to SEQ ID NO: 674

SEQ ID NO: 5217 - DNA, 2870 bp, Homo sapiens
gggctcccgtcccggctcatcacccggcctgtggcccactcccaccgccagctggaaccctggggactacgacgtccctcaaaccttgcttctaggagataaaaagaacatccagtcatggataaaaatgagctggttcagaaggccaaactggccgagcaggctgagcgatatgatgacatggcagcctgcatgaagtctgtaactgagcaaggagctgaattatccaatgaggagaggaatcttctctcagttgcttataaaaatgttgtaggagcccgtaggtcatcttggagggtcgtctcaagtattgaacaaaagacggaaggtgctgagaaaaaacagcagatggctcgagaatacagagagaaaattgagacggagctaagagatatctgcaatgatgtactgtctcttttggaaaagttcttgatccccaatgcttcacaagcagagagcaaagtcttctatttgaaaatgaaaggagattactaccgttacttggctgaggttgccgctggtgatgacaagaaagggattgtcgatcagtcacaacaagcataccaagaagcttttgaaatcagcaaaaaggaaatgcaaccaacacatcctatcagactgggtctggcccttaacttctctgtgttctattatgagattctgaactccccagagaaagcctgctctcttgcaaagacagcttttgatgaagccattgctgaacttgatacattaagtgaagagtcatacaaagacagcacgctaataatgcaattactgagagacaacttgacattgtggacatcggatacccaaggagacgaagctgaagcaggagaaggaggggaaaattaaccggccttccaacttttgtctgcctcattctaaaatttacacagtagaccatttgtcatccatgctgtcccacaaatagttttttgtttacgatttatgacaggtttatgttacttctatttgaatttctatatttcccatgtggtttttatgtttaatattaggggagtagagccagttaacatttagggagttatctgttttcatcttgaggtggccaatatggggatgtggaatttttatacaagttataagtgtttggcatagtacttttggtacattgtggcttcaaaagggccagtgtaaaactgcttccatgtctaagcaaagaaaactgcctacatactggtttgtcctggcggggaataaaagggatcattggttccagtcacaggtgtagtaattgtgggtactttaaggtttggagcacttacaaggctgtggtagaatcataccccatggataccacatattaaaccatgtatatctgtggaatactcaatgtgtacacctttgactacagctgcagaagtgttcctttagacaaagttgtgacccattttactctggataagggcagaaacggttcacattccattatttgtaaagttacctgctgttagctttcattatttttgctacactcattttatttgtatttaaatgttttaggcaacctaagaacaaatgtaaaagtaaagatgcaggaaaaatgaattgcttggtattcattacttcatgtatatcaagcacagcagtaaaacaaaaacccatgtatttaacttttttttaggatttttgcttttgtgatttttttttttttgatacttgcctaacatgcatgtgctgtaaaaatagttaacagggaaataacttgagatgatggctagctttgtttaatgtcttatgaaattttcatgaacaatccaagcataattgttaagaacacgtgtattaaattcatgtaagtggaataaaagttttatgaatggacttttcaactactttctctacagcttttcatgtaaattagtcttggttctgaaacttctctaaaggaaattgtacattttttgaaatttattccttattccctcttggcagctaatgggctcttaccaagtttaaacacaaaatttatcataacaaaaatactactaatataactactgtttccatgtcccatgatcccctctcttcctccccaccctgaaaaaaatgagttcctattttttctgggagagggggggattgattagaaaaaaatgtagtgtgttccatttaaaattttggcatatggcattttctaacttaggaagccacaatgttcttggcccatcatgacattgggtagcattaactgtaagttttgtgcttccaaatcactttttggtttttaagaatttcttgatactcttatagcctgccttcaattttgatcctttattctttctatttgtcaggtgcacaagattaccttcctgttttagccttctgtcttgtcaccaaccattcttacttggtggccatgtacttggaaaaaggccgcatgatctttctggctccactcagtgtctaaggcaccctgcttcctttgcttgcatcccacagactatttccctcatcctatttactgcagcaaatctctccttagttgatgagactgtgtttatctccctttaaaaccctacctatcctgaatggtctgtcattgtctgcctttaaaatccttcctctttcttcctcctctattctctaaataatgatggggctaagttatacccaaagctcactttacaaaatatttcctcagtactttgcagaaaacaccaaacaaaaatgccattttaaaaaaggtgtattttttcttttagaatgtaagctcctcaagagcagggacaatgttttctgtatgttctattgtgcctagtacactgtaaatgctcaataaatattgatgatgggaggcagtgagtcttgatgataagggtgagaaactgaaatcccaaacactg

SEQ ID NO: 5218 - protein, 245 aa, Homo sapiens; identical to SEQ ID NO: 674

SEQ ID NO: 5219 - DNA, 2767 bp, Homo sapiens
cagaacatccagtcatggataaaaatgagctggttcagaaggccaaactggccgagcaggctgagcgatatgatgacatggcagcctgcatgaagtctgtaactgagcaaggagctgaattatccaatgaggagaggaatcttctctcagttgcttataaaaatgttgtaggagcccgtaggtcatcttggagggtcgtctcaagtattgaacaaaagacggaaggtgctgagaaaaaacagcagatggctcgagaatacagagagaaaattgagacggagctaagagatatctgcaatgatgtactgtctcttttggaaaagttcttgatccccaatgcttcacaagcagagagcaaagtcttctatttgaaaatgaaaggagattactaccgttacttggctgaggttgccgctggtgatgacaagaaagggattgtcgatcagtcacaacaagcataccaagaagcttttgaaatcagcaaaaaggaaatgcaaccaacacatcctatcagactgggtctggcccttaacttctctgtgttctattatgagattctgaactccccagagaaagcctgctctcttgcaaagacagcttttgatgaagccattgctgaacttgatacattaagtgaagagtcatacaaagacagcacgctaataatgcaattactgagagacaacttgacattgtggacatcggatacccaaggagacgaagctgaagcaggagaaggaggggaaaattaaccggccttccaacttttgtctgcctcattctaaaatttacacagtagaccatttgtcatccatgctgtcccacaaatagttttttgtttacgatttatgacaggtttatgttacttctatttgaatttctatatttcccatgtggtttttatgtttaatattaggggagtagagccagttaacatttagggagttatctgttttcatcttgaggtggccaatatggggatgtggaatttttatacaagttataagtgtttggcatagtacttttggtacattgtggcttcaaaagggccagtgtaaaactgcttccatgtctaagcaaagaaaactgcctacatactggtttgtcctggcggggaataaaagggatcattggttccagtcacaggtgtagtaattgtgggtactttaaggtttggagcacttacaaggctgtggtagaatcataccccatggataccacatattaaaccatgtatatctgtggaatactcaatgtgtacacctttgactacagctgcagaagtgttcctttagacaaagttgtgacccattttactctggataagggcagaaacggttcacattccattatttgtaaagttacctgctgttagctttcattatttttgctacactcattttatttgtatttaaatgttttaggcaacctaagaacaaatgtaaaagtaaagatgcaggaaaaatgaattgcttggtattcattacttcatgtatatcaagcacagcagtaaaacaaaaacccatgtatttaacttttttttaggatttttgcttttgtgatttttttttttttgatacttgcctaacatgcatgtgctgtaaaaatagttaacagggaaataacttgagatgatggctagctttgtttaatgtcttatgaaattttcatgaacaatccaagcataattgttaagaacacgtgtattaaattcatgtaagtggaataaaagttttatgaatggacttttcaactactttctctacagcttttcatgtaaattagtcttggttctgaaacttctctaaaggaaattgtacattttttgaaatttattccttattccctcttggcagctaatgggctcttaccaagtttaaacacaaaatttatcataacaaaaatactactaatataactactgtttccatgtcccatgatcccctctcttcctccccaccctgaaaaaaatgagttcctattttttctgggagagggggggattgattagaaaaaaatgtagtgtgttccatttaaaattttggcatatggcattttctaacttaggaagccacaatgttcttggcccatcatgacattgggtagcattaactgtaagttttgtgcttccaaatcactttttggtttttaagaatttcttgatactcttatagcctgccttcaattttgatcctttattctttctatttgtcaggtgcacaagattaccttcctgttttagccttctgtcttgtcaccaaccattcttacttggtggccatgtacttggaaaaaggccgcatgatctttctggctccactcagtgtctaaggcaccctgcttcctttgcttgcatcccacagactatttccctcatcctatttactgcagcaaatctctccttagttgatgagactgtgtttatctccctttaaaaccctacctatcctgaatggtctgtcattgtctgcctttaaaatccttcctctttcttcctcctctattctctaaataatgatggggctaagttatacccaaagctcactttacaaaatatttcctcagtactttgcagaaaacaccaaacaaaaatgccattttaaaaaaggtgtattttttcttttagaatgtaagctcctcaagagcagggacaatgttttctgtatgttctattgtgcctagtacactgtaaatgctcaataaatattgatgatgggaggcagtgagtcttgatgataagggtgagaaactgaaatcccaaacactg

SEQ ID NO: 5220 - protein, 245 aa, Homo sapiens; identical to SEQ ID NO: 674

SEQ ID NO: 5221 - DNA, 1063 bp, Homo sapiens
ttgtggacatcggatacccaaggagacgaagctgaagcaggagaaggaggggaaaattaaccggccttccaacttttgtctgcctcattctaaaatttacacagtagaccatttgtcatccatgctgtcccacaaatagttttttgtttacgatttatgacaggtttatgttacttctatttgaatttctatatttcccatgtggtttttatgtttaatattaggggagtagagccagttaacatttagggagttatctgttttcatcttgaggtcccatgatcccctctcttcctccccaccctgaaaaaaatgagttcctattttttctgggagagggggggattgattagaaaaaaatgtagtgtgttccatttaaaattttggcatatggcattttctaacttaggaagccacaatgttcttggcccatcatgacattgggtagcattaactgtaagttttgtgcttccaaatcactttttggtttttaagaatttcttgatactcttatagcctgccttcaattttgatcctttattctttctatttgtcaggtgcacaagattaccttcctgttttagccttctgtcttgtcaccaaccattcttacttggtggccatgtacttggaaaaaggccgcatgatctttctggctccactcagtgtctaaggcaccctgcttcctttgcttgcatcccacagactatttccctcatcctatttactgcagcaaatctctccttagttgatgagactgtgtttatctccctttaaaaccctacctatcctgaatggtctgtcattgtctgcctttaaaatccttcctctttcttcctcctctattctctaaataatgatggggctaagttatacccaaagctcactttacaaaatatttcctcagtactttgcagaaaacaccaaacaaaaatgccattttaaaaaaggtgtattttttcttttagaatgtaagctcctcaagagcagggacaatgttttctgtatgttctattgtgcctagtacactgtaaatgctcaataaatattgatgatgggaggc

SEQ ID NO: 5222 - protein, 55 aa, Homo sapiens; identical to SEQ ID NO: 5198

SEQ ID NO: 5223 - DNA, 2721 bp, Homo sapiens
cagaacatccagtcatggataaaaatgagctggttcagaaggccaaactggccgagcaggctgagcgatatgatgacatggcagcctgcatgaagtctgtaactgagcaaggagctgaattatccaatgaggagaggaatcttctctcagttgcttataaaaatgttgtaggagcccgtaggtcatcttggagggtcgtctcaagtattgaacaaaagacggaaggtgctgagaaaaaacagcagatggctcgagaatacagagagaaaattgagacggagctaagagatatctgcaatgatgtactgtctcttttggaaaagttcttgatccccaatgcttcacaagcagagagcaaagtcttctatttgaaaatgaaaggagattactaccgttacttggctgaggttgccgctggtgatgacaagaaagggattgtcgatcagtcacaacaagcataccaagaagcttttgaaatcagcaaaaaggaaatgcaaccaacacatcctatcagactgggtctggcccttaacttctctgtgttctattatgagattctgaactccccagagaaagcctgctctcttgcaaagacagcttttgatgaagccattgctgaacttgatacattaagtgaagagtcatacaaagacagcacgctaataatgcaattactgagagacaacttgacattgtggacatcggatacccaaggagacgaagctgaagcaggagaaggaggggaaaattaaccggccttccaacttttgtctgcctcattctaaaatttacacagtagaccatttgtcatccatgctgtcccacaaatagttttttgtttacgatttatgacaggtttatgttacttctatttgaatttctatatttcccatgtggtttttatgtttaatattaggggagtagagccagttaacatttagggagttatctgttttcatcttgaggtggccaatatggggatgtggaatttttatacaagttataagtgtttggcatagtacttttggtacattgtggcttcaaaagggccagtgtaaaactgcttccatgtctaagcaaagaaaactgcctacatactggtttgtcctggcggggaataaaagggatcattggttccagtcacaggtgtagtaattgtgggtactttaaggtttggagcacttacaaggctgtggtagaatcataccccatggataccacatattaaaccatgtatatctgtggaatactcaatgtgtacacctttgactacagctgcagaagtgttcctttagacaaagttgtgacccattttactctggataagggcagaaacggttcacattccattatttgtaaagttacctgctgttagctttcattatttttgctacactcattttatttgtatttaaatgttttaggcaacctaagaacaaatgtaaaagtaaagatgcaggaaaaatgaattgcttggtattcattacttcatgtatatcaagcacagcagtaaaacaaaaacccatgtatttaacttttttttaggatttttgcttttgtgatttttttttttttgatacttgcctaacatgcatgtgctgtaaaaatagttaacagggaaataacttgagatgatggctagctttgtttaatgtcttatgaaattttcatgaacaatccaagcataattgttaagaacacgtgtattaaattcatgtaagtggaataaaagttttatgaatggacttttcaactactttctctacagcttttcatgtaaattagtcttggttctgaaacttctctaaaggaaattgtacattttttgaaatttattccttattccctcttggcagctaatgggctcttaccaagtttaaacacaaaatttatcataacaaaaatactactaatataactactgtttccatgtcccatgatcccctctcttcctccccaccctgaaaaaaatgagttcctattttttctgggagagggggggattgattagaaaaaaatgtagtgtgttccatttaaaattttggcatatggcattttctaacttaggaagccacaatgttcttggcccatcatgacattgggtagcattaactgtaagttttgtgcttccaaatcactttttggtttttaagaatttcttgatactcttatagcctgccttcaattttgatcctttattctttctatttgtcaggtgcacaagattaccttcctgttttagccttctgtcttgtcaccaaccattcttacttggtggccatgtacttggaaaaaggccgcatgatctttctggctccactcagtgtctaaggcaccctgcttcctttgcttgcatcccacagactatttccctcatcctatttactgcagcaaatctctccttagttgatgagactgtgtttatctccctttaaaaccctacctatcctgaatggtctgtcattgtctgcctttaaaatccttcctctttcttcctcctctattctctaaataatgatggggctaagttatacccaaagctcactttacaaaatatttcctcagtactttgcagaaaacaccaaacaaaaatgccattttaaaaaaggtgtattttttcttttagaatgtaagctcctcaagagcagggacaatgttttctgtatgttctattgtgcctagtacactgtaaatgctcaataaatattgatgatgggaggc

SEQ ID NO: 5224 - protein, 245 aa, Homo sapiens; identical to SEQ ID NO: 674

SEQ ID NO: 5225 - DNA, 2632 bp, Homo sapiens
cagaacatccagtcatggataaaaatgagctggttcagaaggccaaactggccgagcaggctgagcgatatgatgacatggcagcctgcatgaagtctgtaactgagcaaggagctgaattatccaatgaggagaggaatcttctctcagttgcttataaaaatgttgtaggagcccgtaggtcatcttggagggtcgtctcaagtattgaacaaaagacggaaggtgctgagaaaaaacagcagatggctcgagaatacagagagaaaattgagacggagctaagagatatctgcaatgatgtactgtctcttttggaaaagttcttgatccccaatgcttcacaagcagagagcaaagtcttctatttgaaaatgaaaggagattactaccgttacttggctgaggttgccgctggtgatgacaagaaagggattgtcgatcagtcacaacaagcataccaagaagcttttgaaatcagcaaaaaggaaatgcaaccaacacatcgcttttgatgaagccattgctgaacttgatacattaagtgaagagtcatacaaagacagcacgctaataatgcaattactgagagacaacttgacattgtggacatcggatacccaaggagacgaagctgaagcaggagaaggaggggaaaattaaccggccttccaacttttgtctgcctcattctaaaatttacacagtagaccatttgtcatccatgctgtcccacaaatagttttttgtttacgatttatgacaggtttatgttacttctatttgaatttctatatttcccatgtggtttttatgtttaatattaggggagtagagccagttaacatttagggagttatctgttttcatcttgaggtggccaatatggggatgtggaatttttatacaagttataagtgtttggcatagtacttttggtacattgtggcttcaaaagggccagtgtaaaactgcttccatgtctaagcaaagaaaactgcctacatactggtttgtcctggcggggaataaaagggatcattggttccagtcacaggtgtagtaattgtgggtactttaaggtttggagcacttacaaggctgtggtagaatcataccccatggataccacatattaaaccatgtatatctgtggaatactcaatgtgtacacctttgactacagctgcagaagtgttcctttagacaaagttgtgacccattttactctggataagggcagaaacggttcacattccattatttgtaaagttacctgctgttagctttcattatttttgctacactcattttatttgtatttaaatgttttaggcaacctaagaacaaatgtaaaagtaaagatgcaggaaaaatgaattgcttggtattcattacttcatgtatatcaagcacagcagtaaaacaaaaacccatgtatttaacttttttttaggatttttgcttttgtgatttttttttttttgatacttgcctaacatgcatgtgctgtaaaaatagttaacagggaaataacttgagatgatggctagctttgtttaatgtcttatgaaattttcatgaacaatccaagcataattgttaagaacacgtgtattaaattcatgtaagtggaataaaagttttatgaatggacttttcaactactttctctacagcttttcatgtaaattagtcttggttctgaaacttctctaaaggaaattgtacattttttgaaatttattccttattccctcttggcagctaatgggctcttaccaagtttaaacacaaaatttatcataacaaaaatactactaatataactactgtttccatgtcccatgatcccctctcttcctccccaccctgaaaaaaatgagttcctattttttctgggagagggggggattgattagaaaaaaatgtagtgtgttccatttaaaattttggcatatggcattttctaacttaggaagccacaatgttcttggcccatcatgacattgggtagcattaactgtaagttttgtgcttccaaatcactttttggtttttaagaatttcttgatactcttatagcctgccttcaattttgatcctttattctttctatttgtcaggtgcacaagattaccttcctgttttagccttctgtcttgtcaccaaccattcttacttggtggccatgtacttggaaaaaggccgcatgatctttctggctccactcagtgtctaaggcaccctgcttcctttgcttgcatcccacagactatttccctcatcctatttactgcagcaaatctctccttagttgatgagactgtgtttatctccctttaaaaccctacctatcctgaatggtctgtcattgtctgcctttaaaatccttcctctttcttcctcctctattctctaaataatgatggggctaagttatacccaaagctcactttacaaaatatttcctcagtactttgcagaaaacaccaaacaaaaatgccattttaaaaaaggtgtattttttcttttagaatgtaagctcctcaagagcagggacaatgttttctgtatgttctattgtgcctagtacactgtaaatgctcaataaatattgatgatgggaggc

SEQ ID NO: 5226 - protein, 166 aa, Homo sapiens; identical to SEQ ID NO: 5192

SEQ ID NO: 5227 - DNA, 1755 bp, Homo sapiens
cagaacatccagtcatggataaaaatgagctggttcagaaggccaaactggccgagcaggctgagcgatatgatgacatggcagcctgcatgaagtctgtaactgagcaaggagctgaattatccaatgaggagaggaatcttctctcagttgcttataaaaatgttgtaggagcccgtaggtcatcttggagggtcgtctcaagtattgaacaaaagacggaaggtgctgagaaaaaacagcagatggctcgagaatacagagagaaaattgagacggagctaagagatatctgcaatgatgtactgtctcttttggaaaagttcttgatccccaatgcttcacaagcagagagcaaagtcttctatttgaaaatgaaaggagattactaccgttacttggctgaggttgccgctggtgatgacaagaaagggattgtcgatcagtcacaacaagcataccaagaagcttttgaaatcagcaaaaaggaaatgcaaccaacacatcctatcagactgggtctggcccttaacttctctgtgttctattatgagattctgaactccccagagaaagcctgctctcttgcaaagacagcttttgatgaagccattgctgaacttgatacattaagtgaagagtcatacaaagacagcacgctaataatgcaattactgagagacaacttgacattgtggacatcggatacccaaggagacgaagctgaagcaggagaaggaggggaaaattaaccggccttccaacttttgtctgcctcattctaaaatttacacagtagaccatttgtcatccatgctgtcccacaaatagttttttgtttacgatttatgacaggtttatgttacttctatttgaatttctatatttcccatgtggtttttatgtttaatattaggggagtagagccagttaacatttagggagttatctgttttcatcttgaggtggccaatatggggatgtggaatttttatacaagttataagtgtttggcatagtacttttggtacattgtggcttcaaaagggccagtgtaaaactgcttccatgtctaagcaaagaaaactgcctacatactggtttgtcctggcggggaataaaagggatcattggttccagtcacaggtgtagtaattgtgggtactttaaggtttggagcacttacaaggctgtggtagaatcataccccatggataccacatattaaaccatgtatatctgtggaatactcaatgtgtacacctttgactacagctgcagaagtgttcctttagacaaagttgtgacccattttactctggataagggcagaaacggttcacattccattatttgtaaagttacctgctgttagctttcattatttttgctacactcattttatttgtatttaaatgttttaggcaacctaagaacaaatgtaaaagtaaagatgcaggaaaaatgaattgcttggtattcattacttcatgtatatcaagcacagcagtaaaacaaaaacccatgtatttaacttttttttaggatttttgcttttgtgatttttttttttttgatacttgcctaacatgcatgtgctgtaaaaatagttaacagggaaataacttgagatgatggctagctttgtttaatgtcttatgaaattttcatgaacaatccaagcataattgttaagaacacgtgtattaaattcatgtaagtggaataaaagttttatgaatggacttttcaact

SEQ ID NO: 5228 - protein, 245 aa, Homo sapiens; identical to SEQ ID NO: 674

SEQ ID NO: 5229 - DNA, 1666 bp, Homo sapiens
cagaacatccagtcatggataaaaatgagctggttcagaaggccaaactggccgagcaggctgagcgatatgatgacatggcagcctgcatgaagtctgtaactgagcaaggagctgaattatccaatgaggagaggaatcttctctcagttgcttataaaaatgttgtaggagcccgtaggtcatcttggagggtcgtctcaagtattgaacaaaagacggaaggtgctgagaaaaaacagcagatggctcgagaatacagagagaaaattgagacggagctaagagatatctgcaatgatgtactgtctcttttggaaaagttcttgatccccaatgcttcacaagcagagagcaaagtcttctatttgaaaatgaaaggagattactaccgttacttggctgaggttgccgctggtgatgacaagaaagggattgtcgatcagtcacaacaagcataccaagaagcttttgaaatcagcaaaaaggaaatgcaaccaacacatcgcttttgatgaagccattgctgaacttgatacattaagtgaagagtcatacaaagacagcacgctaataatgcaattactgagagacaacttgacattgtggacatcggatacccaaggagacgaagctgaagcaggagaaggaggggaaaattaaccggccttccaacttttgtctgcctcattctaaaatttacacagtagaccatttgtcatccatgctgtcccacaaatagttttttgtttacgatttatgacaggtttatgttacttctatttgaatttctatatttcccatgtggtttttatgtttaatattaggggagtagagccagttaacatttagggagttatctgttttcatcttgaggtggccaatatggggatgtggaatttttatacaagttataagtgtttggcatagtacttttggtacattgtggcttcaaaagggccagtgtaaaactgcttccatgtctaagcaaagaaaactgcctacatactggtttgtcctggcggggaataaaagggatcattggttccagtcacaggtgtagtaattgtgggtactttaaggtttggagcacttacaaggctgtggtagaatcataccccatggataccacatattaaaccatgtatatctgtggaatactcaatgtgtacacctttgactacagctgcagaagtgttcctttagacaaagttgtgacccattttactctggataagggcagaaacggttcacattccattatttgtaaagttacctgctgttagctttcattatttttgctacactcattttatttgtatttaaatgttttaggcaacctaagaacaaatgtaaaagtaaagatgcaggaaaaatgaattgcttggtattcattacttcatgtatatcaagcacagcagtaaaacaaaaacccatgtatttaacttttttttaggatttttgcttttgtgatttttttttttttgatacttgcctaacatgcatgtgctgtaaaaatagttaacagggaaataacttgagatgatggctagctttgtttaatgtcttatgaaattttcatgaacaatccaagcataattgttaagaacacgtgtattaaattcatgtaagtggaataaaagttttatgaatggacttttcaact

SEQ ID NO: 5230 - protein, 166 aa, Homo sapiens; identical to SEQ ID NO: 5192

SEQ ID NO: 5231 - DNA, 1093 bp, Homo sapiens
gatcgtcatgtgcagtatgaggtcttcacgtgaaagctttatttgggtaggaaaacctagcctacgagaaacgggtccgtgcggtcacgcctgactgcctgtctccgggtcaaggctgccaggaccagctccagccctccgcccgagaaggctgtcctttcccctcggaactctggcttccctaaagcggccgcgcctccttccaggcctcacctcctgccggctccgcccggcccggcccacctcgcccccacctcggcgcccacccattgtcccctcgcgcagtcaccgagcgcagatcccgcgctctcgattggaacgcctccccatcactcagccacactcaggggctggacgcctcactcccgtttccgagccataaaaggtctaggaccgcttcccccgagccagcagcgtttgacgtcatcgtgcgtgtggtgcccctgctgccggggctggtgattggaggaaaccccgtgtctgcggagcggctgtagcctgtgagcagcgagatccagggacagagtctcagcctcgccgctgctgccgccgccgccgcccagagactgctgagcccgtccgtccgccgccaccacccactccggacacagaacatccagtcatggataaaaatgagctggttcagaaggccaaactggccgagcaggctgagcgatatgatgacatggcagcctgcatgaagtctgtaactgagcaaggagctgaattatccaatgaggagaggaatcttctctcagttgcttataaaaatgttgtaggagcccgtaggtcatcttggagggtcgtctcaagtattgaacaaaagacggaaggtgctgagaaaaaacagcagatggctcgagaatacagagagaaaattgagacggagctaagagatatctgcaatgatgtactgtctcttttggaaaagttcttgatccccaatgcttcacaagcagagagcaaagtcttctatttgaaaatgaaaggagattactaccgttacttggctgaggttgccgctggtgatgacaagaaagggattgtcgatcagtcacaacaagcataccaagaagcttttgaaatcagcaaa

SEQ ID NO: 5232 - protein, 156 aa, Homo sapiens
MDKNELVQKAKLAEQAERYDDMAACMKSVTEQGAELSNEERNLLSVAYKNVVGARRSSWRVVSSIEQKTEGAEKKQQMAREYREKIETELRDICNDVLSLLEKFLIPNASQAESKVFYLKMKGDYYRYLAEVAAGDDKKGIVDQSQQAYQEAFEIS

SEQ ID NO: 5233 - DNA, 492 bp, Homo sapiens
cagctgcaggtgggggaggggacgagagccacacccagccgagcgggccaccagcggctatgctcaggctcacccgcccccaaagcaggatatgcgtccccaaaccgagcgcagggaccctccagttctagtccatcaagcacgggagccgactgcgggctcaccaccctgttctctaccccgacctggacttgcagcccccgtccacacctcccccgcccgttcacaaggagcaaaaaaagtcagacccatcccccacccccaccaggaaaattcaagtccttcctcccaccgcggagcccaggaaattcagctctaggtcccagacaagggtggggatggatcgcggccggcggcgccccggccatgcctcgtccaccttcgggagccggcgacagggagatccccagggatctcgcgtgtgggcgccctacccacccccgggggcaggacgggggagcgagcaccgatcggcgccggggcgtcgatgcg

SEQ ID NO: 5234 - protein, 75 aa, Homo sapiens
MRPQTERRDPPVLVHQAREPTAGSPPCSLPRPGLAAPVHTSPARSQGAKKVRPIPHPHQENSSPSSHRGAQEIQL

SEQ ID NO: 5235 - DNA, 681 bp, Homo sapiens
cttccccttcttccgggctcccgtcccggctcatcacccggcctgtggcccactcccaccgccagctggaaccctggggactacgacgtccctcaaaccttgcttctaggagataaaaaggcctcacctcctgccggctccgcccggcccggcccacctcgcccccacctcggcgcccacccattgtcccctcgcgcagtcaccgagcgcagatcccgcgctctcgattggaacgcctccccatcactcagccacactcaggggctggacgcctcactcccgtttccgagccataaaaggtctaggaccgcttcccccgagccagcaggtgcactcgggacaagcgtagaggagctggaagccgagcggggtgggaggagtggcggctgcgggcgaggacgcgcgcgcctccgctcgccctccagcgcgggcgggcaggacgagcgccggggagcggcggttacgcggggccccgatcgctgtgggcaccaatcaacggttgccatagcagcgtttgacgtcatcgtgcgtgtggtgcccctgctgccggggctggtgattggaggaaaccccgtgtctgcggagcggctgtagcctgtgagcagcgagatccagggacagagtctcagcctcgccgctgctgccgccgccgccgcccagagactgctgagcccgtccgtc

SEQ ID NO: 5236 - protein, 197 aa, Homo sapiens
LPLLPGSRPGSSPGLWPTPTASWNPGDYDVPQTLLLGDKKASPPAGSARPGPPRPHLGAHPLSPRAVTERRSRALDWNASPSLSHTQGLDASLPFPSHKRSRTASPEPAGALGTSVEELEAERGGRSGGCGRGRARLRSPSSAGGQDERRGAAVTRGPDRCGHQSTVAIAAFDVIVRVVPLLPGLVIGGNPVSAERL

SEQ ID NO: 5237 - DNA, 8192 bp, Homo sapiens
tttcaaattgtttttcaaaacacagggtaacatcctaataaacaaatgaatcatgcttcctgcaacaccttttcacaaacagaaaccccaaaatatgcctgcaatgttctgacaaaaaaagaggccattgtccaattagcaaaacacctgaatttattcagagtgagggaggaatccagcaactgcttggatgttacctggagagaaggctgtgggaaacatcactcgttgcaggctccgtttagcctgtgtgaggccttcagcaagatgcaacctgccctgacccatcaagcatggttctgctcaccatgccaccgagatccagcaggctccttggcaatgagaagatgcaactgtgttagttgtggtctcctgcagaaggactggcccccaccacaaacataaaccctgcattgagcctgagttattgtcctggtgctgagagcaaaattaattgtttgaaaaaaaaagtgctttctaataaactaagaggaaagtgatgccatcccatatcttgctacccagctgggtggggactttgtaagctgtcagcaccaatatgggagacgtgggatggaaaatagcccaggccaaggtcagatacagacaagaacagaggcaagtctccaagcctgggatgtggagctgtcagcactacagggcatcgggcaagctcaggatggagtcaacagctggagatgccaagttggagcaggggcattccatgggcatccaagagttgagctggcaggatggggaatggggccagcagagaataagggcgtgctcccctcttcctttgcctgattcaccactacttatcttttataccttggctcagacatcattttatctcaaagaaggccatcatcctgcaattctcctcaatagcacctaccattgaagtgagtcaatgggtgactgattttggagtcctgcctgctagaacataaactccacgagctagacccccatctgtcttctttatggccacatctctggtacccagcaccatgtgtgacccattgtcagccctcaatacatcttactgggaggaaggaaagatgaataaagggcacagaagaagaaggaggtagggaggaaggatgggaaggacaaatcggaagaaggtgcacactaagctgtgtctggttccagatcctgtttctaaggagctgctggtgggcttgtaaatgcaggtgggcgtggccgaccctgaaggcatagcacccccagcccagtgactgacctgtgtggtagacattggaggtcacatggtttaagaacctggcacataaatccttcctggaaaaataatcacattgtatttcttggtgtttcatctcctgacaggggtttttctttctctggtgtttgagatgaaaacaagctgtgacctgaaactatagacacttctcaaggatgatggtatgttgatagaatgtagttaaaatgctcattagggatcatctactattgtaaagaacagggtagaggaagagtagggtaggcagagtctcttaatccttggatttattcaacaggattttaccaaaacaggatgaacctctgaaaaaagacaagcatttacaataacattgtaaataaaacctaatgaaagacatctgaagtctacagacaaatgaacagccttaagaagcctgaatcttacaggcaatgacctttgccaatagctttaataccaatagagttgctgatattgattatccaatctgtggcaggtaggagtccaggagtgcaaaggcacttgggacagtgggtttgggaatattagctgggtgagaggaagcagtggtcctgaaacttaatgttcctatgatttaactggggctgagtaggtctgagatggggccttagattttgcttttttaacaagcaatgtctatgcaggtgagtattaagaataaacttaaacagtttttcctctgctctcacactaacacaacaacagttatcaacacagacaggagaattctgttatccccaaatatgagggggtttctccccatcagcaagcagcccatcagttctgcagtggacaccagctggttgccctccgattcaattctgacatcgtctactggaagatagtgtcagatcccacaggtctgactctacagagaccacagattctttgagttgcaaggaatgaagaggtcactcaacctagttcaagcgatgaggtttatggtgaagaaattgcaaagcagtgagagtgatggaaacttctggaaaacaggattgtggagtagccaggcctggaagagactggaaccaggtatcatcctgagtccagggcagctcaaggcacctcaggggcagaggtttgtgtaattctttatttcttgctgttcttcgaagggctttcttttatctcagagcttccactaccccatgcttctcctaacttctgccagctcgccgcctctcagagcccctcgtctgactcaaagtctctgtttctgcttcctttcagcattttccccactgaagacaggacccttgctagtttctaattcaggcctcaagagcaagaagctgacccgcccctcctggcaggcaaagcacatcacccaggcgccccagggccctgccagcctgcaaccaagcttcttagtcaggctaggtgtgccccagctttctaaacacctggggccaggaaggggcaggatgggcctcatggtacaacctcgctgccaggacagcaggtgctgcctcctgggaagggccttttaaagatatggtgggtgtggtatttgcctcctctgtgaaatccacggctggctgagctccaagctttgtagtccttggagagttaatcttggtggctctctcttatgcaaaaaaaaacttcagagaagtattgggagacttcctatttggaaatttctagtctgtactgctaaagggagtaggggtaggggagtcatttttcagttttttttctttttcttttttttttttttttaggcagggtcttgccttgttgcccaggctggagtgcagtgatgcaatcacggctcactgcagctcgacctcgcaggctcaagcgatcctcctgaatagctgggaccacaggtgtgcatcaccacacctggctaattattttgtagtttttgtagagatggggtctcaccttattgcccaggctgatctcaaactcctgggctcaagtgatgctccctcctttgcctcccaaagtgctgggattacccatgagccacagcacctggcccatttttcagtttttaaaggtctggtggttttccgaaaccttcacttgggatttggcatgttaattacgactaaacccctgatccttccccacacctcctgggggatgattaggtcagggccaggccatccccgctcctcctggaggctgcaggaggcactccacacatctccccacgggcagcatctgctcactccctctgctcatgtttattgagcactcgatgtgctaggtacagttctcagacctgggggtacaatactgaacccaaaagacaaccgtctctgtcctcatagagcttatgttctaatgaggagagacaattcataaatataacaaatgtgtgaattatagcttccgttagaaggtgataagtgcttcaggaaaagaaaatatgtcagagtaagtggggtaggaagtgcgggtgaggagaggaggtagacagatgaaatgtttgatagcacagggagggtaagtcattgagaagctgttatttgagccaagcctcgatggaggtgcgggaagctttgagaattttgtaatatcccccagcacaagacactagaggcaccttggagtcttgtgaaagcaacactgaaaactctgggaataaacagcagagaagtaagggtgtgacaagtcaggaatattccatggctatgcaccaagaatggccctgcacaaatatttaggaggagtggcagtgagaggatttgagggtcaaaagtgttaaagtagaaatatgagaaattacaacaaagtccaggttcacttcagtgtattattattttcatttttttgtaaaatattttgaaaaatttcaaaataaagttgctaaaagactttgtcgtgataatgacgttgcagttatgtaggagaatggccttattcttttttgttttgttttgtttttgagactgagtcttgctgcgtcacccaggctggagtgcggtggcacagtcatggctcactgaagccttgacctcccagactcaagtgaacctcccgccttagcttcctgagtagctgggtgtacaggcaagtgccatcatacccagctaattttaagattttttgtagagatggggtctcgccttgttgtccaggctccttgaactcctggacacaagtgaacctcccgcctcagcctcctaaatagctgggattacaggtgcatgccaccacgcccggctaattttttgtatttttagtagagatggggtttcactgtgttagccaggatggtctcaatctcctgacctcatgatccgcccgcctcagcctcccaaagtgctgggattacaggcgtgagccaccgtgcctggccttttttttttgttttttttgagacggagtttcgttcttgttgcccaagctggagtgcaatggcgcgacctcggctcactgcaacttcctcctccagggttcaagtgattctcctgcctcagcctccagagtagctgggattacaggcgcccaccaccatgcctggctcattttttgtatttttagtagcaatggggtttcaccatgttggccaagctggtctcgaactcctgacctcaggtgatccacccgcctgggcctcccaaagtactgggattacaggcatgagccaccgcacttggcctgttttgtattttttctatgagacatgcctggtggtagagagatttggactggctaacctgtttttcttttgctgccactttgtttgggttctatccaaagcaaaccttgggatcagagtttgagtgtaagctgtttatttggcagatgtagtgggttgaatggtggcccctcaaaagatatattcatgtcctaacccccgcaacctgtgaatgttacattatttagaaaaatagtttattgtcaatgtaattaagttaaggatcttgagatgagattatcctagattacccaggtgggccctaaatcccatgacaaatgtccttagaagagacagaagaggagaaggcatggacacagaggaggagaaggccgtgtgaagatggaggcagagattacagtgatgcagccacaagccaaggaagcctggagcccccagaagccagaagaggcaaagaaggattctccctagagccgtcagagtgagtgcagccctgctgccaactggattgtgagcttctggcctctagaactgcaaggaaattaatttctgttgtcttaagccaccaagtttggggtcatttgttaaggcagtcttaggagaggaatacagcaagtgattccaggaagcagaggcatggagtgggaaagtgagacgcagtgggatgcaagccaataaagggaatgctcaggggtgcatcgctgccctggggagcttctgagaggagtgagaaggccgggctatcccccagctccattcttgctggttgagggtcactcctttgggctcaatgctcaatatactcttggtctgcagagcatgctcctaaggtattgtgtgtaggattttggagtggaccaagggctctggacagagtggagtggacagcagctcctctgcccctaccctttggctgctcattgattagctgaaagccctacaggcataggtatgggaagaaaaaatgaggttcagtagatagagagtaacatactttgacacccaaaacaaattagactggtggactccagttagaatgtccaactccaagacctgatcagttcatgtatccacctctggcaaatatgtgacaggtgactcctttctgcacagcatggaaatattaatccactttctttgggatattatagttggaatatgagtttttttcaggtttattttagaatatatttgataacttcctgtttattaatattgaatggaatgttcacatgttcccattatatttgtcttacatgtaaaagctctataatcgtgcattaaatcaacctgccttgtagtataagctagaaatgctgctagatgctctgtgtggagactggatctccaatgactctggcacctcacagcacccagcacagtgtaagaaaacagcaggtgcacaataaagacatgctgttaggtttatccctctccttcctggtctctccttccagcccctgggctccatcacaatcatttccaagcagtgctcctgcagctttcatttcttgctcgtctgttatttgttgctcccagccagcaatgttcttttcttgtctcttttcttctagtctctctgggtagattcctgcagtgctttttggcacggctgggtggggaactctccgagactgtctacatcatttttcaaagctcccaccatcagacttggcatttcatatacagctttgaacactgtcaactggtgccttcaccttttcccttaatgagggctcaagggtaccctttagcacagaataaatgtacacatctgaaattgaacattaaaatgtatctgcttgttttaaaactcagtttttccttttcaggttggagaacgtcttggaaatggcatgcctttacttgtgggtttccattagggcctcctgggtatgatcctggctgtagcctccttttttcttagctatttatttctcttatgagctggaactgagagggaagaggatccggaggactaaggtagttttgttcctagccatctttggcttgaatccttttggcatcctctgataagcagaaatagcatcatctgtctctactaatggcattatcttagctggaagaagtgatttattcaaatgctctaataattatagctcacatctatcgagtgcttaccacacgccaggctcctgtgctaagtgcttggcattctttatctccattttcatcttcacaacaaccttctgaagttgctcctttatcatctccatttcacagatgaggagaccgagacttgggaagtctaagtgcatgctggaaccacacaggtagtggagctaggattcaagcccaggtctgtttgacttagaacatgtgacttagaacatgtgagttagaacatgttctgaacacaactttcagggcacatggccttggatcgcaagactccctcatcttctgctttttaaaacagttacatggagaagtgactccatgttgaaaaggcaaccacagcttctgaaagtgtccttagggaacctcactattaggagccaggtctatccaagtcagtacaaatgaagcgagggatgctggccaaggcacagggtgggctttttctgttcaggaaaacaaggttgtttttaaaaggagatttgttgaaagggacattagaaggagagtgtgaacactttggaatgtggagatggacggggagtaagacccaagcatctcacaccatttggggcagcatcaaagcttttatgagtgtcctctcccatagcaactcggcacctctgctggttcctgcctcacctgtccttcagcttgtaccaagtcatccactcaggaggcggaattgtgctttgctgtcatgaaatctctattggggaagatcaatggaaaaaggactactcagaagacagggatcagctcaaaccattcattcctggttttcatgggggtatgaggagagcagagcaaagtgtgtgtgtgtgtgtgtgtgtgtgtgtctgtgtgtctgttattgtgtgtgtctgtgtctgttattgtgtgtgtgtgtgtgtgtgtgtgtttgtagatggggtctctggctctattgcccaggctggtcttgaactcctgtactcaagagatcctcctgcctcggcctcccaaaatgctaagattataggcatgccatcacgcctggcccagagcaaagagttttgaccgctgagcatccaaggattaacaggggactgaaagcagggaagaaacgggtctctggtgcatggggtgctggggaacaaggaaagtggtggcctgaccctggtctagtcagatgggcaggtgttgccc

SEQ ID NO: 5238 - protein, 119 aa, Homo sapiens [sequence omitted]

SEQ ID NO: 5239 - DNA, 1948 bp, Homo sapiens
atatccttcatctttatgctgctccactccagctcacagcccctccaactggatggagctcttcgaagggaggggcatttcagaggagggtctcagggatagcccctttgtggggctgggccaccaggttggggagagtggagctgctggaactctggagggactggctgagccagctttcccagtgcacccctctgggagggcaggctctcggtgtaggctgcccatctcctcgctctcctctggcactgctcctatgcccccttggttagcctgggagcccatactacccagacttggggtcaataagcagaggacctgtaaggagtccttgatgggatgtacagcactgcccaaccctgcacaaggtagggtattgctgtttgttgtgtggtgagctgcctgcttatggctgggtttgggcctccatccatttttattttctttgagttggtctctgggcaaagcttctcccagcaggcggaatctggcctgggggctccagcttctctcacctgcctggcctcccaagagctagagagctccacatctcaactcatctataactcattagcagaaccatcagctagcagaaactaggaataataaaaatgtgccgtattttcacaagctggatgccaggcttggtggtcaggacacagactgctttcagctcccacatgcccctcctgctagctgctttgtgcagagtagtggctacatggctgcaggtgagagccctgcctgtgaacaggccaccaggatgctgggacatacgagttgataacccatgggctcctgagagcagagattgtgacttactcatctttgatgtagccaagttctaacaaacctaaatgtgcagccatttgtaagagaggatcatggaatgaatacgggcattgagtcaagcagtctgtgttccactggcggtgtgacctggggcaggccatttcacctcactgagccttagtttcctcacctgtaaaatgtgaaaaatatcaccttccttaccaggcttttctgaggatttaatgacatcatgttcagtgcccagtatgggtggataatacccaggagtttcctcctcttctcctcctaagttgacttgatgccccccgctgaagatcatggctgaactggctcaattcggatccaggactcctggctttgtctcttccctagttgcccaccacacccatggacacccttaggtagtttatccttttgggacaactggatttattagaaaagggtattctggggtggaataaggcccttttcagtccccatggagcctttttggaagatgaagttctcaaacccacaagagaattcataagacgagcacaccacccacagttaggtttccctctcaagtgctttatctccacgtggggcaaatagctctttgtctgcatatgttattggagcttttggagtccagccttcagaagagctctaatttttggattcatatcagtttattagagaagcctagttctaaggattagcaaatgggtaggtgctcagccagcccagaacaagcagagccatgacagaagtttctggaatctcacagagtcggtgtcttcatggactcagggggcctaaatccaatagcctggatttgtcactttcccttattcccttatcaaactcttcccttttggacatcagagaaggaaagtacttcctgtaagggggcaatttgcaaagcttcatggaagtggcatttgagtgtggccttaaaggatgtgtaggattgggaaccatagatatttagaggaaggcattcctggcagaaggaacagcagcaaaacacagaagtggaaattagtagcagcattaatggagaataatttggggaataagatatacaaatggaataataaaaatagcattaattaaacattgtgggagtcattctgtaagatggcccctggtg

SEQ ID NO: 5240 - protein, 78 aa, Homo sapiens
MCRIFTSWMPGLVVRTQTAFSSHMPLLLAALCRVVATWLQVRALPVNRPPGCWDIRVDNPWAPESRDCDLLIFDVAKF

SEQ ID NO: 5241 - DNA, 886 bp, Homo sapiens
gcccgagatggcagaacaagagctacaggtaattctgcttttccgtcccccctcaccactctcgctcgctcgcccgctcgcgccctcacctagccggaaaggtgggataagggggggcccctcacatggggcccgagctcggaggcggccgggcggcgcggagtcctcctggatcgtggcaatgggcagacacagagcagaaagtggcggacttgggcggccacagagcctttatgaccgaagatggaactgaaatgccatcctgttatcaagaaggagcataagaacagctagaggagagatgcaagattgaaatatcatggaatggactatggtttatcctctcttctggtcgtaaaacaccatcaggttgtaattgttcagatcagaaattcccaagcttttaataaagccttcagggagcctcatccaggggcaactgccctgtcattgggaataagtagagtgtgtgggaaatatgttgtccttggtaaaacctccccttaggaaagaaggcaagagaattgagtaagagaatgatgggccaaaaggagaaaatagagaaagaggctgcatgctacagagaacaagagcaaaattcaaaagcctggcacagttgggcttgaaaccatctgtgtaaaggggactaataatgctgacctcactgcatcacaaatgacagagtttaaaatgatggtgtttttaagggacctagcacgtattaagaatttaatacacattggttttcctcccttctcctagggattagggaaagcacatcactttgcttaaatgcgtataaaaaggcttcagactgcttcttaacaatgagaatctttgacagtgaatatgcaagccaaaaataaagagtggttgagaaactttg

SEQ ID NO: 5242 - protein, 81 aa, Homo sapiens
MAEQELQVILLFRPPSPLSLARPLAPSPSRKGGIRGGPSHGARARRRPGGAESSWIVAMGRHRAESGGLGRPQSLYDRRWN

SEQ ID NO: 5243 - DNA, 4913 bp, Homo sapiens
attggatcaaacatgtcacaagagtcggacaataataaaagactagtggccttagtgcccatgcccagtgaccctccattcaatacccgaagagcctacaccagtgaggatgaagcctggaagtcatacttggagaatcccctgacagcagccaccaaggccatgatgagcattaatggtgatgaggacagtgctgctgccctcggcctgctctatgactactacaaggttcctcgagacaagaggctgctgtctgtaagcaaagcaagtgacagccaagaagaccaggagaaaagaaactgccttggcaccagtgaagcccagagtaatttgagtggaggagaaaaccgagtgcaagtcctaaagactgttccagtgaacctttccctaaatcaagatcacctggagaattccaagcgggaacagtacagcatcagcttccccgagagctctgccatcatcccggtgtcgggaatcacggtggtgaaagctgaagatttcacaccagttttcatggccccacctgtgcactatccccggggagatggggaagagcaacgagtggttatctttgaacagactcagtatgacgtgccctcgctggccacccacagcgcctatctcaaagacgaccagcgcagcactccggacagcacatacagcgagagcttcaaggacgcagccacagagaaatttcggagtgcttcagttggggctgaggagtacatgtatgatcagacatcaagtggcacatttcagtacaccctggaagccaccaaatctctccgtcagaagcagggggagggccccatgacctacctcaacaaaggacagttctatgccataacactcagcgagaccggagacaacaaatgcttccgacaccccatcagcaaagtcaggagtgtggtgatggtggtcttcagtgaagacaaaaacagagatgaacagctcaaatactggaaatactggcactctcggcagcatacggcgaagcagagggtccttgacattgccgattacaaggagagctttaatacgattggaaacattgaagagattgcatataatgctgtttcctttacctgggacgtgaatgaagaggcgaagattttcatcaccgtgaattgcttgagcacagatttctcctcccaaaaaggggtgaaaggacttcctttgatgattcagattgacacatacagttataacaatcgtagcaataaacccattcatagagcttattgccagatcaaggtcttctgtgacaaaggagcagaaagaaaaatccgagatgaagagcggaagcagaacaggaagaaagggaaaggccaggcctcccaaactcaatgcaacagctcctctgatgggaagttggctgccatacctttacagaagaagagtgacatcacctacttcaaaaccatgcctgatctccactcacagccagttctcttcatacctgatgttcactttgcaaacctgcagaggaccggacaggtgtattacaacacggatgatgaacgagaaggtggcagtgtccttgttaaacggatgttccggcccatggaagaggagtttggtccagtgccttcaaagcagatgaaagaagaagggacaaagcgagtgctcttgtacgtgaggaaggagactgacgatgtgttcgatgcattgatgttgaagtctcccacagtgaagggcctgatggaagcgatatctgagaaatatgggctgcccgtggagaagatagcaaagctttacaagaaaagcaaaaaaggcatcttggtgaacatggatgacaacatcatcgagcactactcgaacgaggacaccttcatcctcaacatggagagcatggtggagggcttcaaggtcacgctcatggaaatctagccctgggtttggcatccgctttggctggagctctcagtgcgttcctccctgagagagacagaagccccagccccagaacctggagacccatctcccccatctcacaactgctgttacaagaccgtgctggggagtggggcaagggacaggccccactgtcggtgtgcttggcccatccactggcacctaccacggagctgaagcctgagcccctcaggaaggtgccttaggcctgttggattcctatttattgcccaccttttcctggagcccaggtccaggcccgccaggactctgcaggtcactgctagctccagatgagaccgtccagcgttcccccttcaagagaaacactcatcccgaacagcctaaaaaattcccatcccttctctctcacccctccatatctatctcccgagtggctggacaaaatgagctacgtctgggtgcagtagttataggtggggcaagaggtggatgcccactttctggtcagacacctttaggttgctctggggaaggctgtcttgctaaatacctccagggttcccagcaagtggccaccaggccttgtacaggaagacattcagtcaccgtgtaattagtaacacagaaagtctgcctgtctgcattgtacatagtgtttataatattgtaataatatattttacctgtggtatgtgggcatgtttactgccactggcctagaggagacacagacctggagaccgttttaatgggggtttttgcctctgtgcctgttcaagagacttgcagggctaggtagagggcctttgggatgttaaggtgactgcagctgatgccaagatggactctgcaatgggcatacctgggggctcgttccctgtccccagaggaagccccctctccttctccatgggcatgactctccttcgaggccaccacgtttatctcacaatgatgtgttttgcttgactttccctttgcgctgtctcgtgggaaaggtcattctgtctgagaccccagctccttctccagctttggctgcgggcatggcctgagctttctggagagcctctgcagggggtttgccatcagggccctgtggctgggtctgctgcagagctccttggctatcaggagaatcctggacactgtactgtgcctcccagtttacaaacacgcccttcatctcaagtggccctttaaaaggcctgctgccatgtgagagctgtgaacagctcagctctgagtcggcaggctggggcttcctcctgggccaccagatggaaagggggtattgtttgcctcactcctggatgctgcgttttaaggaagtgagtgagaaagaatgtgccaagatacctggctcctgtgaaaccagcctcaggagggaaactgggagagagaagctgtggtctcctgctacatgccctgggagctggaagagaaaaacactcccctaaacaatcgcaaaatgatgaaccatcatgggccactgttctctttgaggggacaggtttaggggtttgcgttcgcccttgtgggctgaagcactagctttttggtagctagacacatcctgcacccaaaggttctctacaaaggcccagatttgtttgtaaagcactttgactcttacctggaggcccgctctctaagggcttcctgcgctcccacctcatctgtccctgagatgcagagcaggatggagggtctgcttctagctcagctgtttctccttgaggttgcggaggaattgaattgaatgggacagagggcaggtgctgtggccaagaagatctccgagcagcagtgacggggcaccttgctgtgtgtcctctgggcatgttaacccttctgtggggccaaaggtttgcatcgtggatccagctgtgctccagtctgtcccctcctcctccactctgactgccacgccccggaccagcagcttggggaccctccagggtactaatggggctctgttctgagatggacaaattcagtgttggaaatacatgttgtactatgcacttcccatgctcctagggttaggaatagtttcaaacatgattggcagacataacaacggcaaatactcggactggggcataggactccagagtaggaaaaagacaaaagatttggcagcctgacacaggcaacctacccctctctctccagcctctttatgaaactgtttgtttgccagtcctgccctaaggcagaagatgaattgaagatgctgtgcatgtttcctaagtccttgagcaatcatggtggtgacaattgccacaagggatatgaggccagtgccaccagagggtggtgccaagtgccacatcccttccgatccattcccctctgcatcctcggagcaccccagtttgcctttgatgtgtccgctgtgtatgttagctgaactttgatgagcaaaatttcctgagcgaaacactccaaagagataggaaaacttgccgcctcttcttttttgtcccttaatcaaactcaaataagcttaaaaaaaatccatggaagatcatggacatgtgaaatgagcatttttttcttttttttttttaacaaagtctgaactgaacagaacaagactttttcctcatacatctccaaattgtttaaacttactttatgagtgtttgtttagaagttcggaccaacagaaaaatgcagtcagatgtcatcttggaattggtttctaaaagagtaaggcatgtccctgcccagaaacttaggaagcatgaaataaatcaaatgtttattttccttcttatttaaaatcatgcaaatgcaacagaaatagagggtttgtgccaaatgctatgaacggccctttcttaaagacaagcaagggagattgatatatgtacaatttgctctcatgttttaaaaaaaaaaaggtaaatgtaacttaatagttttgtaaatgggagagggggaatctataaactataaatacagttattttattttttgtacatttttaaggagaaaaaataaatattcataacataagagtaaaa

SEQ ID NO: 5244 - protein, 625 aa, Homo sapiens
MSQESDNNKRLVALVPMPSDPPFNTRRAYTSEDEAWKSYLENPLTAATKAMMSINGDEDSAAALGLLYDYYKVPRDKRLLSVSKASDSQEDQEKRNCLGTSEAQSNLSGGENRVQVLKTVPVNLSLNQDHLENSKREQYSISFPESSAIIPVSGITVVKAEDFTPVFMAPPVHYPRGDGEEQRVVIFEQTQYDVPSLATHSAYLKDDQRSTPDSTYSESFKDAATEKFRSASVGAEEYMYDQTSSGTFQYTLEATKSLRQKQGEGPMTYLNKGQFYAITLSETGDNKCFRHPISKVRSVVMVVFSEDKNRDEQLKYWKYWHSRQHTAKQRVLDIADYKESFNTIGNIEEIAYNAVSFTWDVNEEAKIFITVNCLSTDFSSQKGVKGLPLMIQIDTYSYNNRSNKPIHRAYCQIKVFCDKGAERKIRDEERKQNRKKGKGQASQTQCNSSSDGKLAAIPLQKKSDITYFKTMPDLHSQPVLFIPDVHFANLQRTGQVYYNTDDEREGGSVLVKRMFRPMEEEFGPVPSKQMKEEGTKRVLLYVRKETDDVFDALMLKSPTVKGLMEAISEKYGLPVEKIAKLYKKSKKGILVNMDDNIIEHYSNEDTFILNMESMVEGFKVTLMEI

SEQ ID NO: 5245 - DNA, 870 bp, Homo sapiens
gtcacaagagtcggacaagtaagtggatcacacgcgccggctgctgctactactaccactttgggctgatggcaactgtaataaaagactagtggccttagtgcccatgcccagtgaccctccattcaatacccgaagagcctacaccagtgaggatgaagcctggaagtcatacttggagaatcccctgacagcagccaccaaggccatgatgagcattaatggtgatgaggacagtgctgctgccctcggcctgctctatgactactacaaggttcctcgagacaagaggctgctgtctgtaagcaaagcaagtgacagccaagaagaccaggagaaaaggtaaaggaatttgcctggcccccagaataactctatgttttctaaaaaacaatgttattaaactgtatgttttgttcttgagaggagatggggtcaagaagcttagcatcatctatctgtcttttgagtctggaccaatgctagatctctcaatgaggagagcaaattgcatgtttggttgtgcatccaaagggtctctccaccctcttcagatacccctcttcagattccaaggaggcttaaaatcctgagtcagaggtgagatgctggtaagatagcccattgctgggattaacttttctgatcaatcctatggcattataactgcaattaggcccctcaggaagtgagacacttgaaggattgcttttgatgatcagggaaggggaaagaaaggaggttgggctctttctcagccaagggaggcataggtggaggcgactgtaagggctatcgctgtcagggtgaaggggcaggacagctgcaggagatcaccatggaacaccccttgtctgccctcctcaatca

SEQ ID NO: 5246 - protein, 79 aa, Homo sapiens
MPSDPPFNTRRAYTSEDEAWKSYLENPLTAATKAMMSINGDEDSAAALGLLYDYYKVPRDKRLLSVSKASDSQEDQEKR

SEQ ID NO: 5247 - DNA, 1204 bp, Homo sapiens
aaaataaaaagacggctgtatataacatattgggtaatgcagaccaaattaagtgttttgccttgtttaaatgaaatgcatgtttagtgagcactaatacaatcttattccagaagactgtttttagtagcttattgtgaagtaagacaactataatgaatgtctgtcttgtttggaagtcatatctgtctttgcacaaatgtaccaatcgacaagtatattttatatattccataaaaatacaaagtaaccctgactagggcccaactttaattttgaatgcatttccagagtggccatgcctagagggcagatgcagagcaggtggtagtgggacaggacaattggagcacaggaatgttaacatgtatgacaggggaccagtagggtggtttccctctcaggcccagcagcccattgacagcattagactggcggcatggtgcttttctgagcagatcaatactctgcagactcgaaaaaacatcacatacattcttggaacttcccagtggtttaatctatgtgcatggttagggagccaggtctggaatattcagtttccctgcccctgttaaagaatcagaggttgggcagtcatcaaattcatcataaagacatgggcaagtgtgtctgtggtttccaaggcccccctatggagaatccaaaagtattttccattgccgtgctctttgaatgcagacttgtatagaaatagtccctgtcctggcctgccactgaccctgtctgtattttctcggaggttgtttttctccttctccttcccaggaaggtctttgtatgtcgaatccagtgcactcaagtttggccaagggactccacagcacccagaagactgcatgcctcaaggtttatgtcactcctctgctgggctgttcattgtcattgctgtgttcagggacctttggaaataaaacctgttctgtcccaaataaaaccagcctgtgatgttcaagggactggaataaagtggcttacgacctgaaggattctacagagtgctcaactgttcatacatcattcagagtgggagggagctgggggtgctgtcccatcccatctgtatgcccacggtggatttaataatatataatttataaatcatagcctatggagtggcccgtaaatcagttgactgtgtagctcttgcctggcattaaagcatgtttttggtttaacatga

SEQ ID NO: 5248 - protein, 62 aa, Homo sapiens [sequence omitted]

SEQ ID NO: 5249 - DNA, 1922 bp, Homo sapiens
cttgttgcctattgtgataaaataaaaagacggctgtatataacatattgggtaatgcagaccaaattaagtgttttgccttgtttaaatgaaatgcatgtttagtgagcactaatacaatcttattccagaagactgtttttagtagcttattgtgaagtaagacaactataatgaatgtctgtcttgtttggaagtcatatctgtctttgcacaaatgtaccaatcgacaagtatattttatatattccataaaaatacaaagtaaccctgactagggcccaactttaattttgaatgcatttccagagtggccatgcctagagggcagatgcagagcaggtggtagtgggacaggacaattggagcacaggaatgttaacatgtatgacaggggaccagtagggtggtttccctctcaggcccagcagcccattgacagcattagactggcggcatggtgcttttctgagcagatcaatactctgcagactcgaaaaaacatcacatacattcttggaacttcccagtggtttaatctatgtgcatggttagggagccaggtctggaatattcagtttccctgcccctgttaaagaatcagaggttgggcagtcatcaaattcatcataaagacacactaatttgaattgaaagctaagagtaaaaatttgctggttacaggcgagtcatactcttgcaagtagttagcaaagggaggcccaaattctcaaggttgttgatggggaacttgccactaagagaaggcagagaggtccctagtgggtatatttgctgccaagccacttgccaaagaagaggaaccacagaaagagagacatcatgaccaggagaaaaatgtgactagacatgctaacctccaggtttttatatatgacttgagtctgctgtaattggcagcagaaatccaaatttgtatggtagaccaaaaagaaccaaatccatagggtgaaattttgagacctagactctgtaaaaataatcctagtcttcctccaggggtcagttcctcacagtggttctgtaccaaaacttgccaaattcctccatggccaagtgttaaaatctgtgtttggaaaatagcgaattaacctaagacacagaaggcagactgggtgaggagacctagcatgccctattggcagtgctcaggagctgcatcccacttttccctgctctgaatcgaagtcctagttccttcctttgattctcctttggtaggtggaatcagttaatgttttgagaaacctgcctgggctctgcccttagtcatgacatctcgctgagccagacccactctgttccttggaacctagagctggagtgaggagtagaggtctccggctattccagaaagaaaagtgagccacatgcaggctgatgaatgccgacacttccagaatgtatagaaatagtccctgtcctggcctgccactgaccctgtctgtattttctcggaggttgtttttctccttctccttcccaggaaggtctttgtatgtcgaatccagtgcactcaagtttggccaagggactccacagcacccagaagactgcatgcctcaaggtttatgtcactcctctgctgggctgttcattgtcattgctgtgttcagggacctttggaaataaaacctgttctgtcccaaataaaaccagcctgtgatgttcaagggactggaataaagtggcttacgacctgaaggattctacagagtgctcaactgttcatacatcattcagagtgggagggagctgggggtgctgtcccatcccatctgtatgcccacggtggatttaataatatataatttataaatcatagcctatggagtggcccgtaaatcagttgactgtgtagctcttgcctggcattaaagcatgtttttggtttaacatga

SEQ ID NO: 5250 - protein, 35 aa, Homo sapiens
MCMVREPGLEYSVSLPLLKNQRLGSHQIHHKDTLI

SEQ ID NO: 5251 - DNA, 1048 bp, Homo sapiens
gaccaaattaagtgttttgccttgtttaaatgaaatgcatgtttagtgagcactaatacaatcttattccagaagactgtttttagtagcttattgtgaagtaagacaactataatgaatgtctgtcttgtttggaagtcatatctgtctttgcacaaatgtaccaatcgacaagtatattttatatattccataaaaatacaaagtaaccctgactagggcccaactttaattttgaatgcatttccagagtggccatgcctagagggcagatgcagagcaggtggtagtgggacaggacaattggagcacaggaatgttaacatgtatgacaggggaccagtagggtggtttccctctcaggcccagcagcccattgacagcattagactggcggcatggtgcttttctgagcagatcaatactctgcagactcgaaaaaacatcacatacattcttggaacttcccagtggtttaatctatgtgcatggttagggagccagaaaagtgagccacatgcaggctgatgaatgccgacacttccagaatgtatagaaatagtccctgtcctggcctgccactgaccctgtctgtattttctcggaggttgtttttctccttctccttcccaggaaggtctttgtatgtcgaatccagtgcactcaagtttggccaagggactccacagcacccagaagactgcatgcctcaaggtttatgtcactcctctgctgggctgttcattgtcattgctgtgttcagggacctttggaaataaaacctgttctgtcccaaataaaaccagcctgtgatgttcaagggactggaataaagtggcttacgacctgaaggattctacagagtgctcaactgttcatacatcattcagagtgggagggagctgggggtgctgtcccatcccatctgtatgcccacggtggatttaataatatataatttataaatcatagcctatggagtggcccgtaaatcagttgactgtgtagctcttgcctggcattaaagcatgtttttggtttaacatga

SEQ ID NO: 5252 - protein, 67 aa, Homo sapiens [sequence omitted]

SEQ ID NO: 5253 - DNA, 4464 bp, Homo sapiens
tgttaggaacttctggcagggttggtcctgagcaagactgtaaagcagctcaggtgaagcttcagtgtctttttctgctctcacctttcccatttggaggcgactcccctcagctgctttcctttctctgtcctctgcacctgccttgctgcccctagagctccagaactctctgaaattttctgcctactccctggcaaaatctattttttctaaaaattgtccccagggccaagatgcccaaagtgactctgattagcaaagtcatgatctggggataaaaacaatgacttttcattcctcttcccaaataaaaactacctttgaccacagaggtcaaagggcccttactgagtcccatgtggaggtcacaggcatggggtgatagtttcagtagtgcttacaaaactccacagaatcctctttcgcccatcagatctcatagctgtacccagtttagctcaggcctgaggatgcataataattcagagctctgatggcaggtggtttccatctcaggactgcctggaagcttgctgagaaggaacttgagaccattgtcacacacagggagaaaagcactggaatggactagaagtctgcctggggaaacatgtggcatgcacttacagagtgttacatgtctgtcatccttgaggagtcattgtggactctcaagggtccatgataggcatccacttgcctctctagcctgaagaatgtcatctgcagccttgctcctcaaagtgggaaccttgcttttcaaagcagcgtcttcagaacagcagcatcagcatcacaccggagcttattaaaaatacagactctcagccccacccctttcccccacactacccaatcagattctgcattttaacaagattcccaggggatttgtatgcacataaacaatggagacggctaggagaggtggcgcatgtctgtaatcccagcactttgggaggctgagggaggagaagcttgagcccaggagttcgagaccagcttgggcaacataatgagaccttgtctgtacagaaaaaaaaaaaaaaaaaaaaaaaaaaaaaaaaacgccctgtgtggtggggagtacctctagtcccagctgctgctcaggagactgaggtgggaggattgcttgagcctatgaaatggagcctgcagtgagccgtaagcgtgccactacactccagcctgggtgacagaatgagaccctgtctcaaaaaacaatcaaaaaacattggagacacaggggtctactgggtcttcctgctggttgtccctcctgaaggtcctcactggaggagaacaagctttgtgggcccggcttcttctacctgtgcctccacatcttataccaatcaataggggtaggactaggtccaatgcggatggggacattcccttcagcccgcatttgggaggtttaatgataggtctattgtgtgccatactgtttttctgtcttaccaccatgtcgcttctgtccccaggcaatctataagatggtttcctctgtaatgaaaatgcctgaagatgagtcaaccccagagaaaagaacagaaaagatcttccgccagatggacaccaatagagacggaaaactctccctggaagagttcatccgaggagccaaaagcgacccgtccattgtgcgcctcctgcagtgcgacccgagcagtgccggccagttctgagccctgcgcccaccaatcgaattgtagagctgcttgtgttcccttttgattcttctttttaacaatttttttttttttttgccaaacaatatcaatggtgatgccgtcccctgtgcggtctgatgcgccttcctccgtgacgccttcagcttcttttgtcgtggatgcttcgtgggaatgcccagagccccagtgtgcttgtggagagcatggacagacttcgtggtgttcattgtttgatgatttttaatcgttactattatttttttttattctaatgtctctgttctaaaacgtaagactcgggggttggggcaaaagaagggaaacccatccagtcctgtgattctattgcaagcttcaaggggcttttgtttgaaagacaaaactccccacctgaatctgttgtcacacgtgccgtaggggtgatggatggcaccggatgctggattccccaagaacaagttaccctctggggtgaggctattccagcgagctgggacatttccccatgggggcccactcccctctcttccccagcaggctgtagtttctaagctgtgaacatttcaagataaattaacagaggagaggaaaaagatggctcagctattttttcacaggtttacactagttgagctaatatgcgtgtctttggaaattaaacacaaatggtaacatattccaaaaccagacccatcttgttgcctattgtgataaaataaaaagacggctgtatataacatattgggtaatgcagaccaaattaagtgttttgccttgtttaaatgaaatgcatgtttagtgagcactaatacaatcttattccagaagactgtttttagtagcttattgtgaagtaagacaactataatgaatgtctgtcttgtttggaagtcatatctgtctttgcacaaatgtaccaatcgacaagtatattttatatattccataaaaatacaaagtaaccctgactagggcccaactttaattttgaatgcatttccagagtggccatgcctagagggcagatgcagagcaggtggtagtgggacaggacaattggagcacaggaatgttaacatgtatgacaggggaccagtagggtggtttccctctcaggcccagcagcccattgacagcattagactggcggcatggtgcttttctgagcagatcaatactctgcagactcgaaaaaacatcacatacattcttggaacttcccagtggtttaatctatgtgcatggttagggagccaggtctggaatattcagtttccctgcccctgttaaagaatcagaggttgggcagtcatcaaattcatcataaagacatgggcaagtgtgtctgtggtttccaaggcccccctatggagaatccaaaagtattttccattgccgtgctctttgaatgcagacttctatttccagaagtgacagcacaagtctgagttgctgtttggtctggtgacctcagacacactaatttgaattgaaagctaagagtaaaaatttgctggttacaggcgagtcatactcttgcaagtagttagcaaagggaggcccaaattctcaaggttgttgatggggaacttgccactaagagaaggcagagaggtccctagtgggtatatttgctgccaagccacttgccaaagaagaggaaccacagaaagagagacatcatgaccaggagaaaaatgtgactagacatgctaacctccaggtttttatatatgacttgagtctgctgtaattggcagcagaaatccaaatttgtatggtagaccaaaaagaaccaaatccatagggtgaaattttgagacctagactctgtaaaaataatcctagtcttcctccaggggtcagttcctcacagtggttctgtaccaaaacttgccaaattcctccatggccaagtgttaaaatctgtgtttggaaaatagcgaattaacctaagacacagaaggcagactgggtgaggagacctagcatgccctattggcagtgctcaggagctgcatcccacttttccctgctctgaatcgaagtcctagttccttcctttgattctcctttggtaggtggaatcagttaatgttttgagaaacctgcctgggctctgcccttagtcatgacatctcgctgagccagacccactctgttccttggaacctagagctggagtgaggagtagaggtctccggctattccagaaagaaaagtgagccacatgcaggctgatgaatgccgacacttccagaatgtatagaaatagtccctgtcctggcctgccactgaccctgtctgtattttctcggaggttgtttttctccttctccttcccaggaaggtctttgtatgtcgaatccagtgcactcaagtttggccaagggactccacagcacccagaagactgcatgcctcaaggtttatgtcactcctctgctgggctgttcattgtcattgctgtgttcagggacctttggaaataaaacctgttctgtcccaaataaaaccagcctgtgatgttcaagggactggaataaagtggcttacgacctgaaggattctacagagtgctcaactgttcatacatcattcagagtgggagggagctgggggtgctgtcccatcccatctgtatgcccacggtggatttaataatatataatttataaatcatagcctatggagtggcccgtaaatcagttgactgtgtagctcttgcctggcattaaagcatgtttttggtttaacatga

SEQ ID NO: 5254 - protein, 69 aa, Homo sapiens
MSQPQRKEQKRSSARWTPIETENSPWKSSSEEPKATRPLCASCSATRAVPASSEPCAHQSNCRAACVPF

SEQ ID NO: 5255 - DNA, 3339 bp, Homo sapiens
gtcaaaggcttgtgagaatctggtggatgctggaccttgctgctgctgctactgctgtttccaggggctgcagagcatggactgttaaatcttgcacttcttctgagtgagctgaattcttgccgccaggatggggaaacagaacagcaagctgcgcccggaggtcatgcaggacttgctggaaagcacagactttacagagcatgagatccaggaatggtataaaggcttcttgagagactgccccagtggacatttgtcaatggaagagtttaagaaaatatatgggaactttttcccttatggggatgcttccaaatttgcagagcatgtcttccgcaccttcgatgcaaatggagatgggacaatagactttagagaattcatcatcgccttgagtgtaacttcgagggggaagctggagcagaagctgaaatgggccttcagcatgtacgacctggacggaaatggctatatcagcaaggcagagatgctagagatcgtgcaggcaatctataagatggtttcctctgtaatgaaaatgcctgaagatgagtcaaccccagagaaaagaacagaaaagatcttccgccagatggacaccaatagagacggaaaactctccctggaagagttcatccgaggagccaaaagcgacccgtccattgtgcgcctcctgcagtgcgacccgagcagtgccggccagttctgagccctgcgcccaccaatcgaattgtagagctgcttgtgttcccttttgattcttctttttaacaatttttttttttttttgccaaacaatatcaatggtgatgccgtcccctgtgcggtctgatgcgccttcctccgtgacgccttcagcttcttttgtcgtggatgcttcgtgggaatgcccagagccccagtgtgcttgtggagagcatggacagacttcgtggtgttcattgtttgatgatttttaatcgttactattatttttttttattctaatgtctctgttctaaaacgtaagactcgggggttggggcaaaagaagggaaacccatccagtcctgtgattctattgcaagcttcaaggggcttttgtttgaaagacaaaactccccacctgaatctgttgtcacacgtgccgtaggggtgatggatggcaccggatgctggattccccaagaacaagttaccctctggggtgaggctattccagcgagctgggacatttccccatgggggcccactcccctctcttccccagcaggctgtagtttctaagctgtgaacatttcaagataaattaacagaggagaggaaaaagatggctcagctattttttcacaggtttacactagttgagctaatatgcgtgtctttggaaattaaacacaaatggtaacatattccaaaaccagacccatcttgttgcctattgtgataaaataaaaagacggctgtatataacatattgggtaatgcagaccaaattaagtgttttgccttgtttaaatgaaatgcatgtttagtgagcactaatacaatcttattccagaagactgtttttagtagcttattgtgaagtaagacaactataatgaatgtctgtcttgtttggaagtcatatctgtctttgcacaaatgtaccaatcgacaagtatattttatatattccataaaaatacaaagtaaccctgactagggcccaactttaattttgaatgcatttccagagtggccatgcctagagggcagatgcagagcaggtggtagtgggacaggacaattggagcacaggaatgttaacatgtatgacaggggaccagtagggtggtttccctctcaggcccagcagcccattgacagcattagactggcggcatggtgcttttctgagcagatcaatactctgcagactcgaaaaaacatcacatacattcttggaacttcccagtggtttaatctatgtgcatggttagggagccaggtctggaatattcagtttccctgcccctgttaaagaatcagaggttgggcagtcatcaaattcatcataaagacatgggcaagtgtgtctgtggtttccaaggcccccctatggagaatccaaaagtattttccattgccgtgctctttgaatgcagacttctatttccagaagtgacagcacaagtctgagttgctgtttggtctggtgacctcagacacactaatttgaattgaaagctaagaccacttgccaaagaagaggaaccacagaaagagagacatcatgaccaggagaaaaatgtgactagacatgctaacctccaggtttttatatatgacttgagtctgctgtaattggcagcagaaatccaaatttgtatggtagaccaaaaagaaccaaatccatagggtgaaattttgagacctagactctgtaaaaataatcctagtcttcctccaggggtcagttcctcacagtggttctgtaccaaaacttgccaaattcctccatggccaagtgttaaaatctgtgtttggaaaatagcgaattaacctaagacacagaaggcagactgggtgaggagacctagcatgccctattggcagtgctcaggagctgcatcccacttttccctgctctgaatcgaagtcctagttccttcctttgattctcctttggtaggtggaatcagttaatgttttgagaaacctgcctgggctctgcccttagtcatgacatctcgctgagccagacccactctgttccttggaacctagagctggagtgaggagtagaggtctccggctattccagaaagaaaagtgagccacatgcaggctgatgaatgccgacacttccagaatgtatagaaatagtccctgtcctggcctgccactgaccctgtctgtattttctcggaggttgtttttctccttctccttcccaggaaggtctttgtatgtcgaatccagtgcactcaagtttggccaagggactccacagcacccagaagactgcatgcctcaaggtttatgtcactcctctgctgggctgttcattgtcattgctgtgttcagggacctttggaaataaaacctgttctgtcccaaataaaaccagcctgtgatgttcaagggactggaataaagtggcttacgacctgaaggattctacagagtgctcaactgttcatacatcattcagagtgggagggagctgggggtgctgtcccatcccatctgtatgcccacggtggatttaataatatataatttataaatcatagcctatggagtggcccgtaaatcagttgactgtgtagctcttgcctggcattaaagcatgtttttggtttaacatga

SEQ ID NO: 5256 - protein, 193 aa, Homo sapiens [sequence omitted]

SEQ ID NO: 5257 - DNA, 3668 bp, Homo sapiens
agacgctgggagcggccgaggcgagatcctatcattattttaaaattcctcctcctccacgaagtccttcctgattccttcaaagaaatatcactcctccgaattcccagagtgatttcttctgacttgagcctgcagtgtgctgtgagagatctaccactagattatctcaactttggtctcctgggaccactcgttgctgacagtcagaaattgcaaggcatctgatctcctggtgttaaaatctgtcgtgataccgaggaaggccccgagatcccaggcactgagtgactgcatactctgaattcttgccgccaggatggggaaacagaacagcaagctgcgcccggaggtcatgcaggacttgctggaaagcacagactttacagagcatgagatccaggaatggtataaaggcttcttgagagactgccccagtggacatttgtcaatggaagagtttaagaaaatatatgggaactttttcccttatggggatgcttccaaatttgcagagcatgtcttccgcaccttcgatgcaaatggagatgggacaatagactttagagaattcatcatcgccttgagtgtaacttcgagggggaagctggagcagaagctgaaatgggccttcagcatgtacgacctggacggaaatggctatatcagcaaggcagagatgctagagatcgtgcaggcaatctataagatggtttcctctgtaatgaaaatgcctgaagatgagtcaaccccagagaaaagaacagaaaagatcttccgccagatggacaccaatagagacggaaaactctccctggaagagttcatccgaggagccaaaagcgacccgtccattgtgcgcctcctgcagtgcgacccgagcagtgccggccagttctgagccctgcgcccaccaatcgaattgtagagctgcttgtgttcccttttgattcttctttttaacaatttttttttttttttgccaaacaatatcaatggtgatgccgtcccctgtgcggtctgatgcgccttcctccgtgacgccttcagcttcttttgtcgtggatgcttcgtgggaatgcccagagccccagtgtgcttgtggagagcatggacagacttcgtggtgttcattgtttgatgatttttaatcgttactattatttttttttattctaatgtctctgttctaaaacgtaagactcgggggttggggcaaaagaagggaaacccatccagtcctgtgattctattgcaagcttcaaggggcttttgtttgaaagacaaaactccccacctgaatctgttgtcacacgtgccgtaggggtgatggatggcaccggatgctggattccccaagaacaagttaccctctggggtgaggctattccagcgagctgggacatttccccatgggggcccactcccctctcttccccagcaggctgtagtttctaagctgtgaacatttcaagataaattaacagaggagaggaaaaagatggctcagctattttttcacaggtttacactagttgagctaatatgcgtgtctttggaaattaaacacaaatggtaacatattccaaaaccagacccatcttgttgcctattgtgataaaataaaaagacggctgtatataacatattgggtaatgcagaccaaattaagtgttttgccttgtttaaatgaaatgcatgtttagtgagcactaatacaatcttattccagaagactgtttttagtagcttattgtgaagtaagacaactataatgaatgtctgtcttgtttggaagtcatatctgtctttgcacaaatgtaccaatcgacaagtatattttatatattccataaaaatacaaagtaaccctgactagggcccaactttaattttgaatgcatttccagagtggccatgcctagagggcagatgcagagcaggtggtagtgggacaggacaattggagcacaggaatgttaacatgtatgacaggggaccagtagggtggtttccctctcaggcccagcagcccattgacagcattagactggcggcatggtgcttttctgagcagatcaatactctgcagactcgaaaaaacatcacatacattcttggaacttcccagtggtttaatctatgtgcatggttagggagccaggtctggaatattcagtttccctgcccctgttaaagaatcagaggttgggcagtcatcaaattcatcataaagacatgggcaagtgtgtctgtggtttccaaggcccccctatggagaatccaaaagtattttccattgccgtgctctttgaatgcagacttctatttccagaagtgacagcacaagtctgagttgctgtttggtctggtgacctcagacacactaatttgaattgaaagctaagagtaaaaatttgctggttacaggcgagtcatactcttgcaagtagttagcaaagggaggcccaaattctcaaggttgttgatggggaacttgccactaagagaaggcagagaggtccctagtgggtatatttgctgccaagccacttgccaaagaagaggaaccacagaaagagagacatcatgaccaggagaaaaatgtgactagacatgctaacctccaggtttttatatatgacttgagtctgctgtaattggcagcagaaatccaaatttgtatggtagaccaaaaagaaccaaatccatagggtgaaattttgagacctagactctgtaaaaataatcctagtcttcctccaggggtcagttcctcacagtggttctgtaccaaaacttgccaaattcctccatggccaagtgttaaaatctgtgtttggaaaatagcgaattaacctaagacacagaaggcagactgggtgaggagacctagcatgccctattggcagtgctcaggagctgcatcccacttttccctgctctgaatcgaagtcctagttccttcctttgattctcctttggtaggtggaatcagttaatgttttgagaaacctgcctgggctctgcccttagtcatgacatctcgctgagccagacccactctgttccttggaacctagagctggagtgaggagtagaggtctccggctattccagaaagaaaagtgagccacatgcaggctgatgaatgccgacacttccagaatgtatagaaatagtccctgtcctggcctgccactgaccctgtctgtattttctcggaggttgtttttctccttctccttcccaggaaggtctttgtatgtcgaatccagtgcactcaagtttggccaagggactccacagcacccagaagactgcatgcctcaaggtttatgtcactcctctgctgggctgttcattgtcattgctgtgttcagggacctttggaaataaaacctgttctgtcccaaataaaaccagcctgtgatgttcaagggactggaataaagtggcttacgacctgaaggattctacagagtgctcaactgttcatacatcattcagagtgggagggagctgggggtgctgtcccatcccatctgtatgcccacggtggatttaataatatataatttataaatcatagcctatggagtggcccgtaaatcagttgactgtgtagctcttgcctggcattaaagcatgtttttggtttaacatga

SEQ ID NO: 5258 - protein, 193 aa, Homo sapiens [sequence omitted]

SEQ ID NO: 5259 - DNA, 3508 bp, Homo sapiens
gcccgaagcgacacagacgctgggagcggccgaggcgagtgatttcttctgacttgagcctgcagtgtgctgtgagagatctaccactagattatctcaactttggtctcctgggaccactcgttgctgacagtcagaaactgaattcttgccgccaggatggggaaacagaacagcaagctgcgcccggaggtcatgcaggacttgctggaaagcacagactttacagagcatgagatccaggaatggtataaaggcttcttgagagactgccccagtggacatttgtcaatggaagagtttaagaaaatatatgggaactttttcccttatggggatgcttccaaatttgcagagcatgtcttccgcaccttcgatgcaaatggagatgggacaatagactttagagaattcatcatcgccttgagtgtaacttcgagggggaagctggagcagaagctgaaatgggccttcagcatgtacgacctggacggaaatggctatatcagcaaggcagagatgctagagatcgtgcaggcaatctataagatggtttcctctgtaatgaaaatgcctgaagatgagtcaaccccagagaaaagaacagaaaagatcttccgccagatggacaccaatagagacggaaaactctccctggaagagttcatccgaggagccaaaagcgacccgtccattgtgcgcctcctgcagtgcgacccgagcagtgccggccagttctgagccctgcgcccaccaatcgaattgtagagctgcttgtgttcccttttgattcttctttttaacaatttttttttttttttgccaaacaatatcaatggtgatgccgtcccctgtgcggtctgatgcgccttcctccgtgacgccttcagcttcttttgtcgtggatgcttcgtgggaatgcccagagccccagtgtgcttgtggagagcatggacagacttcgtggtgttcattgtttgatgatttttaatcgttactattatttttttttattctaatgtctctgttctaaaacgtaagactcgggggttggggcaaaagaagggaaacccatccagtcctgtgattctattgcaagcttcaaggggcttttgtttgaaagacaaaactccccacctgaatctgttgtcacacgtgccgtaggggtgatggatggcaccggatgctggattccccaagaacaagttaccctctggggtgaggctattccagcgagctgggacatttccccatgggggcccactcccctctcttccccagcaggctgtagtttctaagctgtgaacatttcaagataaattaacagaggagaggaaaaagatggctcagctattttttcacaggtttacactagttgagctaatatgcgtgtctttggaaattaaacacaaatggtaacatattccaaaaccagacccatcttgttgcctattgtgataaaataaaaagacggctgtatataacatattgggtaatgcagaccaaattaagtgttttgccttgtttaaatgaaatgcatgtttagtgagcactaatacaatcttattccagaagactgtttttagtagcttattgtgaagtaagacaactataatgaatgtctgtcttgtttggaagtcatatctgtctttgcacaaatgtaccaatcgacaagtatattttatatattccataaaaatacaaagtaaccctgactagggcccaactttaattttgaatgcatttccagagtggccatgcctagagggcagatgcagagcaggtggtagtgggacaggacaattggagcacaggaatgttaacatgtatgacaggggaccagtagggtggtttccctctcaggcccagcagcccattgacagcattagactggcggcatggtgcttttctgagcagatcaatactctgcagactcgaaaaaacatcacatacattcttggaacttcccagtggtttaatctatgtgcatggttagggagccaggtctggaatattcagtttccctgcccctgttaaagaatcagaggttgggcagtcatcaaattcatcataaagacatgggcaagtgtgtctgtggtttccaaggcccccctatggagaatccaaaagtattttccattgccgtgctctttgaatgcagacttctatttccagaagtgacagcacaagtctgagttgctgtttggtctggtgacctcagacacactaatttgaattgaaagctaagagtaaaaatttgctggttacaggcgagtcatactcttgcaagtagttagcaaagggaggcccaaattctcaaggttgttgatggggaacttgccactaagagaaggcagagaggtccctagtgggtatatttgctgccaagccacttgccaaagaagaggaaccacagaaagagagacatcatgaccaggagaaaaatgtgactagacatgctaacctccaggtttttatatatgacttgagtctgctgtaattggcagcagaaatccaaatttgtatggtagaccaaaaagaaccaaatccatagggtgaaattttgagacctagactctgtaaaaataatcctagtcttcctccaggggtcagttcctcacagtggttctgtaccaaaacttgccaaattcctccatggccaagtgttaaaatctgtgtttggaaaatagcgaattaacctaagacacagaaggcagactgggtgaggagacctagcatgccctattggcagtgctcaggagctgcatcccacttttccctgctctgaatcgaagtcctagttccttcctttgattctcctttggtaggtggaatcagttaatgttttgagaaacctgcctgggctctgcccttagtcatgacatctcgctgagccagacccactctgttccttggaacctagagctggagtgaggagtagaggtctccggctattccagaaagaaaagtgagccacatgcaggctgatgaatgccgacacttccagaatgtatagaaatagtccctgtcctggcctgccactgaccctgtctgtattttctcggaggttgtttttctccttctccttcccaggaaggtctttgtatgtcgaatccagtgcactcaagtttggccaagggactccacagcacccagaagactgcatgcctcaaggtttatgtcactcctctgctgggctgttcattgtcattgctgtgttcagggacctttggaaataaaacctgttctgtcccaaataaaaccagcctgtgatgttcaagggactggaataaagtggcttacgacctgaaggattctacagagtgctcaactgttcatacatcattcagagtgggagggagctgggggtgctgtcccatcccatctgtatgcccacggtggatttaataatatataatttataaatcatagcctatggagtggcccgtaaatcagttgactgtgtagctcttgcctggcattaaagcatgtttttggtttaacatga

SEQ ID NO: 5260 - protein, 193 aa, Homo sapiens [sequence omitted]

SEQ ID NO: 5261 - DNA, 503 bp, Homo sapiens
gccaaacaatatcaatggtgatgccgtcccctgtgcggtctgatgcgccttcctccgtgacgccttcagcttcttttgtcgtggatgcttcgtgggaatgcccagagccccagtgtgcttgtggagagcatggacagacttcgtggtgttcattgtttgatgatttttaatcgttactattatttttttttattctaatgtctctgttctaaaacgtaagactcgggggttggggcaaaagaagggaaacccatccagtcctcctgtgatgttcaagggactggaataaagtggcttacgacctgaaggattctacagagtgctcaactgttcatacatcattcagagtgggagggagctgggggtgctgtcccatcccatctgtatgcccacggtggatttaataatatataatttataaatcatagcctatggagtggcccgtaaatcagttgactgtgtagctcttgcctggcattaaagcatgtttttggtttaacatg

SEQ ID NO: 5262 - protein, 51 aa, Homo sapiens [sequence omitted]

SEQ ID NO: 5263 - DNA, 1732 bp, Homo sapiens
cttgttgcctattgtgataaaataaaaagacggctgtatataacatattgggtaatgcagaccaaattaagtgttttgccttgtttaaatgaaatgcatgtttagtgagcactaatacaatcttattccagaagactgtttttagtagcttattgtgaagtaagacaactataatgaatgtctgtcttgtttggaagtcatatctgtctttgcacaaatgtaccaatcgacaagtatattttatatattccataaaaatacaaagtaaccctgactagggcccaactttaattttgaatgcatttccagagtggccatgcctagagggcagatgcagagcaggtggtagtgggacaggacaattggagcacaggaatgttaacatgtatgacaggggaccagtagggtggtttccctctcaggcccagcagcccattgacagcattagactggcggcatggtgcttttctgagcagatcaatactctgcagactcgaaaaaacatcacatacattcttggaacttcccagtggtttaatctatgtgcatggttagggagccaggtctggaatattcagtttccctgcccctgttaaagaatcagaggttgggcagtcatcaaattcatcataaagacacactaatttgaattgaaagctaagagtaaaaatttgctggttacaggcgagtcatactcttgcaagtagttagcaaagggaggcccaaattctcaaggttgttgatggggaacttgccactaagagaaggcagagaggtccctagtgggtatatttgctgccaagccacttgccaaagaagaggaaccacagaaagagagacatcatgaccaggagaaaaatgtgactagacatgctaacctccaggtttttatatatgacttgagtctgctgtaattggcagcagaaatccaaatttgtatggtagaccaaaaagaaccaaatccatagggtgaaattttgagacctagactctgtaaaaataatcctagtcttcctccaggggtcagttcctcacagtggttctgtaccaaaacttgccaaattcctccatggccaagtgttaaaatctgtgtttggaaaatagcgaattaacctaagacacagaaggcagactgggtgaggagacctagcatgccctattggcagtgctcaggagctgcatcccacttttccctgctctgaatcgaagtcctagttccttcctttgattctcctttggtaggtggaatcagttaatgttttgagaaacctgcctgggctctgcccttagtcatgacatctcgctgagccagacccactctgttccttggaacctagagctggagtgaggagtagaggtctccggctattccagaaagaaaagtgagccacatgcaggctgatgaatgccgacacttccagaatgtatagaaatagtccctgtcctggcctgccactgaccctgtctgtattttctcggaggttgtttttctccttctccttcccaggaaggtctttgtatgtcgaatccagtgcactcaagtttggccaagggactccacagcacccagaagactgcatgcctcaaggtttatgtcactcctctgctgggctgttcattgtcattgctgtgttcagggacctttggaaataaaacctgttctgtcccaaataaaaccagcctgtgatgttcaagggactggaataaagtggcttacgacctgaaggattct

SEQ ID NO: 5264 - protein, 35 aa, Homo sapiens; identical to SEQ ID NO: 5250

SEQ ID NO: 5265 - DNA, 4274 bp, Homo sapiens
tgttaggaacttctggcagggttggtcctgagcaagactgtaaagcagctcaggtgaagcttcagtgtctttttctgctctcacctttcccatttggaggcgactcccctcagctgctttcctttctctgtcctctgcacctgccttgctgcccctagagctccagaactctctgaaattttctgcctactccctggcaaaatctattttttctaaaaattgtccccagggccaagatgcccaaagtgactctgattagcaaagtcatgatctggggataaaaacaatgacttttcattcctcttcccaaataaaaactacctttgaccacagaggtcaaagggcccttactgagtcccatgtggaggtcacaggcatggggtgatagtttcagtagtgcttacaaaactccacagaatcctctttcgcccatcagatctcatagctgtacccagtttagctcaggcctgaggatgcataataattcagagctctgatggcaggtggtttccatctcaggactgcctggaagcttgctgagaaggaacttgagaccattgtcacacacagggagaaaagcactggaatggactagaagtctgcctggggaaacatgtggcatgcacttacagagtgttacatgtctgtcatccttgaggagtcattgtggactctcaagggtccatgataggcatccacttgcctctctagcctgaagaatgtcatctgcagccttgctcctcaaagtgggaaccttgcttttcaaagcagcgtcttcagaacagcagcatcagcatcacaccggagcttattaaaaatacagactctcagccccacccctttcccccacactacccaatcagattctgcattttaacaagattcccaggggatttgtatgcacataaacaatggagacggctaggagaggtggcgcatgtctgtaatcccagcactttgggaggctgagggaggagaagcttgagcccaggagttcgagaccagcttgggcaacataatgagaccttgtctgtacagaaaaaaaaaaaaaaaaaaaaaaaaaaaaaaaaacgccctgtgtggtggggagtacctctagtcccagctgctgctcaggagactgaggtgggaggattgcttgagcctatgaaatggagcctgcagtgagccgtaagcgtgccactacactccagcctgggtgacagaatgagaccctgtctcaaaaaacaatcaaaaaacattggagacacaggggtctactgggtcttcctgctggttgtccctcctgaaggtcctcactggaggagaacaagctttgtgggcccggcttcttctacctgtgcctccacatcttataccaatcaataggggtaggactaggtccaatgcggatggggacattcccttcagcccgcatttgggaggtttaatgataggtctattgtgtgccatactgtttttctgtcttaccaccatgtcgcttctgtccccaggcaatctataagatggtttcctctgtaatgaaaatgcctgaagatgagtcaaccccagagaaaagaacagaaaagatcttccgccagatggacaccaatagagacggaaaactctccctggaagagttcatccgaggagccaaaagcgacccgtccattgtgcgcctcctgcagtgcgacccgagcagtgccggccagttctgagccctgcgcccaccaatcgaattgtagagctgcttgtgttcccttttgattcttctttttaacaatttttttttttttttgccaaacaatatcaatggtgatgccgtcccctgtgcggtctgatgcgccttcctccgtgacgccttcagcttcttttgtcgtggatgcttcgtgggaatgcccagagccccagtgtgcttgtggagagcatggacagacttcgtggtgttcattgtttgatgatttttaatcgttactattatttttttttattctaatgtctctgttctaaaacgtaagactcgggggttggggcaaaagaagggaaacccatccagtcctgtgattctattgcaagcttcaaggggcttttgtttgaaagacaaaactccccacctgaatctgttgtcacacgtgccgtaggggtgatggatggcaccggatgctggattccccaagaacaagttaccctctggggtgaggctattccagcgagctgggacatttccccatgggggcccactcccctctcttccccagcaggctgtagtttctaagctgtgaacatttcaagataaattaacagaggagaggaaaaagatggctcagctattttttcacaggtttacactagttgagctaatatgcgtgtctttggaaattaaacacaaatggtaacatattccaaaaccagacccatcttgttgcctattgtgataaaataaaaagacggctgtatataacatattgggtaatgcagaccaaattaagtgttttgccttgtttaaatgaaatgcatgtttagtgagcactaatacaatcttattccagaagactgtttttagtagcttattgtgaagtaagacaactataatgaatgtctgtcttgtttggaagtcatatctgtctttgcacaaatgtaccaatcgacaagtatattttatatattccataaaaatacaaagtaaccctgactagggcccaactttaattttgaatgcatttccagagtggccatgcctagagggcagatgcagagcaggtggtagtgggacaggacaattggagcacaggaatgttaacatgtatgacaggggaccagtagggtggtttccctctcaggcccagcagcccattgacagcattagactggcggcatggtgcttttctgagcagatcaatactctgcagactcgaaaaaacatcacatacattcttggaacttcccagtggtttaatctatgtgcatggttagggagccaggtctggaatattcagtttccctgcccctgttaaagaatcagaggttgggcagtcatcaaattcatcataaagacatgggcaagtgtgtctgtggtttccaaggcccccctatggagaatccaaaagtattttccattgccgtgctctttgaatgcagacttctatttccagaagtgacagcacaagtctgagttgctgtttggtctggtgacctcagacacactaatttgaattgaaagctaagagtaaaaatttgctggttacaggcgagtcatactcttgcaagtagttagcaaagggaggcccaaattctcaaggttgttgatggggaacttgccactaagagaaggcagagaggtccctagtgggtatatttgctgccaagccacttgccaaagaagaggaaccacagaaagagagacatcatgaccaggagaaaaatgtgactagacatgctaacctccaggtttttatatatgacttgagtctgctgtaattggcagcagaaatccaaatttgtatggtagaccaaaaagaaccaaatccatagggtgaaattttgagacctagactctgtaaaaataatcctagtcttcctccaggggtcagttcctcacagtggttctgtaccaaaacttgccaaattcctccatggccaagtgttaaaatctgtgtttggaaaatagcgaattaacctaagacacagaaggcagactgggtgaggagacctagcatgccctattggcagtgctcaggagctgcatcccacttttccctgctctgaatcgaagtcctagttccttcctttgattctcctttggtaggtggaatcagttaatgttttgagaaacctgcctgggctctgcccttagtcatgacatctcgctgagccagacccactctgttccttggaacctagagctggagtgaggagtagaggtctccggctattccagaaagaaaagtgagccacatgcaggctgatgaatgccgacacttccagaatgtatagaaatagtccctgtcctggcctgccactgaccctgtctgtattttctcggaggttgtttttctccttctccttcccaggaaggtctttgtatgtcgaatccagtgcactcaagtttggccaagggactccacagcacccagaagactgcatgcctcaaggtttatgtcactcctctgctgggctgttcattgtcattgctgtgttcagggacctttggaaataaaacctgttctgtcccaaataaaaccagcctgtgatgttcaagggactggaataaagtggcttacgacctgaaggattct

SEQ ID NO: 5266 - protein, 69 aa, Homo sapiens; identical to SEQ ID NO: 5254

SEQ ID NO: 5267 - DNA, 3149 bp, Homo sapiens
gtcaaaggcttgtgagaatctggtggatgctggaccttgctgctgctgctactgctgtttccaggggctgcagagcatggactgttaaatcttgcacttcttctgagtgagctgaattcttgccgccaggatggggaaacagaacagcaagctgcgcccggaggtcatgcaggacttgctggaaagcacagactttacagagcatgagatccaggaatggtataaaggcttcttgagagactgccccagtggacatttgtcaatggaagagtttaagaaaatatatgggaactttttcccttatggggatgcttccaaatttgcagagcatgtcttccgcaccttcgatgcaaatggagatgggacaatagactttagagaattcatcatcgccttgagtgtaacttcgagggggaagctggagcagaagctgaaatgggccttcagcatgtacgacctggacggaaatggctatatcagcaaggcagagatgctagagatcgtgcaggcaatctataagatggtttcctctgtaatgaaaatgcctgaagatgagtcaaccccagagaaaagaacagaaaagatcttccgccagatggacaccaatagagacggaaaactctccctggaagagttcatccgaggagccaaaagcgacccgtccattgtgcgcctcctgcagtgcgacccgagcagtgccggccagttctgagccctgcgcccaccaatcgaattgtagagctgcttgtgttcccttttgattcttctttttaacaatttttttttttttttgccaaacaatatcaatggtgatgccgtcccctgtgcggtctgatgcgccttcctccgtgacgccttcagcttcttttgtcgtggatgcttcgtgggaatgcccagagccccagtgtgcttgtggagagcatggacagacttcgtggtgttcattgtttgatgatttttaatcgttactattatttttttttattctaatgtctctgttctaaaacgtaagactcgggggttggggcaaaagaagggaaacccatccagtcctgtgattctattgcaagcttcaaggggcttttgtttgaaagacaaaactccccacctgaatctgttgtcacacgtgccgtaggggtgatggatggcaccggatgctggattccccaagaacaagttaccctctggggtgaggctattccagcgagctgggacatttccccatgggggcccactcccctctcttccccagcaggctgtagtttctaagctgtgaacatttcaagataaattaacagaggagaggaaaaagatggctcagctattttttcacaggtttacactagttgagctaatatgcgtgtctttggaaattaaacacaaatggtaacatattccaaaaccagacccatcttgttgcctattgtgataaaataaaaagacggctgtatataacatattgggtaatgcagaccaaattaagtgttttgccttgtttaaatgaaatgcatgtttagtgagcactaatacaatcttattccagaagactgtttttagtagcttattgtgaagtaagacaactataatgaatgtctgtcttgtttggaagtcatatctgtctttgcacaaatgtaccaatcgacaagtatattttatatattccataaaaatacaaagtaaccctgactagggcccaactttaattttgaatgcatttccagagtggccatgcctagagggcagatgcagagcaggtggtagtgggacaggacaattggagcacaggaatgttaacatgtatgacaggggaccagtagggtggtttccctctcaggcccagcagcccattgacagcattagactggcggcatggtgcttttctgagcagatcaatactctgcagactcgaaaaaacatcacatacattcttggaacttcccagtggtttaatctatgtgcatggttagggagccaggtctggaatattcagtttccctgcccctgttaaagaatcagaggttgggcagtcatcaaattcatcataaagacatgggcaagtgtgtctgtggtttccaaggcccccctatggagaatccaaaagtattttccattgccgtgctctttgaatgcagacttctatttccagaagtgacagcacaagtctgagttgctgtttggtctggtgacctcagacacactaatttgaattgaaagctaagaccacttgccaaagaagaggaaccacagaaagagagacatcatgaccaggagaaaaatgtgactagacatgctaacctccaggtttttatatatgacttgagtctgctgtaattggcagcagaaatccaaatttgtatggtagaccaaaaagaaccaaatccatagggtgaaattttgagacctagactctgtaaaaataatcctagtcttcctccaggggtcagttcctcacagtggttctgtaccaaaacttgccaaattcctccatggccaagtgttaaaatctgtgtttggaaaatagcgaattaacctaagacacagaaggcagactgggtgaggagacctagcatgccctattggcagtgctcaggagctgcatcccacttttccctgctctgaatcgaagtcctagttccttcctttgattctcctttggtaggtggaatcagttaatgttttgagaaacctgcctgggctctgcccttagtcatgacatctcgctgagccagacccactctgttccttggaacctagagctggagtgaggagtagaggtctccggctattccagaaagaaaagtgagccacatgcaggctgatgaatgccgacacttccagaatgtatagaaatagtccctgtcctggcctgccactgaccctgtctgtattttctcggaggttgtttttctccttctccttcccaggaaggtctttgtatgtcgaatccagtgcactcaagtttggccaagggactccacagcacccagaagactgcatgcctcaaggtttatgtcactcctctgctgggctgttcattgtcattgctgtgttcagggacctttggaaataaaacctgttctgtcccaaataaaaccagcctgtgatgttcaagggactggaataaagtggcttacgacctgaaggattct

SEQ ID NO: 5268 - protein, 193 aa, Homo sapiens [sequence omitted]

SEQ ID NO: 5269 - DNA, 3289 bp, Homo sapiens
gtcaaaggcttgtgagaatctggtggatgctggaccttgctgctgctgctactgctgtttccaggggctgcagagcatggactgttaaatcttgcacttcttctgagtgagctgaattcttgccgccaggatggggaaacagaacagcaagctgcgcccggaggtcatgcaggacttgctggaaagcacagactttacagagcatgagatccaggaatggtataaaggcttcttgagagactgccccagtggacatttgtcaatggaagagtttaagaaaatatatgggaactttttcccttatggggatgcttccaaatttgcagagcatgtcttccgcaccttcgatgcaaatggagatgggacaatagactttagagaattcatcatcgccttgagtgtaacttcgagggggaagctggagcagaagctgaaatgggccttcagcatgtacgacctggacggaaatggctatatcagcaaggcagagatgctagagatcgtgcaggcaatctataagatggtttcctctgtaatgaaaatgcctgaagatgagtcaaccccagagaaaagaacagaaaagatcttccgccagatggacaccaatagagacggaaaactctccctggaagagttcatccgaggagccaaaagcgacccgtccattgtgcgcctcctgcagtgcgacccgagcagtgccggccagttctgagccctgcgcccaccaatcgaattgtagagctgcttgtgttcccttttgattcttctttttaacaatttttttttttttttgccaaacaatatcaatggtgatgccgtcccctgtgcggtctgatgcgccttcctccgtgacgccttcagcttcttttgtcgtggatgcttcgtgggaatgcccagagccccagtgtgcttgtggagagcatggacagacttcgtggtgttcattgtttgatgatttttaatcgttactattatttttttttattctaatgtctctgttctaaaacgtaagactcgggggttggggcaaaagaagggaaacccatccagtcctgtgattctattgcaagcttcaaggggcttttgtttgaaagacaaaactccccacctgaatctgttgtcacacgtgccgtaggggtgatggatggcaccggatgctggattccccaagaacaagttaccctctggggtgaggctattccagcgagctgggacatttccccatgggggcccactcccctctcttccccagcaggctgtagtttctaagctgtgaacatttcaagataaattaacagaggagaggaaaaagatggctcagctattttttcacaggtttacactagttgagctaatatgcgtgtctttggaaattaaacacaaatggtaacatattccaaaaccagacccatcttgttgcctattgtgataaaataaaaagacggctgtatataacatattgggtaatgcagaccaaattaagtgttttgccttgtttaaatgaaatgcatgtttagtgagcactaatacaatcttattccagaagactgtttttagtagcttattgtgaagtaagacaactataatgaatgtctgtcttgtttggaagtcatatctgtctttgcacaaatgtaccaatcgacaagtatattttatatattccataaaaatacaaagtaaccctgactagggcccaactttaattttgaatgcatttccagagtggccatgcctagagggcagatgcagagcaggtggtagtgggacaggacaattggagcacaggaatgttaacatgtatgacaggggaccagtagggtggtttccctctcaggcccagcagcccattgacagcattagactggcggcatggtgcttttctgagcagatcaatactctgcagactcgaaaaaacatcacatacattcttggaacttcccagtggtttaatctatgtgcatggttagggagccaggtctggaatattcagtttccctgcccctgttaaagaatcagaggttgggcagtcatcaaattcatcataaagacatgggcaagtgtgtctgtggtttccaaggcccccctatggagaatccaaaagtattttccattgccgtgctctttgaatgcagacttctatttccagaagtgacagcacaagtctgagttgctgtttggtctggtgacctcagacacactaatttgaattgaaagctaagagtaaaaatttgctggttacaggcgagtcatactcttgcaagtagttagcaaagggaggcccaaattctcaaggttgttgatggggaacttgccactaagagaaggcagagaggtccctagtgggtatatttgctgccaagccacttgccaaagaagaggaaccacagaaagagagacatcatgaccaggagaaaaatgtgactagacatgctaacctccaggtttttatatatgacttgagtctgctgtaattggcagcagaaatccaaatttgtatggtagaccaaaaagaaccaaatccatagggtgaaattttgagacctagactctgtaaaaataatcctagtcttcctccaggggtcagttcctcacagtggttctgtaccaaaacttgccaaattcctccatggccaagtgttaaaatctgtgtttggaaaatagcgaattaacctaagacacagaaggcagactgggtgaggagacctagcatgccctattggcagtgctcaggagctgcatcccacttttccctgctctgaatcgaagtcctagttccttcctttgattctcctttggtaggtggaatcagttaatgttttgagaaacctgcctgggctctgcccttagtcatgacatctcgctgagccagacccactctgttccttggaacctagagctggagtgaggagtagaggtctccggctattccagaaagaaaagtgagccacatgcaggctgatgaatgccgacacttccagaatgtatagaaatagtccctgtcctggcctgccactgaccctgtctgtattttctcggaggttgtttttctccttctccttcccaggaaggtctttgtatgtcgaatccagtgcactcaagtttggccaagggactccacagcacccagaagactgcatgcctcaaggtttatgtcactcctctgctgggctgttcattgtcattgctgtgttcagggacctttggaaataaaacctgttctgtcccaaataaaaccagcctgtgatgttcaagggactggaataaagtggcttacgacctgaaggattct

SEQ ID NO: 5270 - protein, 193 aa, Homo sapiens [sequence omitted]

SEQ ID NO: 5271 - DNA, 3318 bp, Homo sapiens
gcccgaagcgacacagacgctgggagcggccgaggcgagtgatttcttctgacttgagcctgcagtgtgctgtgagagatctaccactagattatctcaactttggtctcctgggaccactcgttgctgacagtcagaaactgaattcttgccgccaggatggggaaacagaacagcaagctgcgcccggaggtcatgcaggacttgctggaaagcacagactttacagagcatgagatccaggaatggtataaaggcttcttgagagactgccccagtggacatttgtcaatggaagagtttaagaaaatatatgggaactttttcccttatggggatgcttccaaatttgcagagcatgtcttccgcaccttcgatgcaaatggagatgggacaatagactttagagaattcatcatcgccttgagtgtaacttcgagggggaagctggagcagaagctgaaatgggccttcagcatgtacgacctggacggaaatggctatatcagcaaggcagagatgctagagatcgtgcaggcaatctataagatggtttcctctgtaatgaaaatgcctgaagatgagtcaaccccagagaaaagaacagaaaagatcttccgccagatggacaccaatagagacggaaaactctccctggaagagttcatccgaggagccaaaagcgacccgtccattgtgcgcctcctgcagtgcgacccgagcagtgccggccagttctgagccctgcgcccaccaatcgaattgtagagctgcttgtgttcccttttgattcttctttttaacaatttttttttttttttgccaaacaatatcaatggtgatgccgtcccctgtgcggtctgatgcgccttcctccgtgacgccttcagcttcttttgtcgtggatgcttcgtgggaatgcccagagccccagtgtgcttgtggagagcatggacagacttcgtggtgttcattgtttgatgatttttaatcgttactattatttttttttattctaatgtctctgttctaaaacgtaagactcgggggttggggcaaaagaagggaaacccatccagtcctgtgattctattgcaagcttcaaggggcttttgtttgaaagacaaaactccccacctgaatctgttgtcacacgtgccgtaggggtgatggatggcaccggatgctggattccccaagaacaagttaccctctggggtgaggctattccagcgagctgggacatttccccatgggggcccactcccctctcttccccagcaggctgtagtttctaagctgtgaacatttcaagataaattaacagaggagaggaaaaagatggctcagctattttttcacaggtttacactagttgagctaatatgcgtgtctttggaaattaaacacaaatggtaacatattccaaaaccagacccatcttgttgcctattgtgataaaataaaaagacggctgtatataacatattgggtaatgcagaccaaattaagtgttttgccttgtttaaatgaaatgcatgtttagtgagcactaatacaatcttattccagaagactgtttttagtagcttattgtgaagtaagacaactataatgaatgtctgtcttgtttggaagtcatatctgtctttgcacaaatgtaccaatcgacaagtatattttatatattccataaaaatacaaagtaaccctgactagggcccaactttaattttgaatgcatttccagagtggccatgcctagagggcagatgcagagcaggtggtagtgggacaggacaattggagcacaggaatgttaacatgtatgacaggggaccagtagggtggtttccctctcaggcccagcagcccattgacagcattagactggcggcatggtgcttttctgagcagatcaatactctgcagactcgaaaaaacatcacatacattcttggaacttcccagtggtttaatctatgtgcatggttagggagccaggtctggaatattcagtttccctgcccctgttaaagaatcagaggttgggcagtcatcaaattcatcataaagacatgggcaagtgtgtctgtggtttccaaggcccccctatggagaatccaaaagtattttccattgccgtgctctttgaatgcagacttctatttccagaagtgacagcacaagtctgagttgctgtttggtctggtgacctcagacacactaatttgaattgaaagctaagagtaaaaatttgctggttacaggcgagtcatactcttgcaagtagttagcaaagggaggcccaaattctcaaggttgttgatggggaacttgccactaagagaaggcagagaggtccctagtgggtatatttgctgccaagccacttgccaaagaagaggaaccacagaaagagagacatcatgaccaggagaaaaatgtgactagacatgctaacctccaggtttttatatatgacttgagtctgctgtaattggcagcagaaatccaaatttgtatggtagaccaaaaagaaccaaatccatagggtgaaattttgagacctagactctgtaaaaataatcctagtcttcctccaggggtcagttcctcacagtggttctgtaccaaaacttgccaaattcctccatggccaagtgttaaaatctgtgtttggaaaatagcgaattaacctaagacacagaaggcagactgggtgaggagacctagcatgccctattggcagtgctcaggagctgcatcccacttttccctgctctgaatcgaagtcctagttccttcctttgattctcctttggtaggtggaatcagttaatgttttgagaaacctgcctgggctctgcccttagtcatgacatctcgctgagccagacccactctgttccttggaacctagagctggagtgaggagtagaggtctccggctattccagaaagaaaagtgagccacatgcaggctgatgaatgccgacacttccagaatgtatagaaatagtccctgtcctggcctgccactgaccctgtctgtattttctcggaggttgtttttctccttctccttcccaggaaggtctttgtatgtcgaatccagtgcactcaagtttggccaagggactccacagcacccagaagactgcatgcctcaaggtttatgtcactcctctgctgggctgttcattgtcattgctgtgttcagggacctttggaaataaaacctgttctgtcccaaataaaaccagcctgtgatgttcaagggactggaataaagtggcttacgacctgaaggattct

SEQ ID NO: 5272 - protein, 193 aa, Homo sapiens [sequence omitted]

SEQ ID NO: 5273 - DNA, 1621 bp, Homo sapiens
gggggaggcgggcggagggaaggcgctgccgctgctgccgccgcctcgcccgaagcgacacagacgctgggagcggccgaggcgagatcctatcattattttaaaattcctcctcctccacgaagtccttcctgattccttcaaagaaatatcactcctccgaattcccagagtgatttcttctgacttgagcctgcagtgtgctgtgagagatctaccactagattatctcaactttggtctcctgggaccactcgttgctgacagtcagaaactgaattcttgccgccaggatggggaaacagaacagcaagctgcgcccggaggtcatgcaggacttgctggaaagcacagactttacagagcatgagatccaggaatggtataaaggcttcttgagagactgccccagtggacatttgtcaatggaagagtttaagaaaatatatgggaactttttcccttatggggatgcttccaaatttgcagagcatgtcttccgcaccttcgatgcaaatggagatgggacaatagactttagagaattcatcatcgccttgagtgtaacttcgagggggaagctggagcagaagctgaaatgggccttcagcatgtacgacctggacggaaatggctatatcagcaaggcagagatgctagagatcgtgcaggcaatctataagatggtttcctctgtaatgaaaatgcctgaagatgagtcaaccccagagaaaagaacagaaaagatcttccgccagatggacaccaatagagacggaaaactctccctggaagagttcatccgaggagccaaaagcgacccgtccattgtgcgcctcctgcagtgcgacccgagcagtgccggccagttctgagccctgcgcccaccaatcgaattgtagagctgcttgtgttcccttttgattcttctttttaacaatttttttttttttttgccaaacaatatcaatggtgatgccgtcccctgtgcggtctgatgcgccttcctccgtgacgccttcagcttcttttgtcgtggatgcttcgtgggaatgcccagagccccagtgtgcttgtggagagcatggacagacttcgtggtgttcattgtttgatgatttttaatcgttactattatttttttttattctaatgtctctgttctaaaacgtaagactcgggggttggggcaaaagaagggaaacccatccagtcctgtgattctattgcaagcttcaaggggcttttgtttgaaagacaaaactccccacctgaatctgttgtcacacgtgccgtaggggtgatggatggcaccggatgctggattccccaagaacaagttaccctctggggtgaggctattccagcgagctgggacatttccccatgggggcccactcccctctcttccccagcaggctgtagtttctaagctgtgaacatttcaagataaattaacagaggagaggaaaaagatggctcagctattttttcacaggtttacactagttgagctaatatgcgtgtctttggaaattaaacacaaatggtaacatattccaaaaccagacccatcttgttgcctattgtgataaaataaaaagacggctgtatataacat

SEQ ID NO: 5274 - protein, 193 aa, Homo sapiens [sequence omitted]

SEQ ID NO: 5275 - DNA, 1457 bp, Homo sapiens
gtcaaaggcttgtgagaatctggtggatgctggaccttgctgctgctgctactgctgtttccaggggctgcagagcatggactgttaaatcttgcacttcttctgagtgagctgaattcttgccgccaggatggggaaacagaacagcaagctgcgcccggaggtcatgcaggacttgctggaaagcacagactttacagagcatgagatccaggaatggtataaaggcttcttgagagactgccccagtggacatttgtcaatggaagagtttaagaaaatatatgggaactttttcccttatggggatgcttccaaatttgcagagcatgtcttccgcaccttcgatgcaaatggagatgggacaatagactttagagaattcatcatcgccttgagtgtaacttcgagggggaagctggagcagaagctgaaatgggccttcagcatgtacgacctggacggaaatggctatatcagcaaggcagagatgctagagatcgtgcaggcaatctataagatggtttcctctgtaatgaaaatgcctgaagatgagtcaaccccagagaaaagaacagaaaagatcttccgccagatggacaccaatagagacggaaaactctccctggaagagttcatccgaggagccaaaagcgacccgtccattgtgcgcctcctgcagtgcgacccgagcagtgccggccagttctgagccctgcgcccaccaatcgaattgtagagctgcttgtgttcccttttgattcttctttttaacaatttttttttttttttgccaaacaatatcaatggtgatgccgtcccctgtgcggtctgatgcgccttcctccgtgacgccttcagcttcttttgtcgtggatgcttcgtgggaatgcccagagccccagtgtgcttgtggagagcatggacagacttcgtggtgttcattgtttgatgatttttaatcgttactattatttttttttattctaatgtctctgttctaaaacgtaagactcgggggttggggcaaaagaagggaaacccatccagtcctgtgattctattgcaagcttcaaggggcttttgtttgaaagacaaaactccccacctgaatctgttgtcacacgtgccgtaggggtgatggatggcaccggatgctggattccccaagaacaagttaccctctggggtgaggctattccagcgagctgggacatttccccatgggggcccactcccctctcttccccagcaggctgtagtttctaagctgtgaacatttcaagataaattaacagaggagaggaaaaagatggctcagctattttttcacaggtttacactagttgagctaatatgcgtgtctttggaaattaaacacaaatggtaacatattccaaaaccagacccatcttgttgcctattgtgataaaataaaaagacggctgtatataaca

SEQ ID NO: 5276 - protein, 193 aa, Homo sapiens [sequence omitted]

SEQ ID NO: 5277 - DNA, 1486 bp, Homo sapiens
gcccgaagcgacacagacgctgggagcggccgaggcgagtgatttcttctgacttgagcctgcagtgtgctgtgagagatctaccactagattatctcaactttggtctcctgggaccactcgttgctgacagtcagaaactgaattcttgccgccaggatggggaaacagaacagcaagctgcgcccggaggtcatgcaggacttgctggaaagcacagactttacagagcatgagatccaggaatggtataaaggcttcttgagagactgccccagtggacatttgtcaatggaagagtttaagaaaatatatgggaactttttcccttatggggatgcttccaaatttgcagagcatgtcttccgcaccttcgatgcaaatggagatgggacaatagactttagagaattcatcatcgccttgagtgtaacttcgagggggaagctggagcagaagctgaaatgggccttcagcatgtacgacctggacggaaatggctatatcagcaaggcagagatgctagagatcgtgcaggcaatctataagatggtttcctctgtaatgaaaatgcctgaagatgagtcaaccccagagaaaagaacagaaaagatcttccgccagatggacaccaatagagacggaaaactctccctggaagagttcatccgaggagccaaaagcgacccgtccattgtgcgcctcctgcagtgcgacccgagcagtgccggccagttctgagccctgcgcccaccaatcgaattgtagagctgcttgtgttcccttttgattcttctttttaacaatttttttttttttttgccaaacaatatcaatggtgatgccgtcccctgtgcggtctgatgcgccttcctccgtgacgccttcagcttcttttgtcgtggatgcttcgtgggaatgcccagagccccagtgtgcttgtggagagcatggacagacttcgtggtgttcattgtttgatgatttttaatcgttactattatttttttttattctaatgtctctgttctaaaacgtaagactcgggggttggggcaaaagaagggaaacccatccagtcctgtgattctattgcaagcttcaaggggcttttgtttgaaagacaaaactccccacctgaatctgttgtcacacgtgccgtaggggtgatggatggcaccggatgctggattccccaagaacaagttaccctctggggtgaggctattccagcgagctgggacatttccccatgggggcccactcccctctcttccccagcaggctgtagtttctaagctgtgaacatttcaagataaattaacagaggagaggaaaaagatggctcagctattttttcacaggtttacactagttgagctaatatgcgtgtctttggaaattaaacacaaatggtaacatattccaaaaccagacccatcttgttgcctattgtgataaaataaaaagacggctgtatataaca

SEQ ID NO: 5278 - protein, 193 aa, Homo sapiens [sequence omitted]

SEQ ID NO: 5279 - DNA, 492 bp, Homo sapiens
gctgctgctgctactgctgtttccaggggctgcagagcatggactgttaaatcttgcacttcttctgagtgagactatatttcagcggtatgaaatacaagagaataattcagcgttgatggcaaaatctcaatgatgaagtttatcactaaaagaaaacaacctatgctgtgaaagcagagatgctctagaatctacaggtcttttcctatgggaaaataagagaaaaaaagactgtcatcagaatcattttacagcattgagactatgttgatttcaaggtcatgtttgttgcagcttcaaaagatgctggcaaggaacgaggtactctagaaacctggctgttgcattattaaatattttgtgtatagtttcggacattcttaacccgtttggtgctgtggacctctttggcagcctggtgaagcctatgtacttttctcagaattatgtttttacatgcataaaataaagtatgcaggtttacaaatc

SEQ ID NO: 5280 - protein, 44 aa, Homo sapiens
SLSLKENNLCCESRDALESTGLFLWENKRKKDCHQNHFTALRLC

SEQ ID NO: 5281 - DNA, 209 bp, Homo sapiens
gtcacatctgaagagggctctggactgagcatgtacctaagtctagctctgccgggtgttatccagaaagatcagtcactgtgctttggagtccatgtcactgaacactccttagatgaagcagaacccagatgactcttgtgtcaaggcaattccaagacaccatctcctgctcgcctgctgtataaacgaacctaacatagaacaaa

SEQ ID NO: 5282 - protein, 34 aa, Homo sapiens
MYLSLALPGVIQKDQSLCFGVHVTEHSLDEAEPR

SEQ ID NO: 5283 - DNA, 564 bp, Homo sapiens
gaagaaacattgtccgaatcagtatcagatctacagtgagtcattcaaacagcatgacataactgggcgagccctgctgagacttactgacaaaaagctcgagcgaatggggattgcccaggagaacctccggcagcacatcttacaacaggtgctccagctgaaggtgcgagaagaagtcagaaatctacagttactcacacaagcatcatctgagggttctccataaacacggttagccttccaagctgctgtcctgccagttgatatgaacatggcctgttcctcacagaaagactaacccatggcactgccagaagatatccttggatcgtggacagattaactggattaactgaaaaaagcacccattcagtcaatattatgggttttggaaaaatcttgctttgctgtggatttaaaatgaggtgcataatataatgccaactcattccaagtggtcattggcagaccattagctggaaaattgcttccagttttcatcactgtgcataactcaagttccctttggggagctgtctgtgcccttcactagaagtcctg

SEQ ID NO: 5284 - protein, 40 aa, Homo sapiens
MGIAQENLRQHILQQVLQLKVREEVRNLQLLTQASSEGSP

SEQ ID NO: 5285 - DNA, 540 bp, Homo sapiens
gaatatttaggcgaaagcgagaggaaggggggagcgcggggcaggaggagtacctcggccaagaaaattatgcatgcgttagggaagctctgagagaatggctgtggaagctctccactgtggtttgaatccacggggtattgatcaccctgcccatgctgaaggtattaaactgcaaattgaaggtgaaggtgtggaatctcaatccattaaaaataaaaatttccagaaggtgcctgaccagaaaggaactcccaagcgactgcaggcagaagctgagacggctaagggcgagccctgctgagacttactgacaaaaagctcgagcgaatggggattgcccaggagaacctccggcagcacatcttacaacaggtgctccagctgaaggtgcgagaagaagtcagaaatctacagttactcacacaaggatattcaggaatatggagatatccctgactcttccaaaagaatgaccaagatcatgcctaattacctccatgtcctgggaaagccccgctgtaatggagatggcatctt

SEQ ID NO: 5286 - protein, 68 aa, Homo sapiens
MAVEALHCGLNPRGIDHPAHAEGIKLQIEGEGVESQSIKNKNFQKVPDQKGTPKRLQAEAETAKGEPC

SEQ ID NO: 5287 - DNA, 673 bp, Homo sapiens
agattaataacacacaggaaaaaccctcaacttctttcattcgcctgttgagataaagggaaagagagtccccatccaggcctgcaggagagggagaactggtggatgcaaatgaaaaagcagaggcattcctcagagattatagtgctggagttggaagaagatgggagaaacatatgaggagagaaggaagtcgagctcataccatgatgaagaagataactcctgaagattgggaagggcactggctggctctcaaagatggacaaatggctttacgacgcttaaggggatgctctgtggagtctgcttgggtgcaaatcaccaccatgacacactacccaatgagcaaacaaaagcaaactggttaaggatcctgacaaagacttcgcagccagaagaggcgatgccgtgggtcaaatctaggaccaccagatttcaaaccttatacttctaatcactatatgacactgaacatgattttaagaaactttcttacaaaaatgtatgaattggacaagagagtaacaaaaacagagtaattcactgatctctcattttgtagatgtaagttttgtataatgagtttccatacatcaggagacacttggaaacataaataagtcaaagttacagacaataaagttacagagaattgtattattgtcctctg

SEQ ID NO: 5288 - protein, 64 aa, Homo sapiens
MRREGSRAHTMMKKITPEDWEGHWLALKDGQMALRRLRGCSVESAWVQITTMTHYPMSKQKQTG

SEQ ID NO: 5289 - DNA, 2263 bp, Homo sapiens
atgaggcaaagaggaaactatggcctaaatggagtgccgaatagagagttggactttttgagtcacggaagctggctggaggggaagaatgctgagaaaggggaaagcctaaagatgttgggtaaaagattattgatgaagtggagacctggggaagatgggggcttgatgaatattttctgtcatggacaccttctttatgtggtttgttttctgagttctatttgttgctttttcctagctctccactgtggtttgaatccacggggtattgatcaccctgcccatgctgaaggtattaaactgcaaattgaaggtgaaggtgtggaatctcaatccattaaaaataaaaatttccagaaggtgcctgaccagaaaggaactcccaagcgactgcaggcagaagctgagacggctaagtcagctacggtgaagctatctaaaccggtggctctatggacccagcaggatgtctgcaagtggttgaagaaacattgtccgaatcagtatcagatctacagtgagtcattcaaacagcatgacataactgggcgagccctgctgagacttactgacaaaaagctcgagcgaatggggattgcccaggagaacctccggcagcacatcttacaacaggtgctccagctgaaggtgcgagaagaagtcagaaatctacagttactcacacaaggtaccctattgcttcctgatgggtggatggatggggagattagaagaaagaccaccttactattaggacagacaggagtcagggagaatttgttattgtttcttcacagaatttccatcatagaaaatagtatacagatttaagattacttccctttgaaaacttttttcatagctcactagggagaaggatgcacaaataagtaatggatgagcaaacagaattacctgagctaacttcaaggtggtcacgtacagttgtatggattgtgtactgcacaaccccagagaataccagtcacatcaatcagggtacgattgcactcactagagttgtataatgtgcagcctgcacaactgtacagtccagctgtagctatcttcacctgcgccaattgtgagggcgctttagcatttgagtgattcaatagttacgatgaccagtgatataagtggagtttttgttgtatttttgttttgcttttcaccggttagtgggagaaaaacattttagatatgtattactatacatgaatgtattatacacacacactttagagattgtaagaaccccatttagcttcttgaaagtggaataatttttataatagactatagtgaatctaaaactacactgttaagagtatataattcttaacaggaattataaataacttcaatatgatgagagcacttaagatctcaataactgtggaagtgacaaaataaagctagaattcgaagaaagccttaagttacactatatgtaactgatatgtctacatgagatttggatgctatcaaccttcattggctataaactttatttgttttattttagcgtccattgtacatcgttttaaatgaaaggatgataaaatatgtgtttttgagagccttgagtatttgtcattctgcagaatattgtaattgcatgcataccgatattggagaaatctgggtcagccaagtttcatgttattgcatttagattaacctagtaatagtccatttgcctagaggaaataatgtgctccctgaaagatgactattctagaaggataaatatagatttcaagtgatcgtaaaatagtattgtttgtctcatatgcattatttgcattttgtcctcagagatttccaatggtgaatttactggtatactaagtgatttaaatttgaatgtgaaatactgataggcttttaagcttcttttaagaagtagatagaaatacgaagattatgataagaaagtctgtcacagtgctatttggaaaacggaaaatttacaagcaacctagaggtccagcaatgtgaaaagaatcaagtaattctgcttaaattcataagattcagtataatgcccagttattaaaattacatctttaaagaatacatgacaacatgggaaattacgtaagtcatacaaggtgggaggaaaggtcatgtgtaaaattgtatgcataatataagcccaattttgtaaaaaccatatattcttatatgtacagaaaaaaaggactgcaagtaaatatgccaaccattttaataaaggatctctctggattgtggg

SEQ ID NO: 5290 - protein, 277 aa, Homo sapiens
MRQRGNYGLNGVPNRELDFLSHGSWLEGKNAEKGESLKMLGKRLLMKWRPGEDGGLMNIFCHGHLLYVVCFLSSICCFFLALHCGLNPRGIDHPAHAEGIKLQIEGEGVESQSIKNKNFQKVPDQKGTPKRLQAEAETAKSATVKLSKPVALWTQQDVCKWLKKHCPNQYQIYSESFKQHDITGRALLRLTDKKLERMGIAQENLRQHILQQVLQLKVREEVRNLQLLTQGTLLLPDGWMDGEIRRKTTLLLGQTGVRENLLLFLHRISIIENSIQI

SEQ ID NO: 5291 - DNA, 2132 bp, Homo sapiens
gaatatttaggcgaaagcgagaggaaggggggagcgcggggcaggaggagtacctcggccaagaaaattatgcatgcgttagggaagctctgagagaatggctgtggaagctctccactgtggtttgaatccacggggtattgatcaccctgcccatgctgaaggtattaaactgcaaattgaaggtgaaggtgtggaatctcaatccattaaaaataaaaatttccagaaggtgcctgaccagaaaggaactcccaagcgactgcaggcagaagctgagacggctaagtcagctacggtgaagctatctaaaccggtggctctatggacccagcaggatgtctgcaagtggttgaagaaacattgtccgaatcagtatcagatctacagtgagtcattcaaacagcatgacataactgggcgagccctgctgagacttactgacaaaaagctcgagcgaatggggattgcccaggagaacctccggcagcacatcttacaacaggtgctccagctgaaggtgcgagaagaagtcagaaatctacagttactcacacaaggtaccctattgcttcctgatgggtggatggatggggagattagaagaaagaccaccttactattaggacagacaggagtcagggagaatttgttattgtttcttcacagaatttccatcatagaaaatagtatacagatttaagattacttccctttgaaaacttttttcatagctcactagggagaaggatgcacaaataagtaatggatgagcaaacagaattacctgagctaacttcaaggtggtcacgtacagttgtatggattgtgtactgcacaaccccagagaataccagtcacatcaatcagggtacgattgcactcactagagttgtataatgtgcagcctgcacaactgtacagtccagctgtagctatcttcacctgcgccaattgtgagggcgctttagcatttgagtgattcaatagttacgatgaccagtgatataagtggagtttttgttgtatttttgttttgcttttcaccggttagtgggagaaaaacattttagatatgtattactatacatgaatgtattatacacacacactttagagattgtaagaaccccatttagcttcttgaaagtggaataatttttataatagactatagtgaatctaaaactacactgttaagagtatataattcttaacaggaattataaataacttcaatatgatgagagcacttaagatctcaataactgtggaagtgacaaaataaagctagaattcgaagaaagccttaagttacactatatgtaactgatatgtctacatgagatttggatgctatcaaccttcattggctataaactttatttgttttattttagcgtccattgtacatcgttttaaatgaaaggatgataaaatatgtgtttttgagagccttgagtatttgtcattctgcagaatattgtaattgcatgcataccgatattggagaaatctgggtcagccaagtttcatgttattgcatttagattaacctagtaatagtccatttgcctagaggaaataatgtgctccctgaaagatgactattctagaaggataaatatagatttcaagtgatcgtaaaatagtattgtttgtctcatatgcattatttgcattttgtcctcagagatttccaatggtgaatttactggtatactaagtgatttaaatttgaatgtgaaatactgataggcttttaagcttcttttaagaagtagatagaaatacgaagattatgataagaaagtctgtcacagtgctatttggaaaacggaaaatttacaagcaacctagaggtccagcaatgtgaaaagaatcaagtaattctgcttaaattcataagattcagtataatgcccagttattaaaattacatctttaaagaatacatgacaacatgggaaattacgtaagtcatacaaggtgggaggaaaggtcatgtgtaaaattgtatgcataatataagcccaattttgtaaaaaccatatattcttatatgtacagaaaaaaaggactgcaagtaaatatgccaaccattttaataaaggatctctctggattgtggg

SEQ ID NO: 5292 - protein, 201 aa, Homo sapiens
MAVEALHCGLNPRGIDHPAHAEGIKLQIEGEGVESQSIKNKNFQKVPDQKGTPKRLQAEAETAKSATVKLSKPVALWTQQDVCKWLKKHCPNQYQIYSESFKQHDITGRALLRLTDKKLERMGIAQENLRQHILQQVLQLKVREEVRNLQLLTQGTLLLPDGWMDGEIRRKTTLLLGQTGVRENLLLFLHRISIIENSIQI

SEQ ID NO: 5293 - DNA, 374 bp, Homo sapiens
ctatcaagtactttagtttcagtgtgattttcaaggaatgtgacctggggtgaaatccctggagcaaccgtgtacactctttgactgactttcagccctcgcaaatctaaacatcttgtgcttggaaaatccagactataagaaggccttttgattggcctgtttctgattataggtaagtgtgactcttacctctgaaaccctagagacacctctcatgtgctttccccacttcccaagctactgcttccatttggccctattgtgcatccttcaatccttcaacacccttttctgaaggtttttgtggaagactagaagagttgtcttgggccacacataaatacactaatgctaacgatagctggtgagct

SEQ ID NO: 5294 - protein, 54 aa, Homo sapiens
RHLSCAFPTSQATASIWPYCASFNPSTPFSEGFCGRLEELSWATHKYTNANDSW

SEQ ID NO: 5295 - DNA, 4359 bp, Homo sapiens
ttttggcgtagattccccactgatcgaggcattttttttccctttttttttcctttttttttttcttttaaaaattttggccatcgttctccgtacgggggctttttctgtctgtctgtctggctggcaggctggctttccccctctttcccacggagcccgagccgggcgcccggtggggagtggggagtgggtggggggagccagcagagttccattttggaacgcccgtgccgcgtctccgcgttcccagcccgggtccccgcgttcacagccccagcgcaggtctggatgtaccgactgcttttggaataaaaagattcccaggatgtgagcaacacgggaccgatatgatgcttcctggtgtgtttagtggttggtgccattccaattttctgtgctgaaatcattctgaaaactcaaacagtagacttcagcacacaaggaaagccaaagccatttgagggggaataaagccaaaagcctttcaccttattcgttccaagaatctcaccgccccctccttatccccctccaaaaataagccattgcacacagacaggcagcatggctagcaaacgaaaatctacaactccatgcatggttcggacatcacaagtagtagaacaagatgtgcccgaggaagtagacagggccaaagagaaaggaatcggcacaccacagcctgacgtggccaaggacagttgggcagcagaacttgaaaactcttccaaagaaaacgaagtgatagaggtgaaatctatgggggaaagccagtccaaaaaactccaaggtggttatgagtgcaaatactgcccctactccacgcaaaacctgaacgagttcacggagcatgtcgacatgcagcatcccaacgtgattctcaaccccctctacgtgtgtgcagaatgtaacttcacaaccaaaaagtacgactccctatccgaccacaactccaagttccatcccggggaggccaacttcaagctgaagttaattaaacgcaataatcaaactgtcttggaacagtccatcgaaaccaccaaccatgtcgtgtccatcaccaccagtggccctggaactggtgacagtgattctgggatctcggtgagtaaaacccccatcatgaagcctggaaaaccaaaagcggatgccaagaaggtgcccaagaagcccgaggagatcacccccgagaaccacgtggaagggaccgcccgcctggtgacagacacagctgagatcctctcgagactcggcggggtggagctcctccaagacacattaggacacgtcatgccttctgtacagctgccaccaaatatcaaccttgtgcccaaggtccctgtcccactaaatactaccaaatacaactctgccctggatacaaatgccacgatgatcaactctttcaacaagtttccttacccgacccaggctgagttgtcctggctgacagctgcctccaaacacccagaggagcacatcagaatctggtttgccacccagcgcttaaagcatggcatcagctggtccccagaagaggtggaggaggcccggaagaagatgttcaacggcaccatccagtcagtacccccgaccatcactgtgctgcccgcccagttggcccccacaaaggtgacgcagcccatcctccagacggctctaccgtgccagatcctcggccagactagcctggtgctgactcaggtgaccagcgggtcaacaaccgtctcttgctcccccatcacacttgccgtggcaggagtcaccaaccatggccagaagagacccttggtgactccccaagctgcccccgaacccaagcgtccacacatcgctcaggtgccagagcccccacccaaggtggccaaccccccgctcacaccagccagtgaccgcaagaagacaaaggagcagatagcacatctcaaggccagctttctccagagccagttccctgacgatgccgaggtttaccggctcatcgaggtgactggccttgccaggagcgagatcaagaagtggttcagtgaccaccgatatcggtgtcaaaggggcatcgtccacatcaccagcgaatcccttgccaaagaccagttggccatcgcggcctcccgacacggtcgcacgtatcatgcgtacccagactttgccccccagaagttcaaagagaaaacacagggtcaggttaaaatcttggaagacagctttttgaaaagttcttttcctacccaagcagaactggatcggctaagggtggagaccaagctgagcaggagagagatcgactcctggttctcggagaggcggaagcttcgagacagcatggaacaagctgtcttggattccatggggtctggcaaaaaaggccaagatgtgggagcccccaatggtgctctgtctcgactcgaccagctctccggtgcccagttaacaagttctctgcccagcccttcgccagcaattgcaaaaagtcaagaacaggttcatctcctgaggagcacgtttgcaagaacccagtggcctactccccaggagtacgaccagttagcggccaagactggcctggtccgaactgagattgtgcgttggttcaaggagaacagatgcttgctgaaaacgggaaccgtgaagtggatggagcagtaccagcaccagcccatggcagatgatcacggctacgatgccgtagcaaggaaagcaacaaaacccatggccgagagcccaaagaacgggggtgatgtggttccacaatattacaaggaccccaaaaagctctgcgaagaggacttggagaagttggtgaccagggtaaaagtaggcagcgagccagcaaaagactgtttgccagcaaagccctcagaggccacctcagaccggtcagagggcagcagccgggacggccagggtagcgacgagaacgaggagtcgagcgttgtggattacgtggaggtgacggtcggggaggaggatgcgatctcagatagatcagatagctggagtcaggctgcggcagaaggtgtgtcggaactggctgaatcagactccgactgcgtccctgcagaggctggccaggcctagacagggaagtctgttagaactgctgtgctgatcaacgggacgctccgtctttgaagaaagaagagatggtctctccccagccatgggccacccttgccagtgactccaagtggaactacttagctcgcgtgtgcctggagggtgcgggaagtccagcgactctcagacgcacctcccagaggaccggtgggaattgttcatagtgccaaagtcctactactgcgttttcaatgggtccttgtacatagtttgctcctctgccctagccctcacctcttgctatactggaaccgatttgtacaatgtgggaattttgttacctttttaatcaagggcaacttccttttccagcactaccattgtaaggtttttttcaggagggagggctaaccaccttgcttttctcttttctctttttcttttttttatttttgttttattaatttggggaaaggggtgttagcattagtgccatgatatctactggattttaagtagggagactttatttttaaaggtaggttgaaatttgggagatttctcggcaggaagggctgaaatccaggcccctgtctcaacttggagagaggtgacagacggcagatcttccaaatcaaattcctttccagttcttcccctggctgcctttttgggggtccctgccttagccccacacaaggctttctgaactgccaagaggggatctggcttctcaactgctcggcctcttgggccaggctgtgcccagccagccctgggagaactgggtagcaggtggctgacttctttaagcacctttctaaataccagcagaagaggctcccgcctctgttagcatgatcagtactattgtgacattaaaacaacaacaataagatcttcctatctggagggtacagaggtgaatggctttggttttcatttctcttcttcactgccttttctcggtgtggtatttgacaagattttagctcaaagcctcaccatgaattgattttttttgtttgtgtgtgtgtttgttttgggacaattttagatacctgagtgcactttttcagttagtcctaacttttaaaagaaggaaaaccaagagacatatctggtgtacgtgttgcagtatgaactctggttgcaatccctccccgtcccacactgccccccatttgagtacaccgcacaagtcaaacgctaggaagtttgaataaaaccaatttttctaacttgttgctcatttgttgtaactcaataaagcaaagactaaacatttttataaccttt

SEQ ID NO: 5296 - protein, 46 aa, Homo sapiens
MRSQIDQIAGVRLRQKVCRNWLNQTPTASLQRLARPRQGSLLELLC

SEQ ID NO: 5297 - DNA, 752 bp, Homo sapiens
gaggagagtgacctgtcagattaccaaaaatattccatctaacaggaagagagaccagaagctgtgaggttcttggaaaggaatggaagggcccgggagactcagcccctgaagtgatgttggcagttacatcataacagagagatgggagatgtctgcagtggctggagaaggacaaacctgaagacactagaaagaggagttgggtccagatacagcttcctgaaagatctcagcagacaagaagaatggagcaaatgcagcaattcagagaacagcatcaagtcccacatgagcaggaaacgcggccctgaggtgtcacgtcctgcgtgggctcttgggttcaaaacagaaagagattccttctctcatggaacttacatttttggactgaggagagacagacaataactgtgttttatagcaagagaactagaattagaagtggagcctgaagatgtgaatgaactgctgcaatctcatgataaagttgaacaaatgaagatttgcttcttatgaataagcaaagaaagtggtttcttgagatggaatccactcctggtgaagatgctgtgaacattattgaaatgacaacaaaggatttagactatgacttaaacttagttgataaagctgccgcagggtttaagaggattgactccaattttgaaagaagttctactgtgggtaagatgctatcaaacagcatcgcatgctacagagaaagcttttgttaaagagtcaatcgatgc

SEQ ID NO: 5298 - protein, 88 aa, Homo sapiens
MGDVCSGWRRTNLKTLERGVGSRYSFLKDLSRQEEWSKCSNSENSIKSHMSRKRGPEVSRPAWALGFKTERDSFSHGTYIFGLRRDRQ

SEQ ID NO: 5299 - DNA, 467 bp, Homo sapiens
agcctcctgccaaaaggtttcttagtgtgtttttatgtctccctgacatggaagcagcagggatgtttccccagcccctaaaacctctgcacattgtgctcacccagcagagggtgatgattcaggaggagtcagaaataaagaaaggaaggagtgtgcagccctcgccatggaaagccacacagccccctgcatggacgggaactagagttctgctgggcgctgggatgggatacaatggaggtgcctaggggcttgttgggggctgggccagctccgtgggcatctgtgcctcctctgtgagcaggctaagctatagtaagggcttatctcctttgttttaacagttggggctttggcttccatagcaatgatttgcaaatagggtaatttattggcttctctcctcctgccttgataaatctcatatcttacatcctttggagcctcatttgaaatcaaacact

SEQ ID NO: 5300 - protein, 67 aa, Homo sapiens
MEAAGMFPQPLKPLHIVLTQQRVMIQEESEIKKGRSVQPSPWKATQPPAWTGTRVLLGAGMGYNGGA

SEQ ID NO: 5301 - DNA, 3126 bp, Homo sapiens
acccaggtccatctgctcttcataaatatcacaggaattgatttgagactttatcttggccttagccaaagaagtcacagttcctgtttttattatttcagttttatgccttaaccaaaatgatttatgaatgagaacaacaaaaagaatgaaccacactaatttaccaaatcctaaactcaacacattatgtataaagtgttccaaggaatttttgagccaaaccaaatttcatccccccaaattacctatcgaactaattcaaaccagaaatcagctttgatatgttccacaacaatggaagcagggtatgacatatttcctaaagtgttactgcatttgacttaggacccttgaaggatagaaagaaaacagaaataactattcattttgtaatttatgttttaaggaaaagttactaattggaggaatatcccttttggccatgagctgatttgaggaattttgtaagtttttgagaataagtctaactacatggattggtttctgttttgtgcaggttactgtttttgtatctcaaagccaaaagccacaggcatggccacagttactgttcatctcagggatgtgaaagagtcaagatccaagcagccacagactcaaaggacatcagtaactgcatggccaaagcatacccacagtactacagaaagccgtcagtggtcaagcggatgccggccatgctcactggactctgtcaaggctgtggcactcggcaggtggtgtttactagtgatcctcataaaagttacctccctgtgcaattccagtcacctgataaagcagaaacccagcgtggagacccgtctgttatttctgtcaatggcactgactttaccttccgaagtgcaggcgtcctcctccttgttgtggatccgtgcagcgttccattccgcttgacggaaaaaacggtttttcctcttgctgatgtcagtcgcattgaagagtatttaaaaacaggcatccctccaaggtccattgttctgttgagcacaagaggagaaataaagcagttaaacatttcacacttactagtacctctgggattagccaaaccagctcatctttatgacaaagggagtaccatatttttgggattcagtggaaactttaaaccatcatggactaagctatttaccagtcctgctggacagggccttggggtgcttgaacaattcatacctttgcagctggacgaatatggttgtcccagagccaccactgtccgcagaagagacctggaactgctaaagcaagcttcaaaagcacattagagactaactgtaacttaagtgctgggggaaaaaaaatgtgaactaacttatttaatttatggcattttaaaatgacactgttaacccaacggaaccattttccagtttgatacagaatggggagaaaagaaagcgtttgaaattattgcttggataccagcttcatgcaccttctagttgtacaaaatgttaaagacgttgtttgtatttgtaaggctggtgtattcagagagcagatctcttattcctcactttccacccccgtattttgtaatgaccatgagcaatgtttttactttttgtataatggggtggggtggagtgggggcttctgagagtcagcctgaggtctttagaggaccagctattgtagcaccttggatacttgaagtttaatgctcagttgggtcgggtggcagttgacttggtggctggcatgttcagcagtgcctggggccctgtttctgggcagcctttgaggattttctatgatattgaatgacagttttaagtggcaactcaggcccagctcatgcccttttttgcctggacatgtgctatttttattcacttatatatcaattacttgtaagggttaaactttcaaacaggaagtatattgggacaaaagggctcttggggattagatatccctttaatctgtgaccattgggcaaaaaattttcctgcagcaaaagtctgaggctgttgggaccatttttgcagctttaatccttagcctcttttgactgtatatttgtgtttaaaatgcagagctcaactgaatatttccttttttgttttgttttgttttgttttaagaagtaggttgttttcctgaaccgtaaacttgtatcattttaacttgcacaaaggaagtctgttcttggtattgctcttgcacttgggttttttgttattgttttgtgtggattttttaaagcttttctgttcaccctcctgccaggaaaatcccagaaagcttaatgataccccaaaatgattacacccagggaggaaaaaaaggagcgctttctagggtcagaatcgtggagagaatactcagaaatgaacctctttaaagccttgcaggaatgagtcactcttacttaatgaaatgttaaagccaattaaaaagcatgctgtgatgcccagcttccctttccacagggtgcatgcgtctcctgctggtgaatcacatgcggcaagaggcaactggctccacagcctgggatgctgccgtaccaagaggaaagaagcagcaaaatgcctttacgttgttctaaacccccgacgcataaagtgtagaggagggatggccaagggtgggtggtagaaagtgtgttcaggctgacactggcaatgagtacagataatttcactttcctcttctaggggcaaaggctgatggcctctacctttgtatccaggagaaactgcagagcagccctgtgactttacaaaatatgctacctcaaagtgctaccgataaacctttctaattgtaagtgcccttactaagggcacatgtcttaatcaaagttagttttttgttttctggtttgttttttttttttgtatattgatgaatgagatcttacctattaaatatattattggattatggttcctgaaggtcattagagtgtgtgtgtgtgtgtgtgtgtgtgtgtgtgttttatgacttaaatatctttacgtgtgttttttagagcttggttctttaaagatttggagaagatatgtaaattaccaaggcacttggtttttctgttttatatactaataatcagggcctaagttaaataaaaatatgtgtgcatgtatttta

SEQ ID NO: 5302 - protein, 217 aa, Homo sapiens
MAKAYPQYYRKPSVVKRMPAMLTGLCQGCGTRQVVFTSDPHKSYLPVQFQSPDKAETQRGDPSVISVNGTDFTFRSAGVLLLVVDPCSVPFRLTEKTVFPLADVSRIEEYLKTGIPPRSIVLLSTRGEIKQLNISHLLVPLGLAKPAHLYDKGSTIFLGFSGNFKPSWTKLFTSPAGQGLGVLEQFIPLQLDEYGCPRATTVRRRDLELLKQASKAH

SEQ ID NO: 5303 - DNA, 6152 bp, Homo sapiens
agttgagtacgagcggcagctgcgggcgccggcaatcgagtggcttcctggccatggagaggagatctggacccgaggacgccagggactcctctccgtctccctggaccgctgtgtaggcacctgagttaacggacgctaagcggggtaggggaagtaacagtgtatcatgtatgccactgattccaggggacactcccctgctttcctccaacctcagaatggaaatagtcgtcacccatctggctatgttccagggaaggttgtcccattgcgtccccctcctcctccaaagagtcaagcttcagccaaatttacctccatcagacgagaagaccgggcaaccttcgcattctcacctgaagaacagcaagcccagagagaaagtcaaaagcaaaagagacacaaaaatactttcatttgttttgctattactagtttctcattttttattgcacttgcaatcattttaggaatatcctcaaaatatgctccagatgaaaattgcccagatcaaaatcctcgtctcaggaattgggatccaggacaagattctgcaaagcaagttgttatcaaggagggagatatgctccgtctgacctcagacgccaccgtgcattctatagtcattcaggatggaggactgcttgtatttggggacaataaagatggatccagaaatattactttgaggactcattacatcctgatccaggatggtggggcgcttcatattggagcagaaaaatgccgctataaatccaaagcgacaattaccttgtatggcaagtcagatgaaggtgaaagtatgccaacatttggcaaaaagtttattggtgtggaagctggcgggacactggagttacatggggcacggaaggcatcgtggacgttgttggcaaggaccctgaattcctcaggcttgccctttgggtcctatacctttgaaaaggacttttcccggggcctcaatgtgagggtcattgaccaagacacggccaaaattttggaaagtgagagatttgatacccatgaataccgcaatgagagcaggcggcttcaggagtttctgagattccaggatccaggtcggattgttgccatagctgtcggggattcagccgctaaaagtctcttacaaggaaccatccagatgatccaggaacggttgggaagtgaactgatccaaggactgggctacaggcaagcttgggctttagttggtgtcattgatggtggaagcacttcttgcaatgaatccgtgagaaactatgaaaatcatagcagtggcgggaaggctcttgcccaaagagaattttatactgtggatggccagaagttctctgtgacagcttatagtgaatggattgaaggcgtttctctttcaggattccgggtagaggttgtagatggagtgaagctaaatttgctagatgatgttagtagttggaaacctggagaccagattgtggtcgcaagcacagactattccatgtaccaagcagaggagttcactcttcttccctgttctgaatgcagccattttcaggtcaaagtcaaagaaacccctcagttcctgcacatgggtgagatcatagacggtgtagacatgagagctgaggttggaattcttacccggaatattgtgatccaaggagaagtggaggactcatgctacgcagaaaatcagtgccaattttttgattatgatacctttgggggacacattatgataatgaaaaattttacttcagtccatctttcttatgtggaattgaaacacatgggtcagcagcagatggggcgataccctgttcattttcacctgtgtggtgacgtggattataaaggaggatacagacatgcaacatttgtggacggcctgtctattcatcacagcttctcaaggtgcatcactgtgcatgggacaaatggcttgctaataaaagacaccattgggtttgacacactaggtcattgtttctttttggaagatggtattgaacagaggaatactttgttccacaatctgggactcctcaccaagccgggtactctcctgcccaccgataggaacaactccatgtgtaccaccatgcgagataaagtgtttggaaattacattcctgtgcctgctactgactgtatggctgtttcaactttctggattgctcatcccaacaataatctgattaataatgcagctgcaggctcacaggatgctggaatatggtatttattccacaaggaaccaactggggaatccagtggattgcagctcttggcaaaaccagaactcactccattgggtatattttataacaacagggtccattcaaattttaaggctggcttatttattgacaaaggtgtcaaaacaaccaactctagtgctgctgacccaagggaatacctctgtttggacaatagtgcaagatttcgacctcatcaggatgcaaaccccgaaaaaccacgtgttgctgctctaattgacaggctcattgcttttaaaaataatgataatggagcttgggtcagaggaggagatattatcgttcaaaattcagcatttgcagataatggaataggactgacctttgccagtgatggaagcttcccaagtgatgaaggttccagccaagaggtatctgaatctctctttgttggggagagcaggaattacggctttcagggtggtcagaacaagtatgtaggcactggaggaatagaccagaagcctcgaacattacccaggaacaggacgttcccaattagaggctttcagatttatgatgggcccattcatctcacaaggagcactttcaaaaaatatgtgccaactccagataggtacagcagtgcaattggcttcctcatgaagaattcctggcagataacccccaggaataatatctccctcgtgaagtttggtccacatgtctctctgaatgtcttttttggaaagcctggtccctggtttgaagattgtgagatggatggtgataagaactccatattccatgacattgatggctctgtgacaggatacaaggatgcttatgtgggaagaatggacaactacctgatccgccatccaagctgtgtaaatgtgtctaagtggaatgcagtgatctgcagtgggacctatgcacaggtctatgtacagacatggagcactcagaatctttctatgaccattacacgagatgagtatccgtccaaccctatggtgctccgaggtattaatcagaaggctgcctttccacagtaccagcctgtcgtcatgctggagaagggttataccatccactggaatgggccggcaccacggactacatttctatacctcgtcaacttcaacaagaatgactggattcgagttggcctttgctatccatcaaacacaagttttcaagttacctttggctatttgcagcggcagaatggctcattatccaaaatcgaagaatatgagcctgtgcattcactggaagaactgcaaagaaagcaatccgagaggaaattctattttgactccagcacggggttactgtttttgtatctcaaagccaaaagccacaggcatggccacagttactgttcatctcagggatgtgaaagagtcaagatccaagcagccacagactcaaaggacatcagtaactgcatggccaaagcatacccacagtactacagaaagccgtcagtggtcaagcggatgccggccatgctcactggactctgtcaaggctgtggcactcggcaggtggtgtttactagtgatcctcataaaagttacctccctgtgcaattccagtcacctgataaagcagaaacccagcgtggagacccgtctgttatttctgtcaatggcactgactttaccttccgaagtgcaggcgtcctcctccttgttgtggatccgtgcagcgttccattccgcttgacggaaaaaacggtttttcctcttgctgatgtcagtcgcattgaagagtatttaaaaacaggcatccctccaaggtccattgttctgttgagcacaagaggagaaataaagcagttaaacatttcacacttactagtacctctgggattagccaaaccagctcatctttatgacaaagggagtaccatatttttgggattcagtggaaactttaaaccatcatggactaagctatttaccagtcctgctggacagggccttggggtgcttgaacaattcatacctttgcagctggacgaatatggttgtcccagagccaccactgtccgcagaagagacctggaactgctaaagcaagcttcaaaagcacattagagactaactgtaacttaagtgctgggggaaaaaaaatgtgaactaacttatttaatttatggcattttaaaatgacactgttaacccaacggaaccattttccagtttgatacagaatggggagaaaagaaagcgtttgaaattattgcttggataccagcttcatgcaccttctagttgtacaaaatgttaaagacgttgtttgtatttgtaaggctggtgtattcagagagcagatctcttattcctcactttccacccccgtattttgtaatgaccatgagcaatgtttttactttttgtataatggggtggggtggagtgggggcttctgagagtcagcctgaggtctttagaggaccagctattgtagcaccttggatacttgaagtttaatgctcagttgggtcgggtggcagttgacttggtggctggcatgttcagcagtgcctggggccctgtttctgggcagcctttgaggattttctatgatattgaatgacagttttaagtggcaactcaggcccagctcatgcccttttttgcctggacatgtgctatttttattcacttatatatcaattacttgtaagggttaaactttcaaacaggaagtatattgggacaaaagggctcttggggattagatatccctttaatctgtgaccattgggcaaaaaattttcctgcagcaaaagtctgaggctgttgggaccatttttgcagctttaatccttagcctcttttgactgtatatttgtgtttaaaatgcagagctcaactgaatatttccttttttgttttgttttgttttgttttaagaagtaggttgttttcctgaaccgtaaacttgtatcattttaacttgcacaaaggaagtctgttcttggtattgctcttgcacttgggttttttgttattgttttgtgtggattttttaaagcttttctgttcaccctcctgccaggaaaatcccagaaagcttaatgataccccaaaatgattacacccagggaggaaaaaaaggagcgctttctagggtcagaatcgtggagagaatactcagaaatgaacctctttaaagccttgcaggaatgagtcactcttacttaatgaaatgttaaagccaattaaaaagcatgctgtgatgcccagcttccctttccacagggtgcatgcgtctcctgctggtgaatcacatgcggcaagaggcaactggctccacagcctgggatgctgccgtaccaagaggaaagaagcagcaaaatgcctttacgttgttctaaacccccgacgcataaagtgtagaggagggatggccaagggtgggtggtagaaagtgtgttcaggctgacactggcaatgagtacagataatttcactttcctcttctaggggcaaaggctgatggcctctacctttgtatccaggagaaactgcagagcagccctgtgactttacaaaatatgctacctcaaagtgctaccgataaacctttctaattgtaagtgcccttactaagggcacatgtcttaatcaaagttagttttttgttttctggtttgttttttttttttgtatattgatgaatgagatcttacctattaaatatattattggattatggttcctgaaggtcattagagtgtgtgtgtgtgtgtgtgtgtgtgtgtgtgttttatgacttaaatatctttacgtgtgttttttagagcttggttctttaaagatttggagaagatatgtaaattaccaaggcacttggtttttctgttttatatactaataatcagggcctaagttaaataaaaatatgtgtgcatgtatttta

SEQ ID NO: 5304 - protein, 1383 aa, Homo sapiens; identical to SEQ ID NO: 686

SEQ ID NO: 5305 - DNA, 720 bp, Homo sapiens
acaggagagaaacctttctttttctgggttggtgagaccctgcctggaggcaaggagatgaactcagggtgttttctgcctttgccgcagatgttgatttatacacccgctttcatttaatggaaccattaaggaaggaacttaagctttccccaaattaaaggcctatctagctttagaatcattttccaatagcttatgctttatagaaccggatgccaataaattctatgaagtcactggattatttggatgtaacattaaatgtatatatgtcgttctgtcttctggcttaagacacttgtacagcctcaattttcttgcaggatttaaagatttttcctaatgttgaaaatacatgcactcacttcccctaaaacaatccaggacataaatctcaccacaagtatttaggacaacatggtagtcctgcaaggtaccccatagatttaagaggtaaaaccaactcattaacagaaaggcttttaagatactggtaatgctgtttcttgatctgcctctggttatgcagataggtttcgtttgcaaaaattcagtgtgttgtgttttatgacttaaatatctttacgtgtgttttttagagcttggttctttaaagatttggagaagatatgtaaattaccaaggcacttggtttttctgttttatatactaataatcagggcctaagttaaataaaaatatgtgtgcatgtatttt

SEQ ID NO: 5306 - protein, 66 aa, Homo sapiens
AFPKLKAYLALESFSNSLCFIEPDANKFYEVTGLFGCNIKCIYVVLSSGLRHLYSLNFLAGFKDFS

SEQ ID NO: 5307 - DNA, 3510 bp, Homo sapiens
ggatatgcaacagaagttgaataaaaggagagactctgtttctgaatggaaaattaataaatgttaatttcatggaccagtttcatggaagataatttttccatggactggaggtggagggggatggtttcaggatgattcaagtgcattacatttacttagttaaaatataaatttgacacatttccattagtgtcccaaaaggtacttttctactgtacttgacagttgatactgtagttcatctggaagaataaatgagaaagtagtaaaatataaacaaattacagtaatacaagggcttgtttttatcaaatattaaaatggaccgtgaagccataggccagcatagttttggcagagaagagcaagatcagagaagaacggagaatccacagataggtccaagtatgtatgttggcttactatgtgacaaaaatggtaattcaaaccatggaaaacacatttagtcgtttatttatttttagaattgtgtttatccatttatttaataaatagataatagaacttaaataaatagagtatttgaaacaaaacaaaaccattctcccatgttacagtagacttactccctgatagacaatggagaaggaagggtgaggggtggatgacaggaaattactgaataggcacagtgtacattatttgggtgatggataccctaagtgccctgacttcaccactatgcaatcctatgtatgtaatgaaattgcacttgtgcctcacaaatttatacaaattataaacaacaacaacaacaatagactattccctaaaagagctgtgccccagaccatccactaggtcagcagtccccagcctttttgacatcagggactggtttcatggaagataatttttccatggactggaggtgaagggggatggtttcaggatgattgaagcacattacatttactgtgcactttttttctattattattacattgcaatatataatgaaataattacacagctcaccataatgtaaagtcagtgggagccctgagcttgttttcctgcaactagatggtcccatctgggggtgatgatcaacagatcattgggcattagattctcaggagcacacaacctagatccctcacatgtgcagttcccaatagggttctgctcctatgagagttgaatgccacagctgacctgacaggaggcggagctcaggctgtaatgcaagtgttgtggggtggctgtaaatacagatgaagcttcgctcgcctgctcacctcctgctgtgcaacttggttcctaatctactggtacccatccatggcccaggggttgggaagccctgcactaggtgaacgtacgtaaatgatttggtttatgtatgcgttaccccttgtaagagcaacgtgtgaagcccatggtggtggggtggaagagtgggaattggatggaaaatcatctagacttttttctttttggagttctgcttttatctaatatttctattcagcagtcagttcagaaagatactcagtagaaagatactcatgctgaaggattgaaattggctctgactttctaaatttcacatacaggtccattgttctgttgagcacaagaggagaaataaagcagttaaacatttcacacttactagtacctctgggattagccaaaccagctcatctttatgacaaagggagtaccatatttttgggattcagtggaaactttaaaccatcatggactaagctatttaccagtcctgctggacagggccttggggtgcttgaacaattcatacctttgcagctggacgaatatggttgtcccagagccaccactgtccgcagaagagacctggaactgctaaagcaagcttcaaaagcacattagagactaactgtaacttaagtgctgggggaaaaaaaatgtgaactaacttatttaatttatggcattttaaaatgacactgttaacccaacggaaccattttccagtttgatacagaatggggagaaaagaaagcgtttgaaattattgcttggataccagcttcatgcaccttctagttgtacaaaatgttaaagacgttgtttgtatttgtaaggctggtgtattcagagagcagatctcttattcctcactttccacccccgtattttgtaatgaccatgagcaatgtttttactttttgtataatggggtggggtggagtgggggcttctgagagtcagcctgaggtctttagaggaccagctattgtagcaccttggatacttgaagtttaatgctcagttgggtcgggtggcagttgacttggtggctggcatgttcagcagtgcctggggccctgtttctgggcagcctttgaggattttctatgatattgaatgacagttttaagtggcaactcaggcccagctcatgcccttttttgcctggacatgtgctatttttattcacttatatatcaattacttgtaagggttaaactttcaaacaggaagtatattgggacaaaagggctcttggggattagatatccctttaatctgtgaccattgggcaaaaaattttcctgcagcaaaagtctgaggctgttgggaccatttttgcagctttaatccttagcctcttttgactgtatatttgtgtttaaaatgcagagctcaactgaatatttccttttttgttttgttttgttttgttttaagaagtaggttgttttcctgaaccgtaaacttgtatcattttaacttgcacaaaggaagtctgttcttggtattgctcttgcacttgggttttttgttattgttttgtgtggattttttaaagcttttctgttcaccctcctgccaggaaaatcccagaaagcttaatgataccccaaaatgattacacccagggaggaaaaaaaggagcgctttctagggtcagaatcgtggagagaatactcagaaatgaacctctttaaagccttgcaggaatgagtcactcttacttaatgaaatgttaaagccaattaaaaagcatgctgtgatgcccagcttccctttccacagggtgcatgcgtctcctgctggtgaatcacatgcggcaagaggcaactggctccacagcctgggatgctgccgtaccaagaggaaagaagcagcaaaatgcctttacgttgttctaaacccccgacgcataaagtgtagaggagggatggccaagggtgggtggtagaaagtgtgttcaggctgacactggcaatgagtacagataatttcactttcctcttctaggggcaaaggctgatggcctctacctttgtatccaggagaaactgcagagcagccctgtgactttacaaaatatgctacctcaaagtgctaccgataaacctttctaattgtaagtgcccttactaagggcacatgtcttaatcaaagttagttttttgttttctggtttgttttttttttttgtatattgatgaatgagatcttacctattaaatatattattggattatg

SEQ ID NO: 5308 - protein, 60 aa, Homo sapiens
MTKGVPYFWDSVETLNHHGLSYLPVLLDRALGCLNNSYLCSWTNMVVPEPPLSAEETWNC

SEQ ID NO: 5309 - DNA, 5947 bp, Homo sapiens
agttgagtacgagcggcagctgcgggcgccggcaatcgagtggcttcctggccatggagaggagatctggacccgaggacgccagggactcctctccgtctccctggaccgctgtgtaggcacctgagttaacggacgctaagcggggtaggggaagtaacagtgtatcatgtatgccactgattccaggggacactcccctgctttcctccaacctcagaatggaaatagtcgtcacccatctggctatgttccagggaaggttgtcccattgcgtccccctcctcctccaaagagtcaagcttcagccaaatttacctccatcagacgagaagaccgggcaaccttcgcattctcacctgaagaacagcaagcccagagagaaagtcaaaagcaaaagagacacaaaaatactttcatttgttttgctattactagtttctcattttttattgcacttgcaatcattttaggaatatcctcaaaatatgctccagatgaaaattgcccagatcaaaatcctcgtctcaggaattgggatccaggacaagattctgcaaagcaagttgttatcaaggagggagatatgctccgtctgacctcagacgccaccgtgcattctatagtcattcaggatggaggactgcttgtatttggggacaataaagatggatccagaaatattactttgaggactcattacatcctgatccaggatggtggggcgcttcatattggagcagaaaaatgccgctataaatccaaagcgacaattaccttgtatggcaagtcagatgaaggtgaaagtatgccaacatttggcaaaaagtttattggtgtggaagctggcgggacactggagttacatggggcacggaaggcatcgtggacgttgttggcaaggaccctgaattcctcaggcttgccctttgggtcctatacctttgaaaaggacttttcccggggcctcaatgtgagggtcattgaccaagacacggccaaaattttggaaagtgagagatttgatacccatgaataccgcaatgagagcaggcggcttcaggagtttctgagattccaggatccaggtcggattgttgccatagctgtcggggattcagccgctaaaagtctcttacaaggaaccatccagatgatccaggaacggttgggaagtgaactgatccaaggactgggctacaggcaagcttgggctttagttggtgtcattgatggtggaagcacttcttgcaatgaatccgtgagaaactatgaaaatcatagcagtggcgggaaggctcttgcccaaagagaattttatactgtggatggccagaagttctctgtgacagcttatagtgaatggattgaaggcgtttctctttcaggattccgggtagaggttgtagatggagtgaagctaaatttgctagatgatgttagtagttggaaacctggagaccagattgtggtcgcaagcacagactattccatgtaccaagcagaggagttcactcttcttccctgttctgaatgcagccattttcaggtcaaagtcaaagaaacccctcagttcctgcacatgggtgagatcatagacggtgtagacatgagagctgaggttggaattcttacccggaatattgtgatccaaggagaagtggaggactcatgctacgcagaaaatcagtgccaattttttgattatgatacctttgggggacacattatgataatgaaaaattttacttcagtccatctttcttatgtggaattgaaacacatgggtcagcagcagatggggcgataccctgttcattttcacctgtgtggtgacgtggattataaaggaggatacagacatgcaacatttgtggacggcctgtctattcatcacagcttctcaaggtgcatcactgtgcatgggacaaatggcttgctaataaaagacaccattgggtttgacacactaggtcattgtttctttttggaagatggtattgaacagaggaatactttgttccacaatctgggactcctcaccaagccgggtactctcctgcccaccgataggaacaactccatgtgtaccaccatgcgagataaagtgtttggaaattacattcctgtgcctgctactgactgtatggctgtttcaactttctggattgctcatcccaacaataatctgattaataatgcagctgcaggctcacaggatgctggaatatggtatttattccacaaggaaccaactggggaatccagtggattgcagctcttggcaaaaccagaactcactccattgggtatattttataacaacagggtccattcaaattttaaggctggcttatttattgacaaaggtgtcaaaacaaccaactctagtgctgctgacccaagggaatacctctgtttggacaatagtgcaagatttcgacctcatcaggatgcaaaccccgaaaaaccacgtgttgctgctctaattgacaggctcattgcttttaaaaataatgataatggagcttgggtcagaggaggagatattatcgttcaaaattcagcatttgcagataatggaataggactgacctttgccagtgatggaagcttcccaagtgatgaaggttccagccaagaggtatctgaatctctctttgttggggagagcaggaattacggctttcagggtggtcagaacaagtatgtaggcactggaggaatagaccagaagcctcgaacattacccaggaacaggacgttcccaattagaggctttcagatttatgatgggcccattcatctcacaaggagcactttcaaaaaatatgtgccaactccagataggtacagcagtgcaattggcttcctcatgaagaattcctggcagataacccccaggaataatatctccctcgtgaagtttggtccacatgtctctctgaatgtcttttttggaaagcctggtccctggtttgaagattgtgagatggatggtgataagaactccatattccatgacattgatggctctgtgacaggatacaaggatgcttatgtgggaagaatggacaactacctgatccgccatccaagctgtgtaaatgtgtctaagtggaatgcagtgatctgcagtgggacctatgcacaggtctatgtacagacatggagcactcagaatctttctatgaccattacacgagatgagtatccgtccaaccctatggtgctccgaggtattaatcagaaggctgcctttccacagtaccagcctgtcgtcatgctggagaagggttataccatccactggaatgggccggcaccacggactacatttctatacctcgtcaacttcaacaagaatgactggattcgagttggcctttgctatccatcaaacacaagttttcaagttacctttggctatttgcagcggcagaatggctcattatccaaaatcgaagaatatgagcctgtgcattcactggaagaactgcaaagaaagcaatccgagaggaaattctattttgactccagcacggggttactgtttttgtatctcaaagccaaaagccacaggcatggccacagttactgttcatctcagggatgtgaaagagtcaagatccaagcagccacagactcaaaggacatcagtaactgcatggccaaagcatacccacagtactacagaaagccgtcagtggtcaagcggatgccggccatgctcactggactctgtcaaggctgtggcactcggcaggtggtgtttactagtgatcctcataaaagttacctccctgtgcaattccagtcacctgataaagcagaaacccagcgtggagacccgtctgttatttctgtcaatggcactgactttaccttccgaagtgcaggcgtcctcctccttgttgtggatccgtgcagcgttccattccgcttgacggaaaaaacggtttttcctcttgctgatgtcagtcgcattgaagagtatttaaaaacaggcatccctccaaggtccattgttctgttgagcacaagaggagaaataaagcagttaaacatttcacacttactagtacctctgggattagccaaaccagctcatctttatgacaaagggagtaccatatttttgggattcagtggaaactttaaaccatcatggactaagctatttaccagtcctgctggacagggccttggggtgcttgaacaattcatacctttgcagctggacgaatatggttgtcccagagccaccactgtccgcagaagagacctggaactgctaaagcaagcttcaaaagcacattagagactaactgtaacttaagtgctgggggaaaaaaaatgtgaactaacttatttaatttatggcattttaaaatgacactgttaacccaacggaaccattttccagtttgatacagaatggggagaaaagaaagcgtttgaaattattgcttggataccagcttcatgcaccttctagttgtacaaaatgttaaagacgttgtttgtatttgtaaggctggtgtattcagagagcagatctcttattcctcactttccacccccgtattttgtaatgaccatgagcaatgtttttactttttgtataatggggtggggtggagtgggggcttctgagagtcagcctgaggtctttagaggaccagctattgtagcaccttggatacttgaagtttaatgctcagttgggtcgggtggcagttgacttggtggctggcatgttcagcagtgcctggggccctgtttctgggcagcctttgaggattttctatgatattgaatgacagttttaagtggcaactcaggcccagctcatgcccttttttgcctggacatgtgctatttttattcacttatatatcaattacttgtaagggttaaactttcaaacaggaagtatattgggacaaaagggctcttggggattagatatccctttaatctgtgaccattgggcaaaaaattttcctgcagcaaaagtctgaggctgttgggaccatttttgcagctttaatccttagcctcttttgactgtatatttgtgtttaaaatgcagagctcaactgaatatttccttttttgttttgttttgttttgttttaagaagtaggttgttttcctgaaccgtaaacttgtatcattttaacttgcacaaaggaagtctgttcttggtattgctcttgcacttgggttttttgttattgttttgtgtggattttttaaagcttttctgttcaccctcctgccaggaaaatcccagaaagcttaatgataccccaaaatgattacacccagggaggaaaaaaaggagcgctttctagggtcagaatcgtggagagaatactcagaaatgaacctctttaaagccttgcaggaatgagtcactcttacttaatgaaatgttaaagccaattaaaaagcatgctgtgatgcccagcttccctttccacagggtgcatgcgtctcctgctggtgaatcacatgcggcaagaggcaactggctccacagcctgggatgctgccgtaccaagaggaaagaagcagcaaaatgcctttacgttgttctaaacccccgacgcataaagtgtagaggagggatggccaagggtgggtggtagaaagtgtgttcaggctgacactggcaatgagtacagataatttcactttcctcttctaggggcaaaggctgatggcctctacctttgtatccaggagaaactgcagagcagccctgtgactttacaaaatatgctacctcaaagtgctaccgataaacctttctaattgtaagtgcccttactaagggcacatgtcttaatcaaagttagttttttgttttctggtttgttttttttttttgtatattgatgaatgagatcttacctattaaatatattattggattatg

SEQ ID NO: 5310 - protein, 1383 aa, Homo sapiens; identical to SEQ ID NO: 686

SEQ ID NO: 5311 - DNA, 2194 bp, Homo sapiens
ggtggaagtgaggcaaggctgggctccgtctctccccccgcccgctagtaggctggagccggggtcagctttggcaccttcctccagtcagtggccaactcctggctcagtggggattgtgctcgtcccctccgttcccctccagtcttcctcccgctaccggaacgagcctcgcgcttggcaggctgaggaggagcaaagaaagcaggattaaagagaaggaagacctggctaggtctgggtggcgtctgcagtgccagaaagggaggcggtggcggcggcggctgcgaccacggccgcgcgggacgtgaggcccgagagcaaccgacgggcagcggcggccgctccagcgccccgcaccggggccgttagtcagcagaacgcgagctcttgtggaggagcagggccggcgcgaggcgagactcgggagcgtgagcggggcccctggggcgccgccgtccttcttcgccccggcgccgggggctgtagccctggtccccgctcctctgtcgggccagtctgcaggcggagagagtcggacggcgcccggagcgcggatctcgccttgtggaggacagcgcgtcggctgcggttctctctcgaccccttctgcccggcgcttcggcccgggccgctcaggtgcagagcatgaataatctttcatttagtgagctatgttgcctcttctgctgtccaccttgtccagggaagattgcttcaaaattagcgtttttgccacctgatccaacttacacactgatgtgtgatgaaagcggaagccgttggactttacatctgtctgaacgagcagactggcagtattcttctagagaaaaagatgctattgagtgtttcatgactagaaccagtaaaggcaacagaattgcttgtatgtttgtacgttgttcacccaatgcgaaatacactttactcttctcacatggaaatgctgttgatcttggtcaaatgagcagcttttacataggactaggatcacggattaattgtaatatattctcatatgattattctggatatggtgccagttccgggaaacccacagagaagaacctctatgcagacattgaagctgcttggcttgctcttaggacaagatatggcattcgccctgaaaatgtgattatatatggccaaagtatagggacagtaccgtctgtggatcttgctgctcgatatgagagtgctgctgttattcttcattctcctctgacttcgggaatgcgagttgcctttcctgataccaagaagacctactgttttgatgcattcccaaacattgacaaaatctctaagataacctctccagtattaataattcatgggactgaagatgaagtcattgacttttcacatggcctcgcattgtttgaacgttgccaaagacctgtggagcctctctgggttgaaggagcaggtcacaatgatgtggaactttatggacagtatcttgaaaggttgaaacagtttgtgtcacaggaactggtgcagaaacataaagaagggaagtgattttctcaaggtctacagttttcaatgacggtactatgtattccattatcttctctttaccaaacttaactggattaatataccaatgatcctttcaaattatatgacataaacttatttgctctccaatgttagtcacaattgtatttttttaatgggtaggttcctccttgtcagttattcattgaatagtaaattggtagattgtgccaattaattctcaagttaatgattatttaaagaatttaatactaattcattttactaggcacagttacagttagttatgttgaaacctagtgaggatggtagccacagacacatgaataaacaagtgtttacttcagaagctgatttactataaattgtaacacacagaataagcaattacattgaaaaaagtatcaatatagttactacgaattagcttttagcttgttgctttgttttaaaataggcaatttattcaaacatgataacatgttgtattctgataatgtgcaccccaaatgtccagtaaccaaaaaagtaacaatttatgcttacgatacttggaattaggctttgagtttgagcttgcagaatggagaagacatttgtctatcgtatctctaaatggattatgcctctgactgaatagttgaatgagtaatgctaaggaagg

SEQ ID NO: 5312 - protein, 293 aa, Homo sapiens; identical to SEQ ID NO: 690

SEQ ID NO: 5313 - DNA, 3149 bp, Homo sapiens
ggtggaagtgaggcaaggctgggctccgtctctccccccgcccgctagtaggctggagccggggtcagctttggcaccttcctccagtcagtggccaactcctggctcagtggggattgtgctcgtcccctccgttcccctccagtcttcctcccgctaccggaacgagcctcgcgcttggcaggctgaggaggagcaaagaaagcaggattaaagagaaggaagacctggctaggtctgggtggcgtctgcagtgccagaaagggaggcggtggcggcggcggctgcgaccacggccgcgcgggacgtgaggcccgagagcaaccgacgggcagcggcggccgctccagcgccccgcaccggggccgttagtcagcagaacgcgagctcttgtggaggagcagggccggcgcgaggcgagactcgggagcgtgagcggggcccctggggcgccgccgtccttcttcgccccggcgccgggggctgtagccctggtccccgctcctctgtcgggccagtctgcaggcggagagagtcggacggcgcccggagcgcggatctcgccttgtggaggacagcgcgtcggctgcggttctctctcgaccccttctgcccggcgcttcggcccgggccgctcaggtgcagagcatgaataatctttcatttagtgagctatgttgcctcttctgctgtccaccttgtccagggaagattgcttcaaaattagcgtttttgccacctgatccaacttacacactgatgtgtgatgaaagcggaagccgttggactttacatctgtctgaacgagcagactggcagtattcttctagagaaaaagatgctattgagtgtttcatgactagaaccagtaaaggcaacagaattgcttgtatgtttgtacgttgttcacccaatgcgaaatacactttactcttctcacatggaaatgctgttgatcttggtcaaatgagcagcttttacataggactaggatcacggattaattgtaatatattctcatatgattattctggatatggtgccagttccgggaaacccacagagaagaacctctatgcagacattgaagctgcttggcttgctcttaggacaagatatggcattcgccctgaaaatgtgattatatatggccaaagtatagggacagtaccgtctgtggatcttgctgctcgatatgagagtgctgctgttattcttcattctcctctgacttcgggaatgcgagttgcctttcctgataccaagaagacctactgttttgatgcattcccaaacattgacaaaatctctaagataacctctccagtattaataattcatgggactgaagatgaagtcattgacttttcacatggcctcgcattgtttgaacgttgccaaagacctgtggagcctctctgggttgaaggagcaggtcacaatgatgtggaactttatggacagtatcttgaaaggttgaaacagtttgtgtcacaggaactggtaaatttgtaaaatattctgtaaatttgctactgggttttcctttcttgctgaactgcactctttggtaaataacataaaacctgaaggttttgtttgcaaatcatgtcagttgccttcataaatgtacaggtaatgatttgttaacagacttaatgaaggttttaattaccagaactaaaaactggaaataacagtaccgtgcagtcaggctgtgtaatttatattttttctgtgaatttttttttaacatcaagatgagtactgtatgagattttaattctataaaatcaaatgctgtaaaagtattgccaaatgcttttgcatactagaaacaaatttataaatatttttaaaacatctcaatatattaaatcttatcctggaatacaactgtaatattttgaaaaaagctatgtatctaaagcaatttaagtactcataatggaatgaactgtaaaagagatttaaaaccatgcaagttcactagaattaacctaaaccctgttgtacagggatagaggtttaaagttattttattgtaaaatacattgaattttctgtatactctgattacatacatttatcctttaaaaaagatgtaaatcttaatttttatgccatctattaatttaccaatgagttaccttgtaaatgagaagtcatgatagcactgaattttaactagttttgacttctaagtttggtactgtgaggcaagtacttaaaattttcatgctggttacttaaaaggcatttagagatttcaagaatgattttgtatacgatgttttaaattttgactgatctcatagtcttcatagaattgcagtagtcttcattgtatgaaatcccgaaagtccatgagttgatcttaaagaccactaacagactggctatcagatcccttttcactttggctatttttttcattttttgagatggagtcttgctgtgtcactgaggctggagtgcagtggcgcgatcttgattcactgcaacctctgcctcccgggatcaagtgattctcctgcctcagcctcctgagtagctggtattacagatgcttgccaccacgcctggctaatttttgtatttttagtagagacagggttttgccatgttgatcaggctggtcttgaactcctgacctcatgatctgcccttggcctcccaaagtgtcggaattacaggcatgagccactgcgcctggcccactttagctatttttaaaaataggacctattgttttggattactatctgagaatttcatggattcactcctgggtataggagataagaatacgtttaattcataacttttatattaaccaatatagtaaaaaaataaagctcacacatacaaaaactaagttgcctttccttgaatgaaccctgtctgaataaaacaatgaaaaataaaaataaaattaatggtatgtagtctaatttgtaaatgaatgaatatggaaataatacacactgtggatatattttaaggccttatgtagttttaattgttctgctcgttccgtggttatgtttaagactatagtatatgactctcttcaaagtatatcaagtattgtgaatgctttggttcagatgtgtcaaattaacagtaaaacaacaaatataccactg

SEQ ID NO: 5314 - protein, 288 aa, Homo sapiens; identical to SEQ ID NO: 688

SEQ ID NO: 5315 - DNA, 2056 bp, Homo sapiens
gcgttctgctgactaacggccccggtgcggggcgctggagcggccgccgctgcccgtcggttgctctcgggcctcacgtcccgcgcggccgtggtcgcagccgccgccgccaccgcctccctttctggcactgcagacgccacccagacctagccaggtcttccttctctttaatcctgctttctttgctcctcctcagcctgccaagcgcgaggctcgttccggtagcgggaggaagactggaggggaacggaggggacgagcacaatccccactgagccaggagttggccactgactggaggaaggtgccaaagctgaccccggctccagcctactagcgggcggggggagagacggagcccagccttgcctcacttccaccaatcagaggccgcccggcagggtgggaggcgctctgagctcaaggagaggctgagctcgctcagcaggaggcggggattgcggaaaagaagaaccaataggaacaaaggttccccgcccctttgatttgatggactacacattcgggccaatgggggaattctcatttcgaagaaagtgggacttgttctccgggtttgagaaagaggctgcgcggagccggaggggtcgaggctgcgccgcgtggagtggcttggcttaacagcagggagggcagagcgatgctctttgacctcccagaagagtcacgtgggctgacccagagccggggcggaaaggctgcgtttgtttcttccgggtcattgacagaagcgtcaattcctgggagtagttcgttggttttctttcccctcatccttttgcctgctcccggcgaggggtggctttgatttcggcgatgagctcccagaaaggcaacgtggctcgttccagacctcagaagcaccagaatacgtttagcttcaaaaatgacaagttcgataaaagtgtgcagaccaagtctttatctgcaaactctagtcatgatgtttgagtttgtctccctgtggagcaggggtccccagcccccgacccccgcatcggtccatggcctgtcaggaactgggccacacagcaggagttgaactgcagaaaattaatgcaaaacttcatgatggagtatgtcagcgctgtaaagaagttcttgagtggcgtgtaaaatacagcaaatacaaaccattatcaaaacctaaaaagtgtgttaaatgtttacaaaagacagtgaaggattcttatcacataatgtgcaggccatgtgcctgtgaacttgaagtttgcgcaaaatgtggaaagaaagaagacattgttattccgttgaataaagaaacagaaaaaatagaacatactgaaaataatctaagttccaaccatagaagaagctgcagaagaaatgaagaaagtgatgatgatttagattttgatattgatttagaagacacaggaggagaccatcaaatgaattaatatcactgtattaaaagtctgccgggcacagtggctcacgcctgtaatcccaacactttgggaggccaaggagggtggatcacctgaggtcaggagttcgagaccagcctggccaacatggcggaaccccatctccactaaaagtacaaaaaattagctgggcgtggtggctcatgcctgtaatcccagctactcaggaggctgaggcaggaggattgcttgaaccctggaggcggagattgaagtgagctgagttcgtgccattacactccagcctgggtgacagagtgagactctgtctcaaaaaaaataaaataaaaagtcaatttagaatgtgaaattctgaccaccttttggctttgagtattttccaaaagatatttgaaatcctaatgaggaaatcagaaaaagctatggaaaaatagacaaatttcatacatgaacaatataaattgtgtatattacttaacatcaaactaaacaagattcagaattgatggttgtataagaactagctcatgtaaaaataaaataacattattacattgcctcaaaaattggtcctcggtaagtgccttttgataaatgatctcaaataaatgactcatagc

SEQ ID NO: 5316 - protein, 138 aa, Homo sapiens
MACQELGHTAGVELQKINAKLHDGVCQRCKEVLEWRVKYSKYKPLSKPKKCVKCLQKTVKDSYHIMCRPCACELEVCAKCGKKEDIVIPLNKETEKIEHTENNLSSNHRRSCRRNEESDDDLDFDIDLEDTGGDHQMN

SEQ ID NO: 5317 - DNA, 1925 bp, Homo sapiens
gcgttctgctgactaacggccccggtgcggggcgctggagcggccgccgctgcccgtcggttgctctcgggcctcacgtcccgcgcggccgtggtcgcagccgccgccgccaccgcctccctttctggcactgcagacgccacccagacctagccaggtcttccttctctttaatcctgctttctttgctcctcctcagcctgccaagcgcgaggctcgttccggtagcgggaggaagactggaggggaacggaggggacgagcacaatccccactgagccaggagttggccactgactggaggaaggtgccaaagctgaccccggctccagcctactagcgggcggggggagagacggagcccagccttgcctcacttccaccaatcagaggccgcccggcagggtgggaggcgctctgagctcaaggagaggctgagctcgctcagcaggaggcggggattgcggaaaagaagaaccaataggaacaaaggttccccgcccctttgatttgatggactacacattcgggccaatgggggaattctcatttcgaagaaagtgggacttgttctccgggtttgagaaagaggctgcgcggagccggaggggtcgaggctgcgccgcgtggagtggcttggcttaacagcagggagggcagagcgatgctctttgacctcccagaagagtcacgtgggctgacccagagccggggcggaaaggctgcgtttgtttcttccgggtcattgacagaagcgtcaattcctgggagtagttcgttggttttctttcccctcatccttttgcctgctcccggcgaggggtggctttgatttcggcgatgagctcccagaaaggcaacgtggctcgttccagacctcagaagcaccagaatacgtttagcttcaaaaatgacaagttcgataaaagtgtgcagaccaagaaaattaatgcaaaacttcatgatggagtatgtcagcgctgtaaagaagttcttgagtggcgtgtaaaatacagcaaatacaaaccattatcaaaacctaaaaagtgtgttaaatgtttacaaaagacagtgaaggattcttatcacataatgtgcaggccatgtgcctgtgaacttgaagtttgcgcaaaatgtggaaagaaagaagacattgttattccgttgaataaagaaacagaaaaaatagaacatactgaaaataatctaagttccaaccatagaagaagctgcagaagaaatgaagaaagtgatgatgatttagattttgatattgatttagaagacacaggaggagaccatcaaatgaattaatatcactgtattaaaagtctgccgggcacagtggctcacgcctgtaatcccaacactttgggaggccaaggagggtggatcacctgaggtcaggagttcgagaccagcctggccaacatggcggaaccccatctccactaaaagtacaaaaaattagctgggcgtggtggctcatgcctgtaatcccagctactcaggaggctgaggcaggaggattgcttgaaccctggaggcggagattgaagtgagctgagttcgtgccattacactccagcctgggtgacagagtgagactctgtctcaaaaaaaataaaataaaaagtcaatttagaatgtgaaattctgaccaccttttggctttgagtattttccaaaagatatttgaaatcctaatgaggaaatcagaaaaagctatggaaaaatagacaaatttcatacatgaacaatataaattgtgtatattacttaacatcaaactaaacaagattcagaattgatggttgtataagaactagctcatgtaaaaataaaataacattattacattgcctcaaaaattggtcctcggtaagtgccttttgataaatgatctcaaataaatgactcatagc

SEQ ID NO: 5318 - protein, 157 aa, Homo sapiens; identical to SEQ ID NO: 692

SEQ ID NO: 5319 - DNA, 1818 bp, Homo sapiens
gcgttctgctgactaacggccccggtgcggggcgctggagcggccgccgctgcccgtcggttgctctcgggcctcacgtcccgcgcggccgtggtcgcagccgccgccgccaccgcctccctttctggcactgcagacgccacccagacctagccaggtcttccttctctttaatcctgctttctttgctcctcctcagcctgccaagcgcgaggctcgttccggtagcgggaggaagactggaggggaacggaggggacgagcacaatccccactgagccaggagttggccactgactggaggaaggtgccaaagctgaccccggctccagcctactagcgggcggggggagagacggagcccagccttgcctcacttccaccaatcagaggccgcccggcagggtgggaggcgctctgagctcaaggagaggctgagctcgctcagcaggaggcggggattgcggaaaagaagaaccaataggaacaaaggttccccgcccctttgatttgatggactacacattcgggccaatgggggaattctcatttcgaagaaagtgggacttgttctccgggtttgagaaagaggctgcgcggagccggaggggtcgaggctgcgccgcgtggagtggcttggcttaacagcagggagggcagagcgatgctctttgacctcccagaagagtcacgtgggctgacccagagccggggcggaaaggctgcgtttgtttcttccgggtcattgacagaagcgtcaattcctgggagtagttcgttggttttctttcccctcatccttttgcctgctcccggcgaggggtggctttgatttcggcgatgagctcccagaaaggcaacgtggctcgttccagacctcagaagcaccagaatacgtttagcttcaaaaatgacaagttcgataaaagtgtgcagaccaagtgttaaatgtttacaaaagacagtgaaggattcttatcacataatgtgcaggccatgtgcctgtgaacttgaagtttgcgcaaaatgtggaaagaaagaagacattgttattccgttgaataaagaaacagaaaaaatagaacatactgaaaataatctaagttccaaccatagaagaagctgcagaagaaatgaagaaagtgatgatgatttagattttgatattgatttagaagacacaggaggagaccatcaaatgaattaatatcactgtattaaaagtctgccgggcacagtggctcacgcctgtaatcccaacactttgggaggccaaggagggtggatcacctgaggtcaggagttcgagaccagcctggccaacatggcggaaccccatctccactaaaagtacaaaaaattagctgggcgtggtggctcatgcctgtaatcccagctactcaggaggctgaggcaggaggattgcttgaaccctggaggcggagattgaagtgagctgagttcgtgccattacactccagcctgggtgacagagtgagactctgtctcaaaaaaaataaaataaaaagtcaatttagaatgtgaaattctgaccaccttttggctttgagtattttccaaaagatatttgaaatcctaatgaggaaatcagaaaaagctatggaaaaatagacaaatttcatacatgaacaatataaattgtgtatattacttaacatcaaactaaacaagattcagaattgatggttgtataagaactagctcatgtaaaaataaaataacattattacattgcctcaaaaattggtcctcggtaagtgccttttgataaatgatctcaaataaatgactcatagc

SEQ ID NO: 5320 - protein, 98 aa, Homo sapiens
MTSSIKVCRPSVKCLQKTVKDSYHIMCRPCACELEVCAKCGKKEDIVIPLNKETEKIEHTENNLSSNHRRSCRRNEESDDDLDFDIDLEDTGGDHQMN

SEQ ID NO: 5321 - DNA, 2267 bp, Homo sapiens
gcgttctgctgactaacggccccggtgcggggcgctggagcggccgccgctgcccgtcggttgctctcgggcctcacgtcccgcgcggccgtggtcgcagccgccgccgccaccgcctccctttctggcactgcagacgccacccagacctagccaggtcttccttctctttaatcctgctttctttgctcctcctcagcctgccaagcgcgaggctcgttccggtagcgggaggaagactggaggggaacggaggggacgagcacaatccccactgagccaggagttggccactgactggaggaaggtgccaaagctgaccccggctccagcctactagcgggcggggggagagacggagcccagccttgcctcacttccaccaatcagaggccgcccggcagggtgggaggcgctctgagctcaaggagaggctgagctcgctcagcaggaggcggggattgcggaaaagaagaaccaataggaacaaaggttccccgcccctttgatttgatggactacacattcgggccaatgggggaattctcatttcgaagaaagtgggacttgttctccgggtttgagaaagaggctgcgcggagccggaggggtcgaggctgcgccgcgtggagtggcttggcttaacagcagggagggcagagcgatgctctttgacctcccagaagagtcacgtgggctgacccagagccggggcggaaaggctgcgtttgtttcttccgggtcattgacagaagcgtcaattcctgggagtagttcgttggttttctttcccctcatccttttgcctgctcccggcgaggggtggctttgatttcggcgatgagctcccagaaaggcaacgtggctcgttccagacctcagaagcaccagaatacgtttagcttcaaaaatgacaagttcgataaaagtgtgcagaccaagtctttatctgcaaactctagtcatgatgtttgagtttgtctccctgtggagcaggggtccccagcccccgacccccgcatcggtccatggcctgtcaggaactgggccacacagcaggagttgaactgcagaaaattaatgcaaaacttcatgatggagtatgtcagcgctgtaaagaagttcttgagtggcgtgtaaaatacagcaaatacaaaccattatcaaaacctaaaaagtgtgttaaatgtttacaaaagacagtgaaggattcttatcacataatgtgcaggccatgtgcctgtgaacttgaagtttgcgcaaaatgtggaaagaaagaagacattgttattccgttgaataaagaaacagaaaaaatagaacatactgaaaataatctaagttccaaccatagaagaagctgcagaagaaatgaagaaagtgatgatgatttagattttgatattgatttagaagacacaggaggagaccatcaaatgaattaatatcactgtattaaaagtctgccgggcacagtggctcacgcctgtaatcccaacactttgggaggccaaggagggtggatcacctgaggtcaggagttcgagaccagcctggccaacatggcggaaccccatctccactaaaagtacaaaaaattagctgggcgtggtggctcatgcctgtaatcccagctactcaggaggctgaggcaggaggattgcttgaaccctggaggcggagattgaagtgagctgagttcgtgccattacactccagcctgggtgacagagtgagactctgtctcaaaaaaaataaaataaaaagtcaatttagaatgtgaaattctgaccaccttttggctttgagtattttccaaaagatatttgaaatcctaatgaggaaatcagaaaaagctatggaaaaatagacaaatttcatacatgaacaatataaattgtgtatattacttaacatcaaactaaacaagattcagaattgatggttgtataagaactagctcatgtaaaaataaaataacattattacattgcctcaaaaattggtcctcggtaagtgccttttgataaatgatctcaaataaatgactcatagcaaaagccctgtcgcttatgtttaatttttacaaagtaaaagcaattttttccaaataataatgtttaacaagcgtatagcaattctgctttgtatttttatatatttcatcacattttaacttttttctcgtgaaatgtacatacagaaaaagtgcatataatttatacactttataagtgtatgcattttttataataattataaaggaa

SEQ ID NO: 5322 - protein, 138 aa, Homo sapiens; identical to SEQ ID NO: 5316

SEQ ID NO: 5323 - DNA, 2136 bp, Homo sapiens
gcgttctgctgactaacggccccggtgcggggcgctggagcggccgccgctgcccgtcggttgctctcgggcctcacgtcccgcgcggccgtggtcgcagccgccgccgccaccgcctccctttctggcactgcagacgccacccagacctagccaggtcttccttctctttaatcctgctttctttgctcctcctcagcctgccaagcgcgaggctcgttccggtagcgggaggaagactggaggggaacggaggggacgagcacaatccccactgagccaggagttggccactgactggaggaaggtgccaaagctgaccccggctccagcctactagcgggcggggggagagacggagcccagccttgcctcacttccaccaatcagaggccgcccggcagggtgggaggcgctctgagctcaaggagaggctgagctcgctcagcaggaggcggggattgcggaaaagaagaaccaataggaacaaaggttccccgcccctttgatttgatggactacacattcgggccaatgggggaattctcatttcgaagaaagtgggacttgttctccgggtttgagaaagaggctgcgcggagccggaggggtcgaggctgcgccgcgtggagtggcttggcttaacagcagggagggcagagcgatgctctttgacctcccagaagagtcacgtgggctgacccagagccggggcggaaaggctgcgtttgtttcttccgggtcattgacagaagcgtcaattcctgggagtagttcgttggttttctttcccctcatccttttgcctgctcccggcgaggggtggctttgatttcggcgatgagctcccagaaaggcaacgtggctcgttccagacctcagaagcaccagaatacgtttagcttcaaaaatgacaagttcgataaaagtgtgcagaccaagaaaattaatgcaaaacttcatgatggagtatgtcagcgctgtaaagaagttcttgagtggcgtgtaaaatacagcaaatacaaaccattatcaaaacctaaaaagtgtgttaaatgtttacaaaagacagtgaaggattcttatcacataatgtgcaggccatgtgcctgtgaacttgaagtttgcgcaaaatgtggaaagaaagaagacattgttattccgttgaataaagaaacagaaaaaatagaacatactgaaaataatctaagttccaaccatagaagaagctgcagaagaaatgaagaaagtgatgatgatttagattttgatattgatttagaagacacaggaggagaccatcaaatgaattaatatcactgtattaaaagtctgccgggcacagtggctcacgcctgtaatcccaacactttgggaggccaaggagggtggatcacctgaggtcaggagttcgagaccagcctggccaacatggcggaaccccatctccactaaaagtacaaaaaattagctgggcgtggtggctcatgcctgtaatcccagctactcaggaggctgaggcaggaggattgcttgaaccctggaggcggagattgaagtgagctgagttcgtgccattacactccagcctgggtgacagagtgagactctgtctcaaaaaaaataaaataaaaagtcaatttagaatgtgaaattctgaccaccttttggctttgagtattttccaaaagatatttgaaatcctaatgaggaaatcagaaaaagctatggaaaaatagacaaatttcatacatgaacaatataaattgtgtatattacttaacatcaaactaaacaagattcagaattgatggttgtataagaactagctcatgtaaaaataaaataacattattacattgcctcaaaaattggtcctcggtaagtgccttttgataaatgatctcaaataaatgactcatagcaaaagccctgtcgcttatgtttaatttttacaaagtaaaagcaattttttccaaataataatgtttaacaagcgtatagcaattctgctttgtatttttatatatttcatcacattttaacttttttctcgtgaaatgtacatacagaaaaagtgcatataatttatacactttataagtgtatgcattttttataataattataaaggaa

SEQ ID NO: 5324 - protein, 157 aa, Homo sapiens; identical to SEQ ID NO: 692

SEQ ID NO: 5325 - DNA, 2029 bp, Homo sapiens
gcgttctgctgactaacggccccggtgcggggcgctggagcggccgccgctgcccgtcggttgctctcgggcctcacgtcccgcgcggccgtggtcgcagccgccgccgccaccgcctccctttctggcactgcagacgccacccagacctagccaggtcttccttctctttaatcctgctttctttgctcctcctcagcctgccaagcgcgaggctcgttccggtagcgggaggaagactggaggggaacggaggggacgagcacaatccccactgagccaggagttggccactgactggaggaaggtgccaaagctgaccccggctccagcctactagcgggcggggggagagacggagcccagccttgcctcacttccaccaatcagaggccgcccggcagggtgggaggcgctctgagctcaaggagaggctgagctcgctcagcaggaggcggggattgcggaaaagaagaaccaataggaacaaaggttccccgcccctttgatttgatggactacacattcgggccaatgggggaattctcatttcgaagaaagtgggacttgttctccgggtttgagaaagaggctgcgcggagccggaggggtcgaggctgcgccgcgtggagtggcttggcttaacagcagggagggcagagcgatgctctttgacctcccagaagagtcacgtgggctgacccagagccggggcggaaaggctgcgtttgtttcttccgggtcattgacagaagcgtcaattcctgggagtagttcgttggttttctttcccctcatccttttgcctgctcccggcgaggggtggctttgatttcggcgatgagctcccagaaaggcaacgtggctcgttccagacctcagaagcaccagaatacgtttagcttcaaaaatgacaagttcgataaaagtgtgcagaccaagtgttaaatgtttacaaaagacagtgaaggattcttatcacataatgtgcaggccatgtgcctgtgaacttgaagtttgcgcaaaatgtggaaagaaagaagacattgttattccgttgaataaagaaacagaaaaaatagaacatactgaaaataatctaagttccaaccatagaagaagctgcagaagaaatgaagaaagtgatgatgatttagattttgatattgatttagaagacacaggaggagaccatcaaatgaattaatatcactgtattaaaagtctgccgggcacagtggctcacgcctgtaatcccaacactttgggaggccaaggagggtggatcacctgaggtcaggagttcgagaccagcctggccaacatggcggaaccccatctccactaaaagtacaaaaaattagctgggcgtggtggctcatgcctgtaatcccagctactcaggaggctgaggcaggaggattgcttgaaccctggaggcggagattgaagtgagctgagttcgtgccattacactccagcctgggtgacagagtgagactctgtctcaaaaaaaataaaataaaaagtcaatttagaatgtgaaattctgaccaccttttggctttgagtattttccaaaagatatttgaaatcctaatgaggaaatcagaaaaagctatggaaaaatagacaaatttcatacatgaacaatataaattgtgtatattacttaacatcaaactaaacaagattcagaattgatggttgtataagaactagctcatgtaaaaataaaataacattattacattgcctcaaaaattggtcctcggtaagtgccttttgataaatgatctcaaataaatgactcatagcaaaagccctgtcgcttatgtttaatttttacaaagtaaaagcaattttttccaaataataatgtttaacaagcgtatagcaattctgctttgtatttttatatatttcatcacattttaacttttttctcgtgaaatgtacatacagaaaaagtgcatataatttatacactttataagtgtatgcattttttataataattataaaggaa

SEQ ID NO: 5326 - protein, 98 aa, Homo sapiens; identical to SEQ ID NO: 5320

SEQ ID NO: 5327 - DNA, 1252 bp, Homo sapiens
gcgttctgctgactaacggccccggtgcggggcgctggagcggccgccgctgcccgtcggttgctctcgggcctcacgtcccgcgcggccgtggtcgcagccgccgccgccaccgcctccctttctggcactgcagacgccacccagacctagccaggtcttccttctctttaatcctgctttctttgctcctcctcagcctgccaagcgcgaggctcgttccggtagcgggaggaagactggaggggaacggaggggacgagcacaatccccactgagccaggagttggccactgactggaggaaggtgccaaagctgaccccggctccagcctactagcgggcggggggagagacggagcccagccttgcctcacttccaccaatcagaggccgcccggcagggtgggaggcgctctgagctcaaggagaggctgagctcgctcagcaggaggcggggattgcggaaaagaagaaccaataggaacaaaggttccccgcccctttgatttgatggactacacattcgggccaatgggggaattctcatttcgaagaaagtgggacttgttctccgggtttgagaaagaggctgcgcggagccggaggggtcgaggctgcgccgcgtggagtggcttggcttaacagcagggagggcagagcgatgctctttgacctcccagaagagtcacgtgggctgacccagagccggggcggaaaggctgcgtttgtttcttccgggtcattgacagaagcgtcaattcctgggagtagttcgttggttttctttcccctcatccttttgcctgctcccggcgaggggtggctttgatttcggcgatgagctcccagaaaggcaacgtggctcgttccagacctcagaagcaccagaatacgtttagcttcaaaaatgacaagttcgataaaagtgtgcagaccaagaaaattaatgcaaaacttcatgatggagtatgtcagcgctgtaaagaagttcttgagtggcgtgtaaaatacagcaaatacaaaccattatcaaaacctaaaaagtgatggagtctccctctgttgcccaggctggagtgcagtggcaggatcttggctcaccacaacctccgcctcccttgttcaagtgattctcctgcctcagcctctcgagtagctgggactacaggcgcacaccaccatgcccagctaatctttgtatttttagtagagatggggtttcactatgttggccaggccggtctcgaac

SEQ ID NO: 5328 - protein, 69 aa, Homo sapiens
MSSQKGNVARSRPQKHQNTFSFKNDKFDKSVQTKKINAKLHDGVCQRCKEVLEWRVKYSKYKPLSKPKK

SEQ ID NO: 5329 - DNA, 1290 bp, Homo sapiens
gcgttctgctgactaacggccccggtgcggggcgctggagcggccgccgctgcccgtcggttgctctcgggcctcacgtcccgcgcggccgtggtcgcagccgccgccgccaccgcctccctttctggcactgcagacgccacccagacctagccaggtcttccttctctttaatcctgctttctttgctcctcctcagcctgccaagcgcgaggctcgttccggtagcgggaggaagactggaggggaacggaggggacgagcacaatccccactgagccaggagttggccactgactggaggaaggtgccaaagctgaccccggctccagcctactagcgggcggggggagagacggagcccagccttgcctcacttccaccaatcagaggccgcccggcagggtgggaggcgctctgagctcaaggagaggctgagctcgctcagcaggaggcggggattgcggaaaagaagaaccaataggaacaaaggttccccgcccctttgatttgatggactacacattcgggccaatgggggaattctcatttcgaagaaagtgggacttgttctccgggtttgagaaagaggctgcgcggagccggaggggtcgaggctgcgccgcgtggagtggcttggcttaacagcagggagggcagagcgatgctctttgacctcccagaagagtcacgtgggctgacccagagccggggcggaaaggctgcgtttgtttcttccgggtcattgacagaagcgtcaattcctgggagtagttcgttggttttctttcccctcatccttttgcctgctcccggcgaggggtggctttgatttcggcgatgagctcccagaaaggcaacgtggctcgttccagacctcagaagcaccagaatacgtttagcttcaaaaatgacaagttcgataaaagtgtgcagaccaaggcacatactgcatcatttacaaaactgtagagcacctgttgtgtgtgcagttgtgatttcttatagatttttagaattggaaggcatgtaaagaacacgtaatctggtacattgcttcagtaggtaagtcagtatgaacttctaagaatttttgttttcttctgtattgggtctattgtgggtatgtccaacgtgacaggggaggtaagggaagtggcatcccctgagatagtgactgaaatggctttcatcatctttaagtcaaagtgagatgccagtaataggatatatgtatgtatgtacttgtgtctctgtatgtatgtaaataaacaaacatgctggaaggag

SEQ ID NO: 5330 - protein, 43 aa, Homo sapiens
MSSQKGNVARSRPQKHQNTFSFKNDKFDKSVQTKAHTASFTKL

SEQ ID NO: 5331 - DNA, 4085 bp, Homo sapiens
gcgttctgctgactaacggccccggtgcggggcgctggagcggccgccgctgcccgtcggttgctctcgggcctcacgtcccgcgcggccgtggtcgcagccgccgccgccaccgcctccctttctggcactgcagacgccacccagacctagccaggtcttccttctctttaatcctgctttctttgctcctcctcagcctgccaagcgcgaggctcgttccggtagcgggaggaagactggaggggaacggaggggacgagcacaatccccactgagccaggagttggccactgactggaggaaggtgccaaagctgaccccggctccagcctactagcgggcggggggagagacggagcccagccttgcctcacttccaccaatcagaggccgcccggcagggtgggaggcgctctgagctcaaggagaggctgagctcgctcagcaggaggcggggattgcggaaaagaagaaccaataggaacaaaggttccccgcccctttgatttgatggactacacattcgggccaatgggggaattctcatttcgaagaaagtgggacttgttctccgggtttgagaaagaggctgcgcggagccggaggggtcgaggctgcgccgcgtggagtggcttggcttaacagcagggagggcagagcgatgctctttgacctcccagaagagtcacgtgggctgacccagagccggggcggaaaggctgcgtttgtttcttccgggtcattgacagaagcgtcaattcctgggagtagttcgttggttttctttcccctcatccttttgcctgctcccggcgaggggtggctttgatttcggcgatgagctcccagaaaggcaacgtggctcgttccagacctcagaagcaccagaatacgtttagcttcaaaaatgacaagttcgataaaagtgtgcagaccaagaaaattaatgcaaaacttcatgatggagtatgtcagcgctgtaaagaagttcttgagtggcgtgtaaaatacagcaaatacaaaccattatcaaaacctaaaaagtgatggagtcttgctctatagcccgggctggagtgcagtggcaccatttcagctcaatgcaacctctgcctcctaggttcaagtgattctcctgcctcagcctcccgagtagctgggattacaggcacacaccaccatgcccagctaatttttgtatttttagtagaaacaggttttcacaatgttggccaggatggtctccatctactgaccttgtgatccgcccccctaggcctcccaaagtgctgggcttacaggcatgagccactgcacccagccgactgaacatcttttcatgtgtttattagccaatcctatatcttcactggtgaaatgtctattcagatgtgttgcccattttaaaaattgggttgttttcttaccattgagttatgagtcttttatatatattctagatacaagtcctttatcagatataatttggaaatattttctcgctgtctgtaatgtgttatacatcaattttgagatatccttcacattaagaaactaacggtgtggataataatcctggtattgacagaggtttggactcctgaagcctgaaagtctatctgctgccacgcctgggcacatactgcatcatttacaaaactgtagagcacctgttgtgtgtgcagttgtgatttcttatagatttttagaattggaaggcatgtaaagaacacgtaatctggtacattgcttcagtaggtaagtcagtatgaacttctaagaatttttgttttcttctgtattgggtctattgtgggtatgtccaacgtgacaggggaggtaagggaagtggcatcccctgagatagtgactgaaatggctttcatcatctttaagtcaaagtgagatgccagtaataggatatatgtatgtatgtacttgtgtctctgtatgtatgtaaataaacaaacatgctggaaggaggaggtgattcaatcagggactttgtgaaagaaaaaaagaataactggaccttcctttaatgatgaaaactgtttatacagcaaaccatcaaagccaaaatgtgaattttggtattagcccgatttttcctaagaaactgttgatgtaaccactgtagttgcagagatcgttttggtatattctagaccctctttgttttgttctgtttggggtttcttccccctcaagttgctcttgtccaccactagactggctgccttttattccatagcagacagtccttaagtctttgcatatgtccttattcaaaaattaatcttcatcagtttttttctgcagaaaacagttttttaaatatcttacatgagaatgctctgcacctgcaatctctggttgatgcagtttcctttctctcttctctgttcccattggtagaataaatctgctccttcttaaatcctgagctgaaaatgtccacacttcccagaagtgtactttagaatcacctgtaacatgtatttaaaatacagattccccagctccacgggcaaagctctcctgccatgtgacaccctgatacagttcagggagccactaaggcaggccaaaatggctcagcaggcaaaggtccaagctgccagggtagtgtgtcattacagcatgcttagcatagctaggaggacaggctcacacccagccccacagctgttgcgctacagactcaggcacagggctgtctaactggcagatgtgggccacaactgttggagacaagccagccatatttgggaaaatcttattgtaaggggcaagtgtgagtgagatttaggagtcatgggaaaatacaccaacacagtaaatcttgtgttataggagagatgtggaagaaagagataaactactggccagggtgtctcctgactgggtgacttgccaccacatgggccaggcaggttgcggcagctctgcctttgggaggtggctggaggaggggaggagagagaggcatgatgaagacagatgcaccctttcctgagcaggggttaacattcagggtgccgaaaggaattccacagcctgtttcccatctctcttgtcctcatcaagtactggtcctcgtgtatgtgttctgcttccgctttctcaggatgtttacgtttttgcaaatacgtttatggaaaagagttacctcacccacctctccaaacatctatttgttttacatttttattgcgggggagtgatctctttacatagcttcaaatggcataacattcagcagtatccaagcttagatatatctgatgagaggaaagtaattgtgaggcctttgttctagttacaactttgtcactatctgactccatgactccagcaaattgcttcaactgtctggcctgcagtttttttcttgcgttaaataacagacttagtctagatcggtggttcttatcatgtggtttctggactagcagcatcaatattacctgggaaacttgttagaaatgcaaattcttgggctctgccctagacctactgaaacatactctgtgggcggggcccagcaatctgtgtttgaaacgcgattctgattatttgacaaaagtttgcaaaccactggtctagataagtagctcttagccttggctgcacattaaaatcatctgggcaacttttataacctaccaatcctggcctcttcctccaaagattctgacttaaatggtttcagatggggaccattgttatgcggttatagccgacgcctaggtgctacctgaggtcttcaaagctaaaggtcagtgtttcccagccgtaaatgcatacctctagacctggccttctcaagccactaggtgttgctataatagagaagaaaaggcattttcagaaccgtctttggatatggatgaggaggaggaaaatgtatttcttagcttctgataagagattattttgttattttaatctgagtgcaatttgctaaatattcatttgcaacttgttaaatttattcaaagaaattaaatgcccataagtgacagaaagaataaagaattgtgatatatatttacaataaaatactctttagcaataaa

SEQ ID NO: 5332 - protein, 69 aa, Homo sapiens; identical to SEQ ID NO: 5328

SEQ ID NO: 5333 - DNA, 735 bp, Homo sapiens
ataaagaaacagaaaaaatagaacatactgaaaataatctaagttccaaccatagaagaagctgcagaagaaatgaagaaagtgatgatgatttagattttgatattgatttagaagacacaggaggattgcttgaaccctggaggcggagattgaagtgagctgagttcgtgccattacactccagcctgggtgacagagtgagactctgtctcaaaaaaaataaaataaaaagtcaatttagaatgtgaaattctgaccaccttttggctttgagtattttccaaaagatatttgaaatcctaatgaggaaatcagaaaaagctatggaaaaatagacaaatttcatacatgaacaatataaattgtgtatattacttaacatcaaactaaacaagattcagaattgatggttgtataagaactagctcatgtaaaaataaaataacattattacattgcctcaaaaattggtcctcggtaagtgccttttgataaatgatctcaaataaatgactcatagcaaaagccctgtcgcttatgtttaatttttacaaagtaaaagcaattttttccaaataataatgtttaacaagcgtatagcaattctgctttgtatttttatatatttcatcacattttaacttttttctcgtgaaatgtacatacagaaaaagtgcatataatttatacactttataagtgtatgcattttttataataattataaaggaa

SEQ ID NO: 5334 - protein, 52 aa, Homo sapiens
KETEKIEHTENNLSSNHRRSCRRNEESDDDLDFDIDLEDTGGLLEPWRRRLK

SEQ ID NO: 5335 - DNA, 699 bp, Homo sapiens
tgcaatagtatctctttgtcttaataattgtatttctaattacaaataagcttgagcccctttttgtgtttattggctatttcacttttgataataggtgatattagggaataatttaagtggaatgttattttagaaatccatactgaaatacttaaggatgtaatactaatttactgtaaaatatttcagcataaaaaaagtgcagacatagataacatttcactgacatcagaaaatattacctgggaatacatcaaaaagtattcaagaacttccatctcaaaaaaaaaaaaaaaacgtggagacaaaaatgaatagaaatactatcttcacaatttgaaagtctcagtattctaaacatatagcctgactgaaagaaatgttctgtcccgctgggcgtgttgcctcacgcctgtaatcctagcacttttggaggccaaggcggacggatcacctgaggtcgggagttcgagaccagcctgaccaacacagagaaaccccatctctactaaaaacacaaaattaaccacgcctggtggcgcatccctgtaatcccagctagtccggaggctgaggcaggagaatcacttcaacccaagaggcagaggttgtggtgagccaagatagcgctattgcactccagcctggggaacaagagtgaaactctgtctcaaaagaaataaattttctgtccat

SEQ ID NO: 5336 - protein, 68 aa, Homo sapiens
FKWNVILEIHTEILKDVILIYCKIFQHKKSADIDNISLTSENITWEYIKKYSRTSISKKKKKRGDKNE

SEQ ID NO: 5337 - DNA, 1501 bp, Homo sapiens
gctttcagttgtaacggacttcatcacatcacaaattgtactcgttctcatccttttaagaaagttcagacccaggaaaatttccatagtaccttaatgaaaaagatagaaatcagtgggacgtgtctttcctttcatctccttttcggcttggaaatcagaatgagaaggattgtttttgctggtgttatcttattccgcctcttaggtgttatcttattccgcctcttaggtgttatcttattcggccgcttaggtgacctgggaacctgccagacaaaacctggtcagtactggaaagaagaggtccacattcaagatgttggaggtttgatttgcagagcatgcaatctttcactgcccttccatggatgtcttttagacctgggaacctgccaggcagaacctggtcagtactgtaaagaagaggtccacattcaaggtggcattcaatggtattcagtcaaaggctgcacaaagaacacatcagagtgcttcaagagtactctcgtcaagagaattctgcaactgcatgaacttgtaactactcactgctgcaatcattctttgtgcaatttctgagtcagtggcccatatctaaaatgcttggcagatcaatcagtctcgaagcctgacctggctatcacaaaatgatggctattgtcaattagcccacttcagaaacctcagacccttgtaggtagaaggaattttgatctgaaattgactttggttttcaatattcccaatatctcccccaccacctccaactcatctgagaaatagccctttcaacaccatttctctcctctcctccttctgcttaatttaccttcctaccacaaggctacaaagaaggaaaaatgttagtgattctccaagtcaaactaggcatgtcacctctaactactttcatttccctcaataattccatactccaaaatatggttacaaatgtttcacaagacagcaagtgacctgagaatattcatttggtttccaaagcaaactgccttgctcctttggggtgatttatggtatagaagaaactgacttaacatatactatagggaaaaaataagccatgaatcagcaagccaggcctgcgggaaaagtatgaacccaaacaggaaagggctgaggcaggtggtagggctggcacttatttcttccatctgcctcagagtttatccaaattttgaattttccgtaccttaaccatgcctaaatgctttggcttgttcaattttggcagattaagcagttcaaggtaagcagagaagtaagttcccaaccacaaggaatttaaaaggagtaggaacgtactttgaactacatttcccattttgcgatcattacgtcttctattacaatgccctactttggcagcatgaagagtactgcattaatttaatttaatttaaaatttaatttaaaactgtctttctctgtattttcaggagtttgaaaattcaaaaaataaataataaatgtcaataaa

SEQ ID NO: 5338 - protein, 161 aa, Homo sapiens
MKKIEISGTCLSFHLLFGLEIRMRRIVFAGVILFRLLGVILFRLLGVILFGRLGDLGTCQTKPGQYWKEEVHIQDVGGLICRACNLSLPFHGCLLDLGTCQAEPGQYCKEEVHIQGGIQWYSVKGCTKNTSECFKSTLVKRILQLHELVTTHCCNHSLCNF

SEQ ID NO: 5339 - DNA, 2145 bp, Homo sapiens
gtagggagccagcccctgggcgcggcctgcagggtaccggcaaccgcccgggtaagcgggggcaggacaaggccggagcctgtgtccgcccggcagccgcccgcagctgcagagagtcccgctgcgtctccgccgcgtgcgccctcctcgaccagcagacccgcgctgcgctccgccgctgacatgtgtgccgctcagatgccgcccctggcgcacatcttccgagggacgttcgtccactccacctggacctgccccatggaggtgctgcgggatcacctcctcggcgtgagcgacagcggcaaaatagtgtttttagaagaagcatctcaacaggaaaaactggccaaagaatggtgcttcaagccgtgtgaaataagagaactgagccaccatgagttcttcatgcctgggctggttgatacacacatccatgcctctcagtattcctttgctggaagtagcatagacctgccactcttggagtggctgaccaagtacacatttcctgcagaacacagattccagaacatcgactttgcagaagaagtatataccagagttgtcaggagaacactaaagaatggaacaaccacagcttgttactttgcaacaattcacactgactcatctctgctccttgccgacattacagataaatttggacagcgggcatttgtgggcaaagtttgcatggatttgaatgacacttttccagaatacaaggagaccactgaggaatcgatcaaggaaactgagagatttgtgtcagaaatgctccaaaagaactattctagagtgaagcccatagtgacaccacgtttttccctctcctgctctgagactttgatgggtgaactgggcaacattgctaaaacccgtgatttgcacattcagagccatataagtgaaaatcgtgatgaagttgaagctgtgaaaaacttataccccagttataaaaactacacatctgtgtatgataaaaacaatcttttgacaaataagacagtgatggcacacggctgctacctctctgcagaagaactgaacgtattccatgaacgaggagcatccatcgcacactgtcccaattctaatttatcgctcagcagtggatttctaaatgtgctagaagtcctgaaacatgaagtcaagatagggctgggtacagacgtggctggtggctattcatattccatgcttgatgcaatcagaagagcagtgatggtttccaatatccttttaattaataaggtaaatgagaaaagcctcaccctcaaagaagtcttcagactagctactcttggaggaagccaagccctggggctggatggtgagattggaaactttgaagtgggcaaggaatttgatgccatcctgatcaaccccaaagcatccgactctcccattgacctgttttatggggacttttttggtgatatttctgaggctgttatccagaagttcctctatctaggagatgatcgaaatattgaagaggtttatgtgggcggaaagcaggtggttccgttttccagctcagtgtaagaccctcgggcgtctacaaagttctcctgggattagcgtggttctgcatctcccttgtgcccaggtggagttagaaagtcaaaaaatagtaccttgttcttgggatgactatccctttctgtgtctagttacagtattcacttgacaaatagttcgaaggaagttgcactaattctcaactctggttgagagggttcataaatttcatgaaaatatctccctttggagctgctcagacttactttaagctcaaacagaagggaatgctattactggtggtgttcctacggtaagacttaagcaaagcctttttcatatttgaaaatgtggaaagaaaagatgttcctaaaaggttagatattttgagctaataattgcaaaaattagaagactgaaaatggacccatgagagtatatttttatgagggagcaaaagttagactgagaacaaacgttagaaaatcacttcagattgtgtttgaaaattatatactgagcatactaatttaaaaagagaacttgttgaaatttaaaacgtgtttctaggttgaccttgtgttttagaaatttgcacttaatggaatttgcatttcagag

SEQ ID NO: 5340 - protein, 454 aa, Homo sapiens; identical to SEQ ID NO: 696

SEQ ID NO: 5341 - DNA, 2049 bp, Homo sapiens
gtagggagccagcccctgggcgcggcctgcagggtaccggcaaccgcccgggtaagcgggggcaggacaaggccggagcctgtgtccgcccggcagccgcccgcagctgcagagagtcccgctgcgtctccgccgcgtgcgccctcctcgaccagcagacccgcgctgcgctccgccgctgacatgtgtgccgctcagatgccgcccctggcgcacatcttccgagggacgttcgtccactccacctggacctgccccatggaggtgctgcgggatcacctcctcggcgtgagcgacagcggcaaaatagtgtttttagaagaagcatctcaacaggaaaaactggccaaagaatggtgcttcaagccgtgtgaaataagagaactgagccaccatgagttcttcatgcctgggctggttgatacacacatccatgcctctcagtattcctttgctggaagtagcatagacctgccactcttggagtggctgaccaagtacacatttcctgcagaacacagattccagaacatcgactttgcagaagaagtatataccagagttgtcaggagaacactaaagaatggaacaaccacagcttgttactttgcaacaattcacactgactcatctctgctccttgccgacattacagataaatttggacagcgggcatttgtgggcaaagtttgcatggatttgaatgacacttttccagaatacaaggagaccactgaggaatcgatcaaggaaactgagagatttgtgtcagaaatgctccaaaagaactattctagagtgaagcccatagtgacaccacgtttttccctctcctgctctgagactttgatgggtgaactgggcaacattgctaaaacccgtgatttgcacattcagagccatataagtgaaaatcgtgatgaagttgaagctgtgaaaaacttataccccagttataaaaactacacatctgtgtatgataaaaacaatcttttgacaaataagacagtgatggcacacggctgctacctctctgcagaagaactgaacgtattccatgaacgaggagcatccatcgcacactgtcccaattctaatttatcgctcagcagtggatttctaaatgtgctagaagtcctgaaacatgaagtcaagatagggctgggtacagacgtggctggtggctattcatattccatgcttgatgcaatcagaagagcagtgatggtttccaatatccttttaattaataaggtaaatgagaaaagcctcaccctcaaagaagtcttcagactagctactcttggaggaagccaagccctggggctggatggtgagattggaaactttgaagtgggcaaggaatttgatgccatcctgatcaaccccaaagcatccgactctcccattgacctgttttatggggacttttttggtgatatttctgaggctgttatccagaagttcctctatctaggagatgatcgaaatattgaagaggtttatgtgggcggaaagcaggtggttccgttttccagctcagtgaaagaaacaattcacttaccagcctcctcaccccatcctccaccatttccttaatgttccatggtattttcaacggaatacactttgaaagacctgagtgtgaaagactgagagttgaggagttactttgtggatcttgtccaaatttagtgaaatgtggaagtcaaccagaccaatgatggaattaaatgtaaattccaagagggctttcacagtccacagggttcaaatgacttgggtaacagaagttattcttagcttacctgttatgtgacagtgatttacctgtccatttccaacccaaaagcctgtcagaaagcattctttagagaaaaccactttacatttgttgttaaactcctgatcgctactcttaagaatatacatgtatgtattcataggaacattttttctcaatatttgtatgattcgcttactgttattgtgctgagtgagctcctgtgtgcttcagacaaaaataaatgagactttgtgtttacgtta

SEQ ID NO: 5342 - protein, 471 aa, Homo sapiens
MCAAQMPPLAHIFRGTFVHSTWTCPMEVLRDHLLGVSDSGKIVFLEEASQQEKLAKEWCFKPCEIRELSHHEFFMPGLVDTHIHASQYSFAGSSIDLPLLEWLTKYTFPAEHRFQNIDFAEEVYTRVVRRTLKNGTTTACYFATIHTDSSLLLADITDKFGQRAFVGKVCMDLNDTFPEYKETTEESIKETERFVSEMLQKNYSRVKPIVTPRFSLSCSETLMGELGNIAKTRDLHIQSHISENRDEVEAVKNLYPSYKNYTSVYDKNNLLTNKTVMAHGCYLSAEELNVFHERGASIAHCPNSNLSLSSGFLNVLEVLKHEVKIGLGTDVAGGYSYSMLDAIRRAVMVSNILLINKVNEKSLTLKEVFRLATLGGSQALGLDGEIGNFEVGKEFDAILINPKASDSPIDLFYGDFFGDISEAVIQKFLYLGDDRNIEEVYVGGKQVVPFSSSVKETIHLPASSPHPPPFP

SEQ ID NO: 5343 - DNA, 5430 bp, Homo sapiens
gtagggagccagcccctgggcgcggcctgcagggtaccggcaaccgcccgggtaagcgggggcaggacaaggccggagcctgtgtccgcccggcagccgcccgcagctgcagagagtcccgctgcgtctccgccgcgtgcgccctcctcgaccagcagacccgcgctgcgctccgccgctgacatgtgtgccgctcagatgccgcccctggcgcacatcttccgagggacgttcgtccactccacctggacctgccccatggaggtgctgcgggatcacctcctcggcgtgagcgacagcggcaaaatagtgtttttagaagaagcatctcaacaggaaaaactggccaaagaatggtgcttcaagccgtgtgaaataagagaactgagccaccatgagttcttcatgcctgggctggttgatacacacatccatgcctctcagtattcctttgctggaagtagcatagacctgccactcttggagtggctgaccaagtacacatttcctgcagaacacagattccagaacatcgactttgcagaagaagtatataccagagttgtcaggagaacactaaagaatggaacaaccacagcttgttactttgcaacaattcacactgactcatctctgctccttgccgacattacagataaatttggacagcgggcatttgtgggcaaagtttgcatggatttgaatgacacttttccagaatacaaggagaccactgaggaatcgatcaaggaaactgagagatttgtgtcagaaatgctccaaaagaactattctagagtgaagcccatagtgacaccacgtttttccctctcctgctctgagactttgatgggtgaactgggcaacattgctaaaacccgtgatttgcacattcagagccatataagtgaaaatcgtgatgaagttgaagctgtgaaaaacttataccccagttataaaaactacacatctgtgtatgataaaaacaatcttttgacaaataagacagtgatggcacacggctgctacctctctgcagaagaactgaacgtattccatgaacgaggagcatccatcgcacactgtcccaattctaatttatcgctcagcagtggatttctaaatgtgctagaagtcctgaaacatgaagtcaagatagggctgggtacagacgtggctggtggctattcatattccatgcttgatgcaatcagaagagcagtgatggtttccaatatccttttaattaataaggtaaatgagaaaagcctcaccctcaaagaagtcttcagactagctactcttggaggaagccaagccctggggctggatggtgagattggaaactttgaagtgggcaaggaatttgatgccatcctgatcaaccccaaagcatccgactctcccattgacctgttttatggggacttttttggtgatatttctgaggctgttatccagaagttcctctatctaggagatgatcgaaatattgaagaggtttatgtgggcggaaagcaggtggttccgttttccagctcagtgtaagaccctcgggcgtctacaaagttctcctgggattagcgtggttctgcatctcccttgtgcccaggtggagttagaaagtcaaaaaatagtaccttgttcttgggatgactatccctttctgtgtctagttacagtattcacttgacaaatagttcgaaggaagttgcactaattctcaactctggttgagagggttcataaatttcatgaaaatatctccctttggagctgctcagacttactttaagctcaaacagaagggaatgctattactggtggtgttcctacggtaagacttaagcaaagcctttttcatatttgaaaatgtggaaagaaaagatgttcctaaaaggttagatattttgagctaataattgcaaaaattagaagactgaaaatggacccatgagagtatatttttatgagggagcaaaagttagactgagaacaaacgttagaaaatcacttcagattgtgtttgaaaattatatactgagcatactaatttaaaaagagaacttgttgaaatttaaaacgtgtttctaggttgaccttgtgttttagaaatttgcacttaatggaatttgcatttcagagatgtgttagtgttgtgctttgccttctttggcgatgaatgtcagaaattgaatgccacatgctttcataatatagttttgtgcttcaaagtgtttgacagaagttgggtattaaagatttaaagtctcttaggaatattattcatgtaactccatggcataaatagttgtatttttgtgtactttaaaatcaacttataactgtgagatgttattgcttccattttattagaagagaaacaaattccatgctttatggaatttatgtagactggagtcttcgtgaactggggcaaatgctggcatccaggagccgccaatactaacaggacaggttccattgccatggcctattccacccaaacaatatgttgtagtttctggaaattccatactcagatatcagtctgctagaactttaaaatgaaggacaaatcctgttaaagaaatattgttaaaaatctttaaaccctgtgtattgaaagcactctattttctaattttatccagttttctgtttaactccttataatgtttaggatattaaaattttaggataatgaagagtacataatgtcctacttaatatttatgttaataggacttaattcttactagacatctaggaacattacaaagcaaagactatttttatgcttccataacctagaattaaaaccaaattatgaccttatgataaatctttaagtattggtgtgaatgttatttaaattctatatttttcttatttaattacaaatactataaatgagcaaggaaaaggaatagactttcttaatatattataacactcattcctagagcttaggggtgactctttaatattaccttatagtagaaactttatgtaatatagctaactccgtatttacagaacaaaaaaacacagttccccctcctgtagtataaattttattttcacatacttagctaatttagcagtaattggcccagttttttccctaatagaaatacttttagatttgattatgtatacatgacacctaaagagggaacaaaagttagttttatttttttaataaacaacagagtttgttttgtgagataagtatcttagtaaacccaatttccagtcttagtctgtatttccaatatttctaattcctgagccacgtcaaagatgccttgccaaatttctccccatttctctacggggctagcaaaaatcttcagctttatcactcaacccctgccaaaggaacttgattacatggtgtctaaccaaatgagcaggcttaggaatttagatgagatgtgtaagattcacttacaggcagtagctgcttctagcatttgcaagatcctacacttttaccttctttaagggtgtacattttgatgttgaacatcagttttcatgtagacttaggactcatgtgcagtaaatataaataagtgtagcatcagaagcagtaggaatggccgtatacaaccatcctgttaaacatttaaatttagctctgatagtgtgttaagacctgaatatctttcctagtaaaaataggatgtgttgaaatatttatatgtactttgatctctccacatcacttataacttatgtgttttatttctccaagtgcggtgttcctgaatgttatgtatgcttttttttctgtaccacaggcattatctatacctggggccagattttctgcactttgaaatgttgcctttgcctaatgtaggttgactttctgaattgtggagaggcacttttccaagccaatcttatttgtcactttttgttttaatatcttgctctctgacaggaaagaaacaattcacttaccagcctcctcaccccatcctccaccatttccttaatgttccatggtattttcaacggaatacactttgaaaggtaaaaacaattcaaaagtatcgattatcataaattcacaaaatatttttgcaaccagaacacaaaagcaggctagtcagctaaggtaaatttcattttcaaacgagagggaaacatgggaagtaaaagattaggatgtgaaaggttgtcctaaacagaccaaggagactgttccctaatttattctcttggctggttctctcattgaattatcagaccccaagaggagatattggaacaggctcccttcatgccaagggtctttctaagttaatactgtgagcattgagcccccattaaaactcttttttacttcagaaagaattttacaggttaaagggaaagaaatggtgggaaactctccccgtaatgcttagccaactttaaagtgtacccttcaatatccccattggcaactgcagctgagatcttagagaggaaatataaccggtgtgagatctagcaatgcattttgaatcttcactccctaccaggctcttcctatttttaatctcttcacctcagaactagacatatggagagctttaaaggcaagctggaaggcacattgtatcaattctaccttgtgctatacgtaggagagatccaaaatttggatgcttctggagactcttagacatcttttcattgttgtccatttttaaagttgatgattgctggaaacattcacacgcttaaaagcaatggtgtgagttattaatgggtaaactaagaagtgttataggcaatgacttgaaatggtttttaaattgtatggattgttaagaattgttgaaaaaaaattttttttttttggacagcttcaaggagatgttagcaatttcagatatactagccagtttaggtatgactttggaagtgcagaaacagaaggatactgttagaaaatcctaacattggtctccgtgcatgtgttcacacctggtctcactgcctttccttcccacagacctgagtgtgaaagactgagagttgaggagttactttgtggatcttgtccaaatttagtgaaatgtggaagtcaaccagaccaatgatggaattaaatgtaaattccaagagggctttcacagtccacagggttcaaatgacttgggtaacagaagttattcttagcttacctgttatgtgacagtgatttacctgtccatttccaacccaaaagcctgtcagaaagcattctttagagaaaaccactttacatttgttgttaaactcctgatcgctactcttaagaatatacatgtatgtattcataggaacattttttctcaatatttgtatgattcgcttactgttattgtgctgagtgagctcctgtgtgcttcagacaaaaataaatgagactttgtgtttacgtta

SEQ ID NO: 5344 - protein, 454 aa, Homo sapiens; identical to SEQ ID NO: 696

SEQ ID NO: 5345 - DNA, 2117 bp, Homo sapiens
gtagggagccagcccctgggcgcggcctgcagggtaccggcaaccgcccgggtaagcgggggcaggacaaggccggagcctgtgtccgcccggcagccgcccgcagctgcagagagtcccgctgcgtctccgccgcgtgcgccctcctcgaccagcagacccgcgctgcgctccgccgctgacatgtgtgccgctcagatgccgcccctggcgcacatcttccgagggacgttcgtccactccacctggacctgccccatggaggtgctgcgggatcacctcctcggcgtgagcgacagcggcaaaatagtgtttttagaagaagcatctcaacaggaaaaactggccaaagaatggtgcttcaagccgtgtgaaataagagaactgagccaccatgagttcttcatgcctgggctggttgatacacacatccatgcctctcagtattcctttgctggaagtagcatagacctgccactcttggagtggctgaccaagtacacatttcctgcagaacacagattccagaacatcgactttgcagaagaagtatataccagagttgtcaggagaacactaaagaatggaacaaccacagcttgttactttgcaacaattcacactgactcatctctgctccttgccgacattacagataaatttggacagcgggcatttgtgggcaaagtttgcatggatttgaatgacacttttccagaatacaaggagaccactgaggaatcgatcaaggaaactgagagatttgtgtcagaaatgctccaaaagaactattctagagtgaagcccatagtgacaccacgtttttccctctcctgctctgagactttgatgggtgaactgggcaacattgctaaaacccgtgatttgcacattcagagccatataagtgaaaatcgtgatgaagttgaagctgtgaaaaacttataccccagttataaaaactacacatctgtgtatgataaaaacaatcttttgacaaataagacagtgatggcacacggctgctacctctctgcagaagaactgaacgtattccatgaacgaggagcatccatcgcacactgtcccaattctaatttatcgctcagcagtggatttctaaatgtgctagaagtcctgaaacatgaagtcaagatagggctgggtacagacgtggctggtggctattcatattccatgcttgatgcaatcagaagagcagtgatggtttccaatatccttttaattaataaggtaaatgagaaaagcctcaccctcaaagaagtcttcagactagctactcttggaggaagccaagccctggggctggatggtgagattggaaactttgaagtgggcaaggaatttgatgccatcctgatcaaccccaaagcatccgactctcccattgacctgttttatggggacttttttggtgatatttctgaggctgttatccagaagttcctctatctaggagatgatcgaaatattgaagaggtttatgtgggcggaaagcaggtggttccgttttccagctcagtgtaagaccctcgggcgtctacaaagttctcctgggattagcgtggttctgcatctcccttgtgcccaggaaagaaacaattcacttaccagcctcctcaccccatcctccaccatttccttaatgttccatggtattttcaacggaatacactttgaaagacctgagtgtgaaagactgagagttgaggagttactttgtggatcttgtccaaatttagtgaaatgtggaagtcaaccagaccaatgatggaattaaatgtaaattccaagagggctttcacagtccacagggttcaaatgacttgggtaacagaagttattcttagcttacctgttatgtgacagtgatttacctgtccatttccaacccaaaagcctgtcagaaagcattctttagagaaaaccactttacatttgttgttaaactcctgatcgctactcttaagaatatacatgtatgtattcataggaacattttttctcaatatttgtatgattcgcttactgttattgtgctgagtgagctcctgtgtgcttcagacaaaaataaatgagactttgtgtttacgtta

SEQ ID NO: 5346 - protein, 454 aa, Homo sapiens; identical to SEQ ID NO: 696

SEQ ID NO: 5347 - DNA, 1851 bp, Homo sapiens
gtagggagccagcccctgggcgcggcctgcagggtaccggcaaccgcccgggtaagcgggggcaggacaaggccggagcctgtgtccgcccggcagccgcccgcagctgcagagagtcccgctgcgtctccgccgcgtgcgccctcctcgaccagcagacccgcgctgcgctccgccgctgacatgtgtgccgctcagatgccgcccctggcgcacatcttccgagggacgttcgtccactccacctggacctgccccatggaggtgctgcgggatcacctcctcggcgtgagcgacagcggcaaaatagtgtttttagaagaagcatctcaacaggaaaaactggccaaagaatggtgcttcaagccgtgtgaaataagagaactgagccaccatgagttcttcatgcctgggctggttgatacacacatccatgcctctcagtattcctttgctggaagtagcatagacctgccactcttggagtggctgaccaagtacacatttcctgcagaacacagattccagaacatcgactttgcagaagaagtatataccagagttgtcaggagaacactaaagaatggaacaaccacagcttgttactttgcaacaattcacactgactcatctctgctccttgccgacattacagataaatttggacagcgggcatttgtgggcaaagtttgcatggatttgaatgacacttttccagaatacaaggagaccactgaggaatcgatcaaggaaactgagagatttgtgtcagaaatgctccaaaagaacagccatataagtgaaaatcgtgatgaagttgaagctgtgaaaaacttataccccagttataaaaactacacatctgtgtatgataaaaacaatcttttgacaaataagacagtgatggcacacggctgctacctctctgcagaagaactgaacgtattccatgaacgaggagcatccatcgcacactgtcccaattctaatttatcgctcagcagtggatttctaaatgtgctagaagtcctgaaacatgaagtcaagatagggctgggtacagacgtggctggtggctattcatattccatgcttgatgcaatcagaagagcagtgatggtttccaatatccttttaattaataaggtaaatgagaaaagcctcaccctcaaagaagtcttcagactagctactcttggaggaagccaagccctggggctggatggtgagattggaaactttgaagtgggcaaggaatttgatgccatcctgatcaaccccaaagcatccgactctcccattgacctgttttatggggacttttttggtgatatttctgaggctgttatccagaagttcctctatctaggagatgatcgaaatattgaagaggtttatgtgggcggaaagcaggtggttccgttttccagctcagtgaaagaaacaattcacttaccagcctcctcaccccatcctccaccatttccttaatgttccatggtattttcaacggaatacactttgaaagttctcagaataactgtagaatgtgctggaaatggaacattctcagataaggaggaactggccagatcaaactaagctgtgttcccatccctcctgaaacaggatcttatggtgctttagcccaggacgtcaagtatcccctaggtatgaaacccagagtggagcatgctttgaaggtccctcagctacatgcagactagactgcatgtagctgactctaactgccctgggaaactatcctgagctttgacagacctgccatgaatcttaagcttttattgtcccttgctgcctatctgtgaggaataaagttgcttcacttac

SEQ ID NO: 5348 - protein, 435 aa, Homo sapiens
MCAAQMPPLAHIFRGTFVHSTWTCPMEVLRDHLLGVSDSGKIVFLEEASQQEKLAKEWCFKPCEIRELSHHEFFMPGLVDTHIHASQYSFAGSSIDLPLLEWLTKYTFPAEHRFQNIDFAEEVYTRVVRRTLKNGTTTACYFATIHTDSSLLLADITDKFGQRAFVGKVCMDLNDTFPEYKETTEESIKETERFVSEMLQKNSHISENRDEVEAVKNLYPSYKNYTSVYDKNNLLTNKTVMAHGCYLSAEELNVFHERGASIAHCPNSNLSLSSGFLNVLEVLKHEVKIGLGTDVAGGYSYSMLDAIRRAVMVSNILLINKVNEKSLTLKEVFRLATLGGSQALGLDGEIGNFEVGKEFDAILINPKASDSPIDLFYGDFFGDISEAVIQKFLYLGDDRNIEEVYVGGKQVVPFSSSVKETIHLPASSPHPPPFP

SEQ ID NO: 5349 - DNA, 2359 bp, Homo sapiens
attgtactgtggctgggctgaactcaaaccacaagatacagtccttcccactcttccttcccctttttgaaggtggaggagccttaccttgtgtccactgccaccacaggtcccctggaagtcctgccagactactgcctatgttcccttaaagcccaaggattcttagtcaacttgtgaattctgcctggcctgggataaactcttcagagcagtgggcttccctttggcccagggcagatccataaatgctgtgtaagagccaagttctggaactggggactccaggagcctgcttgatgttttattcttctgtggccgaactggtacctaaagttgtttttagaagaagcatctcaacaggaaaaactggccaaagaatggtgcttcaagccgtgtgaaataagagaactgagccaccagattagaagaaggcttggaagcagttgaagtagaggctgagatgggatgagagaatggtggaaacggttggaggatggagaggagggtaaacataacttgagttcttcatgcctgggctggttgatacacacatccatgcctctcagtattcctttgctggaagtagcatagacctgccactcttggagtggctgaccaagtacacatttcctgcagaacacagattccagaacatcgactttgcagaagaagtatataccagagttgtcaggagaacactaaagaatggaacaaccacagcttgttactttgcaacaattcacactgactcatctctgctccttgccgacattacagataaatttggacagcgggcatttgtgggcaaagtttgcatggatttgaatgacacttttccagaatacaaggagaccactgaggaatcgatcaaggaaactgagagatttgtgtcagaaatgctccaaaagaactattctagagtgaagcccatagtgacaccacgtttttccctctcctgctctgagactttgatgggtgaactgggcaacattgctaaaacccgtgatttgcacattcagagccatataagtgaaaatcgtgatgaagttgaagctgtgaaaaacttataccccagttataaaaactacacatctgtgtatgataaaaacaatcttttgacaaataagacagtgatggcacacggctgctacctctctgcagaagaactgaacgtattccatgaacgaggagcatccatcgcacactgtcccaattctaatttatcgtaagtagacaatgattgtttggtagattacgaatgattgggttgcagattagcagccaaatgcctttgtttcctctgtcattcctccaggatctcccctctattctgtgtttggcaggacccagatagatagacatttactcgtgctgttgaggagtaaaagagaacacgtaagaggacatttatctcagaggacacgtgaagagcacagcatcttctgaaatctctgagtttgtacaaaaaaaggacaatagggaatacaacataaaaaatttacagtgaaagtactgaaagaacccatatgtcagccaggaaatccagaagagggtagtcactcccattactgtttgtgctgtagtgtgagaaggaaacacagcaataccaaagcaaatgcactatgatgtatgttaccctgttggacctgacggaatgccagcccacacaggcaagcccaggaggaccttgtcctattataattccccagaatacagaggtgttatttattaactggttcttaaccttttgaaaggtgatggatccgtaaatgaataaaatgaaagttattgcctgggcgcagtggctcacatctgtaatcctagcactttgggaagcagaggcaggcagatcacttgaggtcaggagttcaagaccaccctgaccaacatggtgaaaccccatcagtattaaacatataaaaattagctgggcatggtggcaggcacctgtaatcccaaccactcaggaggctgaggcaagagaatcgtttgaacccgggaggcggaggttgcagtgagccaagattgcaccactgcactccagcctgggtgacagagtgagactctgtctcagaaaaataaataagttatagcctgtaatttcaggggaaaaaagcccatggatattacaagtgttgcatctaatttcagggaattcatagatctcatgatgccagtccatggatgctaggttaaaaacccatgcttgtggctgtaatctcagaaaacaacttcaggggtcgggcgtggtggctcacacctctaatcccagcactttgggaggccaaggtgggcggatcacgaggtcaggagatcgagaccatcccggctaacacggtgaaacccagtctctact

SEQ ID NO: 5350 - protein, 233 aa, Homo sapiens
MPGLVDTHIHASQYSFAGSSIDLPLLEWLTKYTFPAEHRFQNIDFAEEVYTRVVRRTLKNGTTTACYFATIHTDSSLLLADITDKFGQRAFVGKVCMDLNDTFPEYKETTEESIKETERFVSEMLQKNYSRVKPIVTPRFSLSCSETLMGELGNIAKTRDLHIQSHISENRDEVEAVKNLYPSYKNYTSVYDKNNLLTNKTVMAHGCYLSAEELNVFHERGASIAHCPNSNLS

SEQ ID NO: 5351 - DNA, 1258 bp, Homo sapiens
aaaaaacacagttccccctcctgtagtataaattttattttcacatacttagctaatttagcagtaattggcccagttttttccctaatagaaatacttttagatttgattatgtatacatgacacctaaagagggaacaaaagttagttttatttttttaataaacaacagagtttgttttgtgagataagtatcttagtaaacccaatttccagtcttagtctgtatttccaatatttctaattcctgagccacgtcaaagatgccttgccaaatttctccccatttctctacggggctagcaaaaatcttcagctttatcactcaacccctgccaaaggaacttgattacatggtgtctaaccaaatgagcaggcttaggaatttagatgagatgtgtaagattcacttacaggcagtagctgcttctagcatttgcaagatcctacacttttaccttctttaagggtgtacattttgatgttgaacatcagttttcatgtagacttaggactcatgtgcagtaaatataaataagtgtagcatcagaagcagtaggaatggccgtatacaaccatcctgttaaacatttaaatttagctctgatagtgtgttaagacctgaatatctttcctagtaaaaataggatgtgttgaaatatttatatgtactttgatctctccacatcacttataacttatgtgttttatttctccaagtgcggtgttcctgaatgttatgtatgcttttttttctgtaccacaggcattatctatacctggggccagattttctgcactttgaaatgttgcctttgcctaatgtaggttgactttctgaattgtggagaggcacttttccaagccaatcttatttgtcactttttgttttaatatcttgctctctgacaggaaagaaacaattcacttaccagcctcctcaccccatcctccaccatttccttaatgttccatggtattttcaacggaatacactttgaaagttctcagaataactgtagaatgtgctggaaatggaacattctcagataaggaggaactggccagatcaaactaagctgtgttcccatccctcctgaaacaggatcttatggtgctttagcccaggacgtcaagtatcccctaggtatgaaacccagagtggagcatgctttgaaggtccctcagctacatgcagactagactgcatgtagctgactctaactgccctgggaaactatcctgagctttgacagac

SEQ ID NO: 5352 - protein, 34 aa, Homo sapiens
MVFSTEYTLKVLRITVECAGNGTFSDKEELARSN

SEQ ID NO: 5353 - DNA, 364 bp, Homo sapiens
gctttgtttctgtcactgcaaatcaaagagcccagcctaaaatcctctgtagccttcttatttcccccacggcatgtggccactctctaccctctcgcaagccttgccagagatgccatcctccacttccactgggcacctggagcctgaacctggaatcttccaagaccccagatcagcctctgctgacagttctcttgtaaagatactgaggataggattacaggtagtggctcacgcctgtaatcccaacactttgggaggctgaggcgggtggatcacttgagctcatgagttcaagaccagcctgggcaacatggcaaaactctgtctctacaaaaaatacaaaataatacaaaaataa

SEQ ID NO: 5354 - protein, 64 aa, Homo sapiens
MWPLSTLSQALPEMPSSTSTGHLEPEPGIFQDPRSASADSSLVKILRIGLQVVAHACNPNTLGG

SEQ ID NO: 5355 - DNA, 452 bp, Homo sapiens
cattgtgattgatcttgtaatgaacgtcagaattcattctacaccatccctgaatattgttcctgactctggtacttagtaatatttaggtacttcatcaatatttgttgcatagatgaatatcttttattaatgacaaagatactagcaataagtaaattagaaattatgaaaaaaaaaccaacctgaataatcaattcagattcattaaattgggagtgcaagacatagagtgactggtaattttgctgcagcaaaaaattaaattgacatagacaaagatgctagtttgtatgaatgccattttactagtgaaagcagctaacaaattgtgcagagtctgcatctcaacaaggtttcatattatccattcaatttcatacatgcgataacacaaatgtatttttgtgagaaaaatgttaagtccggagaaaaaaaaagaaatctgtaaa

SEQ ID NO: 5356 - protein, 36 aa, Homo sapiens
MLVCMNAILLVKAANKLCRVCISTRFHIIHSISYMR

SEQ ID NO: 5357 - DNA, 3198 bp, Homo sapiens
gggggcggggccttgccgctgcggaggccggagacgcggcggcgctggacgcggaggcgctgggcgcacggcgcggagccggccggagctcgaggccggcggcggcgggagagcgacccgggcggcctcgtagcggggccccggatccccgagtggcggccggagcctcgaaaagagattctcagcgctgattttgagatgatgggcttgggaaacgggcgtcgcagcatgaagtcgccgcccctcgtgctggccgccctggtggcctgcatcatcgtcttgggcttcaactactggattgcgagctcccggagcgtggacctccagacacggatcatggagctggaaggcagggtccgcagggcggctgcagagagaggcgccgtggagctgaagaagaacgagttccagggagagctggagaagcagcgggagcagcttgacaaaatccagtccagccacaacttccagctggagagcgtcaacaagctgtaccaggacgaaaaggcggttttggtgaataacatcaccacaggtgagaggctcatccgagtgctgcaagaccagttaaagaccctgcagaggaattacggcaggctgcagcaggatgtcctccagtttcagaagaaccagaccaacctggagaggaagttctcctacgacctgagccagtgcatcaatcagatgaaggaggtgaaggaacagtgtgaggagcgaatagaagaggtcaccaaaaaggggaatgaagctgtagcttccagagacctgagtgaaaacaacgaccagagacagcagctccaagccctcagtgagcctcagcccaggctgcaggcagcaggcctgccacacacagaggtgccacaagggaagggaaacgtgcttggtaacagcaagtcccagacaccagcccccagttccgaagtggttttggattcaaagagacaagttgagaaagaggaaaccaatgagatccaggtggtgaatgaggagcctcagagggacaggctgccgcaggagccaggccgggagcaggtggtggaagacagacctgtaggtggaagaggcttcgggggagccggagaactgggccagaccccacaggtgcaggctgccctgtcagtgagccaggaaaatccagagatggagggccctgagcgagaccagcttgtcatccccgacggacaggaggaggagcaggaagctgccggggaagggagaaaccagcagaaactgagaggagaagatgactacaacatggatgaaaatgaagcagaatctgagacagacaagcaagcagccctggcagggaatgacagaaacatagatgtttttaatgttgaagatcagaaaagagacaccataaatttacttgatcagcgtgaaaagcggaatcatacactctgaattgaactggaatcacatatttcacaacagggccgaagagatgactataaaatgttcatgagggactgaatactgaaaactgtgaaatgtactaaataaaatgtacatctgaagatgattattgtgaaattttagtatgcactttgtgtaggaaaaaatggaatggtcttttaaacagcttttggggggtactttggaagtgtctaataaggtgtcacaatttttggtagtaggtatttcgtgagaagttcaacaccaaaactggaacatagttctccttcaagtgttggcgacagcggggcttcctgattctggaatataactttgtgtaaattaacagccacctatagaagagtccatctgctgtgaaggagagacagagaactctgggttccgtcgtcctgtccacgtgctgtaccaagtgctggtgccagcctgttacctgttctcactgaaaagtctggctaatgctcttgtgtagtcacttctgattctgacaatcaatcaatcaatggcctagagcactgactgttaacacaaacgtcactagcaaagtagcaacagctttaagtctaaatacaaagctgttctgtgtgagaattttttaaaaggctacttgtataataacccttgtcatttttaatgtacaaaacgctattaagtggcttagaatttgaacatttgtggtctttatttactttgcttcgtgtgtgggcaaagcaacatcttccctaaatatatattaccaagaaaagcaagaagcagattaggtttttgacaaaacaaacaggccaaaagggggctgacctggagcagagcatggtgagaggcaaggcatgagagggcaagtttgttgtggacagatctgtgcctactttattactggagtaaaagaaaacaaagttcattgatgtcgaaggatatatacagtgttagaaattaggactgtttagaaaaacaggaatacaatggttgtttttatcatagtgtacacatttagcttgtggtaaatgactcacaaaactgattttaaaatcaagttaatgtgaattttgaaaattactacttaatcctaattcacaataacaatggcattaaggtttgacttgagttggttcttagtattatttatggtaaataggctcttaccacttgcaaataactggccacatcattaatgactgacttcccagtaaggctctctaaggggtaagtaggaggatccacaggatttgagatgctaaggccccagagatcgtttgatccaaccctcttattttcagaggggaaaatggggcctagaagttacagagcatctagctggtgcgctggcacccctggcctcacacagactcccgagtagctgggactacaggcacacagtcactgaagcaggccctgtttgcaattcacgttgccacctccaacttaaacattcttcatatgtgatgtccttagtcactaaggttaaactttcccacccagaaaaggcaacttagataaaatcttagagtactttcatactcttctaagtcctcttccagcctcactttgagtcctccttggggttgataggaattttctcttgctttctcaataaagtctctattcatctcatgtttaatttgtacgcatagaattgctgagaaataaaatgttctgttcaacttataaaacttgtcacagctctgtttttttgcttttccccttcatcctctattagatccttaaagaatccaccctcaaactgtggactaaggatggcagtttgccttaaaccttctgtggaatgag

SEQ ID NO: 5358 - protein, 401 aa, Homo sapiens; identical to SEQ ID NO: 698

SEQ ID NO: 5359 - DNA, 3165 bp, Homo sapiens
cacccgaaggcgtccgggaatcttcactttttccgttgctagcagtggaagggtcacagaccaaacactaaggcctgagcggtgacaaccgaggcgagatgatggtcaacagggaatgcctcgtgggagaaaaaagacaattttattctcagcgctgattttgagatgatgggcttgggaaacgggcgtcgcagcatgaagtcgccgcccctcgtgctggccgccctggtggcctgcatcatcgtcttgggcttcaactactggattgcgagctcccggagcgtggacctccagacacggatcatggagctggaaggcagggtccgcagggcggctgcagagagaggcgccgtggagctgaagaagaacgagttccagggagagctggagaagcagcgggagcagcttgacaaaatccagtccagccacaacttccagctggagagcgtcaacaagctgtaccaggacgaaaaggcggttttggtgaataacatcaccacaggtgagaggctcatccgagtgctgcaagaccagttaaagaccctgcagaggaattacggcaggctgcagcaggatgtcctccagtttcagaagaaccagaccaacctggagaggaagttctcctacgacctgagccagtgcatcaatcagatgaaggaggtgaaggaacagtgtgaggagcgaatagaagaggtcaccaaaaaggggaatgaagctgtagcttccagagacctgagtgaaaacaacgaccagagacagcagctccaagccctcagtgagcctcagcccaggctgcaggcagcaggcctgccacacacagaggtgccacaagggaagggaaacgtgcttggtaacagcaagtcccagacaccagcccccagttccgaagtggttttggattcaaagagacaagttgagaaagaggaaaccaatgagatccaggtggtgaatgaggagcctcagagggacaggctgccgcaggagccaggccgggagcaggtggtggaagacagacctgtaggtggaagaggcttcgggggagccggagaactgggccagaccccacaggtgcaggctgccctgtcagtgagccaggaaaatccagagatggagggccctgagcgagaccagcttgtcatccccgacggacaggaggaggagcaggaagctgccggggaagggagaaaccagcagaaactgagaggagaagatgactacaacatggatgaaaatgaagcagaatctgagacagacaagcaagcagccctggcagggaatgacagaaacatagatgtttttaatgttgaagatcagaaaagagacaccataaatttacttgatcagcgtgaaaagcggaatcatacactctgaattgaactggaatcacatatttcacaacagggccgaagagatgactataaaatgttcatgagggactgaatactgaaaactgtgaaatgtactaaataaaatgtacatctgaagatgattattgtgaaattttagtatgcactttgtgtaggaaaaaatggaatggtcttttaaacagcttttggggggtactttggaagtgtctaataaggtgtcacaatttttggtagtaggtatttcgtgagaagttcaacaccaaaactggaacatagttctccttcaagtgttggcgacagcggggcttcctgattctggaatataactttgtgtaaattaacagccacctatagaagagtccatctgctgtgaaggagagacagagaactctgggttccgtcgtcctgtccacgtgctgtaccaagtgctggtgccagcctgttacctgttctcactgaaaagtctggctaatgctcttgtgtagtcacttctgattctgacaatcaatcaatcaatggcctagagcactgactgttaacacaaacgtcactagcaaagtagcaacagctttaagtctaaatacaaagctgttctgtgtgagaattttttaaaaggctacttgtataataacccttgtcatttttaatgtacaaaacgctattaagtggcttagaatttgaacatttgtggtctttatttactttgcttcgtgtgtgggcaaagcaacatcttccctaaatatatattaccaagaaaagcaagaagcagattaggtttttgacaaaacaaacaggccaaaagggggctgacctggagcagagcatggtgagaggcaaggcatgagagggcaagtttgttgtggacagatctgtgcctactttattactggagtaaaagaaaacaaagttcattgatgtcgaaggatatatacagtgttagaaattaggactgtttagaaaaacaggaatacaatggttgtttttatcatagtgtacacatttagcttgtggtaaatgactcacaaaactgattttaaaatcaagttaatgtgaattttgaaaattactacttaatcctaattcacaataacaatggcattaaggtttgacttgagttggttcttagtattatttatggtaaataggctcttaccacttgcaaataactggccacatcattaatgactgacttcccagtaaggctctctaaggggtaagtaggaggatccacaggatttgagatgctaaggccccagagatcgtttgatccaaccctcttattttcagaggggaaaatggggcctagaagttacagagcatctagctggtgcgctggcacccctggcctcacacagactcccgagtagctgggactacaggcacacagtcactgaagcaggccctgtttgcaattcacgttgccacctccaacttaaacattcttcatatgtgatgtccttagtcactaaggttaaactttcccacccagaaaaggcaacttagataaaatcttagagtactttcatactcttctaagtcctcttccagcctcactttgagtcctccttggggttgataggaattttctcttgctttctcaataaagtctctattcatctcatgtttaatttgtacgcatagaattgctgagaaataaaatgttctgttcaacttataaaacttgtcacagctctgtttttttgcttttccccttcatcctctattagatccttaaagaatccaccctcaaactgtggactaaggatggcagtttgccttaaaccttctgtggaatgag

SEQ ID NO: 5360 - protein, 401 aa, Homo sapiens; identical to SEQ ID NO: 698

SEQ ID NO: 5361 - DNA, 3043 bp, Homo sapiens
cacccgaaggcgtccgggaatcttcactttttccgttgctagcagtggaagggtcacagaccaaacactaaggcctgagcggtgacaaccgaggcgagatgatggtcaacagggaatgcctcgtgggagaaaaaagacaattttattctcagcgctgattttgagatgatgggcttgggaaacgggcgtcgcagcatgaagtcgccgcccctcgtgctggccgccctggtggcctgcatcatcgtcttgggcttcaactactggattgcgagctcccggagcgtggacctccagacacggatcatggagctggaaggcagggtccgcagggcggctgcagagagaggcgccgtggagctgaagaagaacgagttccagggagagctggagaagcagcgggagcagcttgacaaaatccagtccagccacaacttccagctggagagcgtcaacaagctgtaccaggacgaaaaggcggttttggtgaataacatcaccacaggtgagaggctcatccgagtgctgcaagaccagttaaagaccctgcagaggaattacggcaggctgcagcaggatgtcctccagtttcagaagaaccagaccaacctggagaggaagttctcctacgacctgagccagtgcatcaatcagatgaaggaggtgaaggaacagtgtgaggagcgaatagaagaggtcaccaaaaaggggaatgaagctgtagcttccagagacctgagtgaaaacaacgaccagagacagcagctccaagccctcagtgagcctcagcccaggctgcaggcagcaggcctgccacacacagaggtgccacaagggaagggaaacgtgcttggtaacagcaagtcccagacaccagcccccagttccgaagtggttttggattcaaagagacaagttgagaaagaggaaaccaatgagatccaggtggtgaatgaggagcctcagagggacaggctgccgcaggagccaggccgggagcaggtggtggaagacagacctgtaggtggaagaggcttcgggggagccggagaactgggccagaccccacaggtgcaggctgccctgtcagtgagccaggaaaatccagagatggagggccctgagcgagaccagcttgtcatccccgacggacaggaggaggagcaggaagctgccggggaagggagaaaccagcagaaactgagaggagaagatgactacaacatggatgaaaatgaagcagaatctgagacagacaagcaagcagccctggcagggaatgacagaaacatagatgtttttaatgttgaagatcagaaaagagacaccataaatttacttgatcagcgtgaaaagcggaatcatacactctgaattgaactggaatcacatatttcacaacagggccgaagagatgactataaaatgttcatgagggactgaatactgaaaactgtgaaatgtactaaataaaatgtacatctgaagatgattattgtgaaattttagtatgcactttgtgtaggaaaaaatggaatggtcttttaaacagcttttggggggtactttggaagtgtctaataaggtgtcacaatttttggtagtaggtatttcgtgagaagttcaacaccaaaactggaacatagttctccttcaagtgttggcgacagcggggcttcctgattctggaatataactttgtgtaaattaacagccacctatagaagagtccatctgctgtgaaggagagacagagaactctgggttccgtcgtcctgtccacgtgctgtaccaagtgctggtgccagcctgttacctgttctcactgaaaagtctggctaatgctcttgtgtagtcacttctgattctgacaatcaatcaatcaatggcctagagcactgactgttaacacaaacgtcactagcaaagtagcaacagctttaagtctaaatacaaagctgttctgtgtgagaattttttaaaaggctacttgtataataacccttgtcatttttaatgtacaaaacgctattaagtggcttagaatttgaacatttgtggtctttatttactttgcttcgtgtgtgggcaaagcaacatcttccctaaatatatattaccaagaaaagcaagaagcagattaggtttttgacaaaacaaacaggccaaaagggggctgacctggagcagagcatggtgagaggcaaggcatgagagggcaagtttgttgtggacagatctgtgcctactttattactggagtaaaagaaaacaaagttcattgatgtcgaaggatatatacagtgttagaaattaggactgtttagaaaaacaggaatacaatggttgtttttatcatagtgtacacatttagcttgtggtaaatgactcacaaaactgattttaaaatcaagttaatgtgaattttgaaaattactacttaatcctaattcacaataacaatggcattaaggtttgacttgagttggttcttagtattatttatggtaaataggctcttaccacttgcaaataactggccacatcattaatgactgacttcccagtaaggctctctaaggggtaagtaggaggatccacaggatttgagatgctaaggccccagagatcgtttgatccaaccctcttattttcagaggggaaaatggggcctagaagttacagagcatctagctggtgcgctggcacccctggcctcacacagactcccgagtagctgggactacaggcacacagtcactgaagcaggccctgtttgcaattcacgttgccacctccaacttaaacattcttcatatgtgatgtccttagtcactaaggttaaactttcccacccagaaaaggcaacttagataaaatcttagagtactttcatactcttctaagtcctcttccagcctcactttgagtcctccttggggttgataggaattttctcttgctttctcaataaagtctctattcatctcatgtttaatttgtacgcatagaattgctgagaaataaaatgttctgttcaacttat

SEQ ID NO: 5362 - protein, 401 aa, Homo sapiens; identical to SEQ ID NO: 698

SEQ ID NO: 5363 - DNA, 3076 bp, Homo sapiens
gggggcggggccttgccgctgcggaggccggagacgcggcggcgctggacgcggaggcgctgggcgcacggcgcggagccggccggagctcgaggccggcggcggcgggagagcgacccgggcggcctcgtagcggggccccggatccccgagtggcggccggagcctcgaaaagagattctcagcgctgattttgagatgatgggcttgggaaacgggcgtcgcagcatgaagtcgccgcccctcgtgctggccgccctggtggcctgcatcatcgtcttgggcttcaactactggattgcgagctcccggagcgtggacctccagacacggatcatggagctggaaggcagggtccgcagggcggctgcagagagaggcgccgtggagctgaagaagaacgagttccagggagagctggagaagcagcgggagcagcttgacaaaatccagtccagccacaacttccagctggagagcgtcaacaagctgtaccaggacgaaaaggcggttttggtgaataacatcaccacaggtgagaggctcatccgagtgctgcaagaccagttaaagaccctgcagaggaattacggcaggctgcagcaggatgtcctccagtttcagaagaaccagaccaacctggagaggaagttctcctacgacctgagccagtgcatcaatcagatgaaggaggtgaaggaacagtgtgaggagcgaatagaagaggtcaccaaaaaggggaatgaagctgtagcttccagagacctgagtgaaaacaacgaccagagacagcagctccaagccctcagtgagcctcagcccaggctgcaggcagcaggcctgccacacacagaggtgccacaagggaagggaaacgtgcttggtaacagcaagtcccagacaccagcccccagttccgaagtggttttggattcaaagagacaagttgagaaagaggaaaccaatgagatccaggtggtgaatgaggagcctcagagggacaggctgccgcaggagccaggccgggagcaggtggtggaagacagacctgtaggtggaagaggcttcgggggagccggagaactgggccagaccccacaggtgcaggctgccctgtcagtgagccaggaaaatccagagatggagggccctgagcgagaccagcttgtcatccccgacggacaggaggaggagcaggaagctgccggggaagggagaaaccagcagaaactgagaggagaagatgactacaacatggatgaaaatgaagcagaatctgagacagacaagcaagcagccctggcagggaatgacagaaacatagatgtttttaatgttgaagatcagaaaagagacaccataaatttacttgatcagcgtgaaaagcggaatcatacactctgaattgaactggaatcacatatttcacaacagggccgaagagatgactataaaatgttcatgagggactgaatactgaaaactgtgaaatgtactaaataaaatgtacatctgaagatgattattgtgaaattttagtatgcactttgtgtaggaaaaaatggaatggtcttttaaacagcttttggggggtactttggaagtgtctaataaggtgtcacaatttttggtagtaggtatttcgtgagaagttcaacaccaaaactggaacatagttctccttcaagtgttggcgacagcggggcttcctgattctggaatataactttgtgtaaattaacagccacctatagaagagtccatctgctgtgaaggagagacagagaactctgggttccgtcgtcctgtccacgtgctgtaccaagtgctggtgccagcctgttacctgttctcactgaaaagtctggctaatgctcttgtgtagtcacttctgattctgacaatcaatcaatcaatggcctagagcactgactgttaacacaaacgtcactagcaaagtagcaacagctttaagtctaaatacaaagctgttctgtgtgagaattttttaaaaggctacttgtataataacccttgtcatttttaatgtacaaaacgctattaagtggcttagaatttgaacatttgtggtctttatttactttgcttcgtgtgtgggcaaagcaacatcttccctaaatatatattaccaagaaaagcaagaagcagattaggtttttgacaaaacaaacaggccaaaagggggctgacctggagcagagcatggtgagaggcaaggcatgagagggcaagtttgttgtggacagatctgtgcctactttattactggagtaaaagaaaacaaagttcattgatgtcgaaggatatatacagtgttagaaattaggactgtttagaaaaacaggaatacaatggttgtttttatcatagtgtacacatttagcttgtggtaaatgactcacaaaactgattttaaaatcaagttaatgtgaattttgaaaattactacttaatcctaattcacaataacaatggcattaaggtttgacttgagttggttcttagtattatttatggtaaataggctcttaccacttgcaaataactggccacatcattaatgactgacttcccagtaaggctctctaaggggtaagtaggaggatccacaggatttgagatgctaaggccccagagatcgtttgatccaaccctcttattttcagaggggaaaatggggcctagaagttacagagcatctagctggtgcgctggcacccctggcctcacacagactcccgagtagctgggactacaggcacacagtcactgaagcaggccctgtttgcaattcacgttgccacctccaacttaaacattcttcatatgtgatgtccttagtcactaaggttaaactttcccacccagaaaaggcaacttagataaaatcttagagtactttcatactcttctaagtcctcttccagcctcactttgagtcctccttggggttgataggaattttctcttgctttctcaataaagtctctattcatctcatgtttaatttgtacgcatagaattgctgagaaataaaatgttctgttcaacttat

SEQ ID NO: 5364 - protein, 401 aa, Homo sapiens; identical to SEQ ID NO: 698

SEQ ID NO: 5365 - DNA, 2051 bp, Homo sapiens
ggagacgcggcggcgctggacgcggaggcgctgggcgcacggcgcggagccggccggagctcgaggccggcggcggcgggagagcgacccgggcggcctcgtagcggggccccggatccccgagtggcggccggagcctcgaaaagagattctcagcgctgattttgagatgatgggcttgggaaacgggcgtcgcagcatgaagtcgccgcccctcgtgctggccgccctggtggcctgcatcatcgtcttgggcttcaactactggattgcgagctcccggagcgtggacctccagacacggatcatggagctggaaggcagggtccgcagggcggctgcagagagaggcgccgtggagctgaagaagaacgagttccagggagagctggagaagcagcgggagcagcttgacaaaatccagtccagccacaacttccagctggagagcgtcaacaagctgtaccaggacgaaaaggcggttttggtgaataacatcaccacaggtgagaggctcatccgagtgctgcaagaccagttaaagaccctgcagaggaattacggcaggctgcagcaggatgtcctccagtttcagaagaaccagaccaacctggagaggaagttctcctacgacctgagccagtgcatcaatcagatgaaggaggtgaaggaacagtgtgaggagcgaatagaagaggtcaccaaaaaggggaatgaagctgtagcttccagagacctgagtgaaaacaacgaccagagacagcagctccaagccctcagtgagcctcagcccaggctgcaggcagcaggcctgccacacacagaggtgccacaagggaagggaaacgtgcttggtaacagcaagtcccagacaccagcccccagttccgaagtggttttggattcaaagagacaagttgagaaagaggaaaccaatgagatccaggtggtgaatgaggagcctcagagggacaggctgccgcaggagccaggccgggagcaggtggtggaagacagacctgtaggtggaagaggcttcgggggagccggagaactgggccagaccccacaggtgcaggctgccctgtcagtgagccaggaaaatccagagatggagggccctgagcgagaccagcttgtcatccccgacggacaggaggaggagcaggaagctgccggggaagggagaaaccagcagaaactgagaggagaagatgactacaacatggatgaaaatgaagcagaatctgagacagacaagcaagcagccctggcagggaatgacagaaacatagatgtttttaatgttgaagatcagaaaagagacaccataaatttacttgatcagcgtgaaaagcggaatcatacactctgaattgaactggaatcacatatttcacaacagggccgaagagatgactataaaatgttcatgagggactgaatactgaaaactgtgaaatgtactaaataaaatgtacatctgaagatgattattgtgaaattttagtatgcactttgtgtaggaaaaaatggaatggtcttttaaacagcttttggggggtactttggaagtgtctaataaggtgtcacaatttttggtagtaggtatttcgtgagaagttcaacaccaaaactggaacatagttctccttcaagtgttggcgacagcggggcttcctgattctggaatataactttgtgtaaattaacagccacctatagaagagtccatctgctgtgaaggagagacagagaactctgggttccgtcgtcctgtccacgtgctgtaccaagtgctggtgccagcctgttacctgttctcactgaaaagtctggctaatgctcttgtgtagtcacttctgattctgacaatcaatcaatcaatggcctagagcactgactgttaacacaaacgtcactagcaaagtagcaacagctttaagtctaaatacaaagctgttctgtgtgagaattttttaaaaggctacttgtataataacccttgtcatttttaatgtacaaaacgctattaagtggcttagaatttg

SEQ ID NO: 5366 - protein, 401 aa, Homo sapiens; identical to SEQ ID NO: 698

SEQ ID NO: 5367 - DNA, 1495 bp, Homo sapiens
ggagacgcggcggcgctggacgcggaggcgctgggcgcacggcgcggagccggccggagctcgaggccggcggcggcgggagagcgacccgggcggcctcgtagcggggccccggatccccgagtggcggccggagcctcgaaaagagattctcagcgctgattttgagatgatgggcttgggaaacgggcgtcgcagcatgaagtcgccgcccctcgtgctggccgccctggtggcctgcatcatcgtcttgggcttcaactactggattgcgagctcccggagcgtggacctccagacacggatcatggagctggaaggcagggtccgcagggcggctgcagagagaggcgccgtggagctgaagaagaacgagttccagggagagctggagaagcagcgggagcagcttgacaaaatccagtccagccacaacttccagctggagagcgtcaacaagctgtaccaggacgaaaaggcggttttggtgaataacatcaccacaggtgagaggctcatccgagtgctgcaagaccagttaaagaccctgcagaggaattacggcaggctgcagcaggatgtcctccagtttcagaagaaccagaccaacctggagaggaagttctcctacgacctgagccagtgcatcaatcagatgaaggaggtgaaggaacagtgtgaggagcgaatagaagaggtcaccaaaaaggggaatgaagctgtagcttccagagacctgagtgaaaacaacgaccagagacagcagctccaagccctcagtgagcctcagcccaggctgcaggcagcaggcctgccacacacagaggtgccacaagggaagggaaacgtgcttggtaacagcaagtcccagacaccagcccccagttccgaagtggttttggattcaaagagacaagttgagaaagaggaaaccaatgagatccaggtggtgaatgaggagcctcagagggacaggctgccgcaggagccaggccgggagcaggtggtggaagacagacctgtaggtggaagaggcttcgggggagccggagaactgggccagaccccacaggtgcaggctgccctgtcagtgagccaggaaaatccagagatggagggccctgagcgagaccagcttgtcatccccgacggacaggaggaggagcaggaagctgccggggaagggagaaaccagcagaaactgagaggagaagatgactacaacatggatgaaaatgaagcagaatctgagacagacaagcaagcagccctggcagggaatgacagaaacatagatgtttttaatgttgaagatcagaaaagagacaccataaatttacttgatcagcgtgaaaagcggaatcatacactctgaattgaactggaatcacatatttcacaacagggccgaagagatgactataaaatgttcatgagggactgaatactgaaaactgtgaaatgtactaaataaaatgtacatctgaagatgatt

SEQ ID NO: 5368 - protein, 401 aa, Homo sapiens; identical to SEQ ID NO: 698

SEQ ID NO: 5369 - DNA, 2441 bp, Homo sapiens
ggcttctcattgggccccgtgagtgctggcagggctgtgaagcaggtgtgactaatgggtcagctccccgctgggactgtgaccctgaagctaacaaacctaagggcaaggccaggcgcagcagctttctgagtctcttctgaagtggcttgaagtcgatactgtgtgtgtatgtaagatctagcctgaaggaaggcgctttgttcagttgctaacttattttcttggtggtaagctttagatatcacttagcttttatgtttgcttgttttgttacagattaagtagctgtcataagaaaaaggactatttacttactatctggagtcttgttctgtttgatacccctaggcacatgttcaattcagagataagagccctggaagttatagattgcaaacagttttttccctgaaaacaaaactgacatatttatatacaatgataaatacatagatagactaatgatcagtttatggatatttggcaatatgcctctcaataatcatcacattattcataatgtttataaattcataaatataagcgcacattacagcaacttattaacaatgttctataagccagaaaagcaccatgaatacaaaataaattattatagttcctgaacagtacttttacctgctaaatattttgtggccttcaacagctcagccagacagtcaaaaggagagcaacttagcagaagattttggtctagctgaggattcagatcactgaagaacttaagtttaggctgttaaacaaaattatgggagcccgttattttggactgaactcctgtactaggccccaacagacgagaccaaaccaaaatggagtcattcatgctaaatgcctcgtcatcaaatagaagctttaaggaagcagatagatccaacatagactagtttttcttgagaacagaagattccagtctacctgtgtcagtgcaataaggaagtcctctctgctttaatttttacacaaaaagtaacctcatgttagccaatccgactttaaaattttttttttcctatttccttgttctcaccttacaaaacccactgttctgctgctgtccagcaggaaccctcatgctgttttgtagaatggaagctgccctgattcatgaattgcaaataaaagccaattagatctataactatatttgttggaattttgtcttttgacaagaccaactggaccttccctttcttggttaaaatctgcaagactcttcttccttggtcacactggacaattggcttgttagagctgcagtcaggggaacctgggagagactcaccttgcgaagaagacaaaggccacggtgctaatggtggtggtgcaggtatcctgagatggccagagctcagagaagttcatgtcaagaggtgacaagccacagtgaatttacggaatttttgtttctatgtttatggaaatttatgtgtgcactcatgccgtgttatggactgaattgtgtcctcccaaaatgcatatgttgaaaccctaacgtctaaagtgacagtattttgaggacacacaaagaaggcagccacctgcaagccaggaagagagccctcaccagggaccaaaatggccagtgccttgattttggacttcagcctccaggagaaagcaaggacccccaccagatggaaaatgccaactgctgtcacgtagacttcagacgtgcgtaacatttggtgccaaagacccaggacagggggactcctttgggagactggtcccctgtcctcaccctcactccatgaggagatccacctacaacctcgggtcctcagaccaaccagcccaaggaatatctcaccaatttcaaattggggtcaaccaacttgttgtcgggaccccggagctgaatggctttcttctctgtcaaccctctgctcagcccagaagtacaggaaaagcagaagctggttccaagaaaaccaacgctcccaactccgaagagtaaggggttgttagagagccctttcccagaaagcctgacactcgtgtctttagtccagcagccatgctggtcacttttaactggccaacagatgcccggtatttacccaccaaattctaaggaaaaataggacagaatagcaagtgaaaggggtccgatggtgctcactgcttggtgatagtcgattggccccacattgggtgccaaagtgtgtccggaattggttccttctggtgggttcttgaagggcagatcacctgaggttgggagttcgagactagcctcaccaagatgtagagaccccatctctactaaaaatacaaaattagcagggcatggtggtgcatgcctgtaatcccagctacttgggagaatcacttgaacccaggagacggaggttgcagtgagccgagatcacaccattgcacttcagcctgggcaacaagagtgaaactttgtc

SEQ ID NO: 5370 - protein, 68 aa, Homo sapiens
MRRSTYNLGSSDQPAQGISHQFQIGVNQLVVGTPELNGFLLCQPSAQPRSTGKAEAGSKKTNAPNSEE

SEQ ID NO: 5371 - DNA, 562 bp, Homo sapiens
tcatccaaaaacagaaccagtaggcatgtgcatgtgcatgtgtgtgtgtgtaaagtgggggagttaaaaagaattggctcacataactatggagtctgagaagtctcaagatccgtagttggcaagctggagacacaggagagtagatggtgtagttccagtctgagggcaagaaatgactgcttgacctagctcaagtagtaccagtcaggccagaggagccccctcctttttgtcctattccggtcttcaactgattgattggacaaggcccacccacattagagaaggcaatctgccttcttcagtttaccaattcaaactttaatctcatccagaaataccctcagggacactcccagaatagtgtttggccaaaagtctgcaccccatggcccagtgaagttaacacataaaagtaaccatcacataaccctagactactgctctcccacaccatccacatctacgtgacacaaaatccagttggtttcaccttctaatatttctcttgtctgtcatgttgcactccagcctgggcaacacagtgagactctgtctc

SEQ ID NO: 5372 - protein, 62 aa, Homo sapiens
RRQSAFFSLPIQTLISSRNTLRDTPRIVFGQKSAPHGPVKLTHKSNHHITLDYCSPTPSTST

SEQ ID NO: 5373 - DNA, 295 bp, Homo sapiens
ttaggaggcgcctgctgaggaatgcaagggtgagttgttttgacgtctgtaactagcttccaaccggttccacgagagaaagcgggcggaggcagagaaatcacaacatgctacgaagcgctggatccagactatggaaatgatgttagacaaaaagccaattcgagtgattttcttttttgagttcaaaatggatcataaagcagcagagacaacttgcaacgtcaacaatgcatttggctcaggaactactaatgaatgtacagtgcagtggtggttcaaaaagttttgcaaa

SEQ ID NO: 5374 - protein, 53 aa, Homo sapiens
MEMMLDKKPIRVIFFFEFKMDHKAAETTCNVNNAFGSGTTNECTVQWWFKKFC

SEQ ID NO: 5375 - DNA, 1391 bp, Homo sapiens
tgccaccatgtaagatgtcccttgctcttccaccatgattgtgaggcctctccagccatgtgaaactgtctgtgtaggttttttctggctactcctgtttcctcccacatcccaaaggtgtgcctatgaggtgaactgccatgtctacacatcccagtatgagtgagtgcaggtggtgtgcacgcgccctgcgatgggagtgtgtcctattcagggctggttcccgccttgcgccctaagctttggagataggcttcggccaccctcaaccctgaactggaataagcagaaaaccacatctggtcaggagcccagtgtgtcccacttggacaagaatagaaatctctcttctggaatatggtaaacacagattttgtttccaagttaacacataatgtagttctatcatgtttacagacagtaagttctcaatatcatattaaatatagattctgtgccaaaagaatagggatcaacctgtcatctctatttccaggaattagtcttttttattcctctagtggaaacctttgaggaatttgctcattttccccctaaagctgtgaagaaaagttaaaggtcaaatgggagaatagaatgaaagaagaagaaaacagaaactcaaagaaacctagactcttgaatttgaactcatttttttgcaaaataattgaatgagtcagtccgaaatcatcagagggctctccacctatttctcaatgaactgagaagcatggaggattcagggtggggctagggaggtggaaacccatgctttgattcagggagaggtaatgcttctaagcttcattaggaactgaataatggcaaggtgcccagggagcatgcctggattctggctccttgcccaaccctcaccctgccccagggcaaactcagaaaaccaagtcagatcatcataatgacgtgcatggctgctgttacctgagacagaagccatgatgtcatcttgtcataattgacttcaggtttgtcactctcagatcttctctggttggagccaatggtttctttcagacctgagatatcctgatgaagcagaccacacctgccctcagagatgacctcatgaggaagctgagctgcataacaaacatctctgctgctcagccacctccactctttttcaacagaccttggagatagcacagcacccacaccaaaaaatcaggaagctctcttatcagcaatctttctgtacctatgaaatcagacattccagccatggcagaacctcctgagtgggccagagcctcagagtcaggaaaagctggggcctaatgatgtttcaaatcaaatcactctgtaggggattttccatttaacatattgtgattgtgcagtaacattagtctttgccatttaattta

SEQ ID NO: 5376 - protein, 56 aa, Homo sapiens
MGVCPIQGWFPPCALSFGDRLRPPSTLNWNKQKTTSGQEPSVSHLDKNRNLSSGIW

SEQ ID NO: 5377 - DNA, 5231 bp, Homo sapiens
aactgttgtgctctgcgggtggcgatatggaagcacgaggctgtctctgacaaccacgtcacgcaggccgctgtccctcctacccggatgggctctgtgctgggccgggaattctgcccccagggctgatgtgaggacgaagttcttcacttatctgttatgagttttcaccgtcaactacccctgctcttcttttggggtgagagatgggacttgtcttggaaagaaggctttgctttgcccttgggaaggtggagagttgcgaaaaagaatgtgaatggctgggcttaatggtgcgagttggttttgtgtgctctagggttagaagtctgtttttcccatgggagaagggttttgtctttctggtccaagaactcgaggaccttgctagaagagcgttccagccacattctcttttcacctgcttctggagtttggggttgagcagcctggagtgcacagaaccttggcatccctggttcggggttccgcaaatgggccaagcccactctcagagctgtgcgggtgaatccaacagtgcctgtaccctgcctgctctggaaatgaggcccctggagaaaggaggcctggactctggagaggggacaccagtcctggggcctggccaatagacaaggacacagggatctttgataaacagggtttggctttctcctcagagttgtgatttcttgcctggttcccaggagcccctgggaagctggacctggaacactggagcctgatattctctgttgtggggaatccaaggtgaagtgtggccacgccttgggctgttctggagagctacagcgggagagaagttcatggagttctgtgacacagtgactggccaggaagcccagagcaagaggcgacaagacacagccagatcagggagaaggcctgccagcaatccagacatccacgccgtgagctttctgcaagccctcaggcagggctccggaaggccacctctgggatggtggggtcctacaggtgggcagagctgggtttactttagcaagatcatatgttcagaggtaaagcccatgggggtgaagacttggcaggtgcattccaccaatctggccatgggaggaaggacacctgtgctttttctgagtggccacgtgtttttgtggctctaggagtcagggttacagccagattaagaaaaaacagaaccccaaatgctgtgaatttcaggcttctttggccattcgggtaaaaaataacctgtgccaagtggatcaagcttgatgtgggtgcgagggaagcagcatggtgctgtcatttcaatcagggcacaaacactggagagaaaataaatactttagaaggcacttgaccttttaatgtggagttctaaaaatggagattgaacacagtgatgcttaacagaggcaaagagagccaggctgctatcagattctttctacccaagagtctggctttcctccctggcattagcagggcatccctgttacccaggtgagcacaagaacagctgttacctggatgaacctaagaacagccctattacctgggtgagcaccagaacagcctgttacttggatgaacctgagcaggcttgtgtaagaagcatgaccgcctaagaccaccacactgtgggaaggccaaggcccgtgtaatgaggtaccatgttcagaggaagaccaaggagcaccaaggaggcagcagactgagtggagaggaatatgcaggggatgctgtgtagtcagaatcaagcttcccagtgtcactcaaagaagcagcaagactctgtcttaacgtggcttgctgttgctattatttccctcgaagccatgagacactggatgagagcagcggctgggcgtgtgagttaacatcgcatgctttcctgactccactgccccactcatgaggtcatagcatagcttcttgaatttgtccttctctgaatggaagccacttggatcctccaggtatttctccaaggggcagggctttcagcacagaatcaacaggagaaaccatctggaaagcccagaggcgtgttcggcagcgtgtgggagcagagctgcagtaaacggtggctccttgttcgcccatctcagctgttcagctgacttcttgccgtctccagctgtcttctctatctcatcctgatgactccttcccacaactctttccctggctgccgcaacggtccagctgcagcctgcattcacagttacttacctgtggggctttcttgtttctgagatggccgaattgtcttctgaaatttacctccatgactctggttatatattttggttcctagtgggtgccgacatcacagtgggctgattagatggtttgcattacttgttggcaggccttcgagcctcctgtgcagtttcccgaaaatattccatctgcaggtgggaagcccaagcccctgggcaaattatgccatgagtgtgtcttggcagtcattctgggttccaatgacttgggccgtggttcaaacattccctggggattgtccggatctgagctcctggtggtgggaagccagcctttggtgccagcctggcccagcaccatctcttgactcctgaccccaccagagggtgaggacttggtgtgagcagggacacagcaggtcccaggaaagtctgctgagtgaacgggtgaataaaatagtctcaaaccctgtatgttattccctccttgcccctactcagaactcctcctcacttccaatcggaacttgtctcctctctgccagaaggtcagccctggtgattcctggagttcatgcctcctgtcccgccatggttctgtggactgctggctgttgtggggagctatcttcctggtgagctttgcagggcagggtcccagcaggagagcagaagcaagatgcatggtgcagatgagggattctttccagtggttagaccctgcaggaccatgggggagctgggcagaaaagtacaaggggtgttggagaatctgagaaaaggcatcaaccagccttcctgaatccctggcctgtggcaagaaaggcaagtcagagcatgggccatggggcacaaaggggagtaggtggggtctatggactgccaccacctctagcataaagtccaggctcaatgtctgctgctgggcctggggcctcttgtggtcagtgggaagggtcaggcccagaggagggagggcagctctgtgtttgcttgtcactgtagaggccatgacaaccttcagggtacaagctgctgcttcacttccattttgcaaatctcaggcagaacccctcttttggccaactctctacatggaagagggttctggaaagataatcccagttacatcatgtgtgacccaggttcatcatgtaatactaactgccgtggctggatctcagatttctttgtgtgccattgagtgttttacccagggcagatacaaatgagtgatggggaggaaacaggctaagggggcaaatgcaatgcttttgttgacccagccttcattatgggttcactactgatcaccataccagcaaatgctgcctcctgccccaaggccgtgataaggagcacttgaaagcagtctgtccatttccaaaatattgtcacttcaagaatgatgtgtaaatggcatcatacagtgtggaaccttttgggattggcttttttcactcagcataattctctggagattcatccaagttttatgtatcaacagtccattccgtctaatggctgagtggtgttccacagtctgggtgtgcacacagtgtttaaccattcacctgtgagctgaaggacatctgggttgacgattacacatttttgactactacaaataaagctgccatgaacattcatggtgcaagtttttgtgtgaatgtaagttttcatttctccgggataaatgctcaagaacacaactgtacgggcgttgcatatttagttttatgagaaatgactaaactgtttttcggagtggctgtaccagtttacagctcaccaatactttattattcctaaaataaaatattactaagttaattgtcggggagggcagtggtggatgtggccatgaaaggacagcaggagggatcctttgggtgatgaaaatgttcagtatgtttggtatcttgactgtgggggtgaatacaccaatgtatatgtgagaagatcgtatagaactaaacacacacacacacacgaacacacacacacaaacacatacacacagatgagtccttgtgcatatataactgggcaatctgaacatgacacatgggttgcatcaatgtcaatacctggcggtgaaatcgtattctagttttgccaagatgttaccactgggaaaactgggtaaaagtaactgcatgtgaatctacaattatctaacaatttaaaaaattaattaacaagtgtctaaaatacatgatatttgttaaaaggcaagcctatgaaaaacatgatacattattaagagttaggcaaatgttgttgttacttgcttttctgcttttgggggccaagtactggttactaagattcctagcctcttccgaaggcggtccttcctccacacaactgcaagaagaggccttttcagtgtagacccttactttacccctccaccccagggcccattttagggaatagaaaagcaatttggaaggattagactgagggacccgtgcctccagcagataggccagcggaagagcagtcagtgctgtgggagatgctgcggggaggagcgtgtctgcgaggaaggactgctggcttcagcacttcccgattggaacttcatgatggaatccttggcacaccaatgctaaaaaccaagtgtgaaaaaaatcaccctagaacctgctagagtgatactgtggaggatctgtgggctgcaccgcccacagggactgccctgtatcagcatggagaactgatatcccatggcagggccactgggtagcggctgctgctaagtgggggtgccggatgcgttccttggttcatcttccactgatgttttggaaattgggctccgtaagagcacccagaagtgcttattaagaaccacccgtgctctgctggttcctgaggtgccagattccctccagggaaatgttgacctttgtgatagactatcttatgaccaaaagcttcgcagcattaaaatgtgatccatctcattaggttgtcatatgaagcctataaataactccagaaatg

SEQ ID NO: 5378 - protein, 49 aa, Homo sapiens
MQGMLCSQNQASQCHSKKQQDSVLTWLAVAIISLEAMRHWMRAAAGRVS

SEQ ID NO: 5379 - DNA, 759 bp, Homo sapiens
cctggatgaacctaagaacagccctattacctgggtgagcaccagaacagcctgttacttggatgaacctgagcaggcttgtgtaagaagcatgaccgcctaagaccaccacactgtgggaaggccaaggcccgtgtaatgaggtaccatgttcagaggaagaccaaggagcaccaaggaggcagcagactgagtggagaggaatatgcaggggatgctgtgtagtcagaatcaagcttcccagtgtcactcaaagaagcagcaagactctgtcttaacgtggcttgctgttgctattatttccctcgaagccatgagacactggatgagagcagcggctgggcgtgtgagttaacatcgcatgctttcctgactccactgccccactcatgaggtcatagcatagcttcttgaatttgtccttctctgaatggaagccacttggatcctccaggtatttctccaaggggcagggctttcagcacagaatcaacaggagaaaccatctggaaagcccagaggcgtgttcggcagcgtgtgggagcagagctgcagtaaacggtggctccttgttcgcccatctcagctgttcagctgacttcttgccgtctccagctgtcttctctatctcatcctgatgactccttcccacaactctttccctggctgccgcaacggtccagctgcagcctgcattcacagttacttacctgtggggctttcttgtttctgagatggccgaattgtcttctgaaattt

SEQ ID NO: 5380 - protein, 49 aa, Homo sapiens; identical to SEQ ID NO: 5378

SEQ ID NO: 5381 - DNA, 3530 bp, Homo sapiens
gacttccaggctctagatactaggtgtgtcttgctctaattaaggaaatcttatctgctccatcttagcccagtttaacgtccccaggaattccatcttctgcagtcctaaacttttccctttttcaattcagtgcaacttatactcttctctgaaagtggctccaggtctgaagaactgtggtctgggaggaatagaaaagcatgctcagctataaccaggcccacatcccctaagttgcctgcccaccaagttacgggccggacttatgcgccacgctttgtccggggacctcgcgctgtcctccctccggttcccacagagcagggggcttccggcggggtaccctcctctgtgggcggggcctaccgctcccgctcccgcctccccggttgcgcgcggctgcgggctgcgatcacgtgagcacagcagggagggggaggggccctgatttccgggcggcggaaggagacgcggccgcgtgaggacgaggctatttgaaaacacgctccgggagctagagcctgaggtcggcggcgcacgctgttgccccgtgggcttctgctccctcgcttgtcttctcgggcttctcgccccggccgcggccgggtcctcagtagtcgagaatgactaaaaaaagaaaacgccaacatgattttcaaaaagtaaaattgaaagttggtaaaaagaagcccaagttacaaaatgctactcctacaaactttaaaacaaagactatacatctgcctgagcaactcaaagaggatggaacacttccaacaaacaatagaaaacttaacataaaggatttgctgtcacagatgcatcactacaatgctggggttaaacaaagtgctcttcttggacttaaagaccttttgtctcaatacccatttataattgatgcacacctttcaaacatattaagtgaagtgactgctgtgtttacagataaagatgctaatgtacgattagcagcagttcaacttcttcaattcctggcccccaaaatacgagctgaacaaatttctccattttttcctttggtaagtgcccatctctctagtgccatgactcacattactgaaggaattcaggaggactctttaaaagttttggacattctgctggaacagtacccagctctaattactggccgtagcagcatattgcttaagaattttgtagaacttatttctcatcagcagctgtccaaaggactgataaatagagacagatcccagtcctggatactttctgtaaatcctaatcggagactcacttctcagcaatggaggctgaaagtcttagtgagactcagtaaattccttcaggccttggcagatggatccagtaggttgagagaaagtgaaggacttcaggaacagaaagaaaatccccatgccactagcaactccatttttatcaactggaaggaacatgccaacgaccagcaacacatccaggtttatgaaaatgggggttcacagccaaatgtcagttcacagttcaggctacggtatctggttggaggactgagtggtgtggatgaaggcctgtcatctactgaaaacctgaaaggatttattgagataataattccattgctaattgaatgctgggttgaagctgtacctccacaactagctactcctgttgggaatggtatagaacgagaacctctacaggttatgcagcaagttcttaatattatttcccttctgtggaaactctctaaacaacaggatgaaacccataaattggagtcatggcttcgaaagaactaccttattgattttaaacaccattttatgagtcgttttccatatgtcttaaaagaaataaccaagcacaaaaggaaagagccaaataaaagcatcaagcattgcacagttctctccaataacatagatcatctcttactgaatttaacactgtctgatatcatggtctccctggcaaatgcgtcaactttgcagaaggattgcagttggatagaaatgataaggaaatttgtaacagagacccttgaagatggctctaggctaaatagtaagcaactgaacagattgctgggagtatcctggaggttaatgcaaatacagccaaacagagaggacacagagactcttattaaggcagtttatacattatatcagcagaggggccttatccttccagttcggactttgttattgaagtttttcagtaaaatctatcagacagaagaactgagatcttgtagattcagatatcgtagtaaagtgttatcccgttggctggctggcttaccattgcaacttgctcatcttggctcccgaaatcctgagctctctacacagcttatcgatatcattcataccgctgcagcacgagcaaataaagaattactaaaaagtttacaagctactgccctccgaatttatgatccacaagaaggtgctgtggtggttctccctgcagactctcagcagcgtttggttcagcttgtatatttcctacccagtctgccggctgatttgctttctcggttaagtcgttgctgtattatgggaagactcagttcaagtttggctgccatgcttatcgggatactgcacatgagatcatcattttctgggtggaagtattcagctaaagactggttgatgagtgatgtagactatttcagcttcttattttccacacttacagggttttcgaaagaggagttgacttggcttcagagccttcgaggagttcctcatgtcatccagacacagctttcccctgtgcttctctaccttacagatttggatcaatttttacaccactgggatgtaacagaggcagtttttcacagtttattggttattcctgcccgaagtcagaactttgacatcttgcaaagtgccatcagtaagcatttggttgggttgactgtaattcctgacagcacggctggctgtgtttttggtgttatctgtaagctcctggatcatacttgtgtagttagtgagactctactgccatttctggcttcttgttgctacagtcttctttattttctgctcactatagagaaaggggaagcagaacatctaagaaagagggacaagctgtggggggtctgtgtctccatcctggctctcttgcctcgagtcctcaggttgatgctgcagagcctgcgggtgaacagagttgggcctgaggagctgcctgttgtgggccagctgcttcgactgctgcttcagcatgcacccctcaggactcatatgttgaccaatgcgatcttggtgcagcagatcatcaagaatatcacgacattgaagagtggaagtgttcaggaacagtggctcacagacttacattactgcttcaacgtgtatatcactgggcatccccaagggcccagtgcactggctacagtgtattgaagaggccatagtacctcctgtttgaagttgtttattcacatctatcttatttgaagaaaaagactgatgtaatagatctttgtcattaaagctgaacttttaaagaagtttacg

SEQ ID NO: 5382 - protein, 929 aa, Homo sapiens
MTKKRKRQHDFQKVKLKVGKKKPKLQNATPTNFKTKTIHLPEQLKEDGTLPTNNRKLNIKDLLSQMHHYNAGVKQSALLGLKDLLSQYPFIIDAHLSNILSEVTAVFTDKDANVRLAAVQLLQFLAPKIRAEQISPFFPLVSAHLSSAMTHITEGIQEDSLKVLDILLEQYPALITGRSSILLKNFVELISHQQLSKGLINRDRSQSWILSVNPNRRLTSQQWRLKVLVRLSKFLQALADGSSRLRESEGLQEQKENPHATSNSIFINWKEHANDQQHIQVYENGGSQPNVSSQFRLRYLVGGLSGVDEGLSSTENLKGFIEIIIPLLIECWVEAVPPQLATPVGNGIEREPLQVMQQVLNIISLLWKLSKQQDETHKLESWLRKNYLIDFKHHFMSRFPYVLKEITKHKRKEPNKSIKHCTVLSNNIDHLLLNLTLSDIMVSLANASTLQKDCSWIEMIRKFVTETLEDGSRLNSKQLNRLLGVSWRLMQIQPNREDTETLIKAVYTLYQQRGLILPVRTLLLKFFSKIYQTEELRSCRFRYRSKVLSRWLAGLPLQLAHLGSRNPELSTQLIDIIHTAAARANKELLKSLQATALRIYDPQEGAVVVLPADSQQRLVQLVYFLPSLPADLLSRLSRCCIMGRLSSSLAAMLIGILHMRSSFSGWKYSAKDWLMSDVDYFSFLFSTLTGFSKEELTWLQSLRGVPHVIQTQLSPVLLYLTDLDQFLHHWDVTEAVFHSLLVIPARSQNFDILQSAISKHLVGLTVIPDSTAGCVFGVICKLLDHTCVVSETLLPFLASCCYSLLYFLLTIEKGEAEHLRKRDKLWGVCVSILALLPRVLRLMLQSLRVNRVGPEELPVVGQLLRLLLQHAPLRTHMLTNAILVQQIIKNITTLKSGSVQEQWLTDLHYCFNVYITGHPQGPSALATVY

SEQ ID NO: 5383 - DNA, 799 bp, Homo sapiens
gaggagggtaccccgccggaagccccctgctctgtgggaaccggagggaggacagcgcgaggtccccggacaaagcgtggcgcataagtccggcccgtaacttggtgggcaggcaacttaggggatgtgggcctggttatagctgagcatgcttttctattcctcccagaccacagttcttcagacctggagccactttcagagaagaatatccagtatacatctcaaggtcaacttgtccaaaacagagctactgatgattttccccttgaaatctactcttcctacagcttattcatctcaaatagctggagtacagtggcatgatcatatctcactgcaacttctacctcctgggctcaagcaatcctcttacctcagcctcctgagtagctgggactatagtctccctctcttgccaagcctggactgtactgccatgatctcagctcgctgcaacctccctgcctcgagttctggtgattctcctgcctcggcctgacattccaggcaggcgccgccactcctgactggtttttgtatttttggtggagacggggtttcaccgtgttgaccgggctggtctccagctcctggcctcgggtgatctgcccacctcggcctcccgaggtgctgggattgcagacggagtctcgctcactcaatgctcaatgttgcccaggctggagtgcagtggcgtgatctcagcttgctacaacctccacctcccagccgcctgccttggcctcccaaagtgctaagattacagcctctgcccacccgccaccccgtctaggaa

SEQ ID NO: 5384 - protein, 117 aa, Homo sapiens
MLFYSSQTTVLQTWSHFQRRISSIHLKVNLSKTELLMIFPLKSTLPTAYSSQIAGVQWHDHISLQLLPPGLKQSSYLSLLSSWDYSLPLLPSLDCTAMISARCNLPASSSGDSPASA

SEQ ID NO: 5385 - DNA, 1965 bp, Homo sapiens
gaagccccctgctctgtgggaaccggagggaggacagcgcgaggtccccggacaaagcgtggcgcataagtccggcccgtaacttggtgggcaggcaacttaggggatgtgggcctggttatagctgagcatgcttttctattcctcccagaccacagttcttcagacctggagccactttcagagaagagtataagttgcactgaattgaaaaagggaaaagtttaggactgcagaagatggaattcctggggacgttaaactgggctaagatggagcagataagatttccttaattagagcaagacacacctagtatctagagcctggaagtcttggtcaaggattctccctaacatctcagtttctcagcactaacattcctgctactaaaatgaagtgagaaattaatttctgaagttaagtaaagaaataaactaaaattcctagaaaagaggtaagaagaatgagcctttgaaaaatgtcttcacaaagactggcatgatggcatggaagaaagagccccagatatccagtatacatctcaaggtcaacttgtccaaaacagagctactgatgattttccccttgaaatctactcttcctacagcttattcatctcaaatagctggagtacagtggcatgatcatatctcactgcaacttctacctcctgggctcaagcaatcctcttacctcagcctcctgagtagctgggactataggaagtgagcagcgtctctgcctggccgcccatcgtctgggatgtgaggagcacctttgcccggccgccccgtctgggaagtgaggagcgcctctgcccggccaccccgtctgggaggtgaggagcatctctgcccggccaccccgtctgggaggtgaggagcgcctctgcccggctgcccagtctgggaagtgaggagcgcccctgcccacccgcccattgtctgggaagtgaggagcacctctgcccagtcgccccgtctgggaagtgaggagcgcctctgcccggccgccccgtctgggatgtgaggagcgcctctgcccggccgccccgtctgggatgtgaggagcgcctctgcccagccgccaccccatctgggaagtggggagcgcctctgcccggccgccccatctgggatgtgaggagcgcctctgcctggcctccccgtctgggaggtggggagcgcctctgcccagccgccccgtctgggaggtgaggagcatctctacctggctgctcatcatctgggatgtgaggagcacctctgcccggccgccccatctgggaagtgaggagcgcctctgcccagccacccttcgtctgggaggtgaggagcgtctctgcctggccgcccattgtctgggatgtgaggagcgcctctgcccggccgccccctctgggaagtgaggagtgcctctgcctggccgccccatctgggaggtgtacccaacagctccgaagagacagcgaccattgagaacgggccatgatgacgatggtggttttgttgaaaaataaagggggaaatgtggggaaaagaaagagagatcagattgttactgtgtctgtgtagaaagaagtagacataggagactccattttgttctgtactaagaaaaattcttctgccttgggatgctgttaatctataaccttacccccaaccccgtgctctctgaaacatgtgctgtgtcaactcagggttaaatggattaagggtggtgcaagatgtgctttgttaaacagatgcttgaaggcagcatgctccttaagagtcatcaccactccctaatctcaagtacccagggacacaaacactgcggaaggccgcagggtcctctgcctaggaaaaccagagacctttgttcacgtgtttatctgctgaccttctctccactattatcctatgaccctgccacatccccctcgccgagaaacacccaagaatgatcaataaatac

SEQ ID NO: 5386 - protein, 76 aa, Homo sapiens
MMAWKKEPQISSIHLKVNLSKTELLMIFPLKSTLPTAYSSQIAGVQWHDHISLQLLPPGLKQSSYLSLLSSWDYRK

SEQ ID NO: 5387 - DNA, 2357 bp, Homo sapiens
gaagccccctgctctgtgggaaccggagggaggacagcgcgaggtccccggacaaagcgtggcgcataagtccggcccgtaacttggtgggcaggcaacttaggggatgtgggcctggttatagctgagcatgcttttctattcctcccagaccacagttcttcagacctggagccactttcagagaagagtataagttgcactgaattgaaaaagggaaaagtttaggactgcagaagatggaattcctggggacgttaaactgggctaagatggagcagataagatttccttaattagagcaagacacacctagtatctagagcctggaagtcttggtcaaggattctccctaacatctcagtttctcagcactaacattcctgctactaaaatgaagtgagaaattaatttctgaagttaagtaaagaaataaactaaaattcctagaaaagaggtaagaagaatgagcctttgaaaaatgtcttcacaaagactggcatgatggcatggaagaaagagccccagatatccagtatacatctcaaggtcaacttgtccaaaacagagctactgatgattttccccttgaaatctactcttcctacagcttattcatctcaaatagctggagtacagtggcatgatcatatctcactgcaacttctacctcctgggctcaagcaatcctcttacctcagcctcctgagtagctgggactatagtctccctctcttgccaagcctggactgtactgccatgatctcagctcgctgcaacctccctgcctcgagttctggtgattctcctgcctcggcctgacattccaggcaggcgccgccactcctgactggtttttgtatttttggtggagacggggtttcaccgtgttgaccgggctggtctccagctcctggcctcgggtgatctgcccacctcggcctcccgaggtgctgggattgcagacggagtctcgctcactcaatgctcaatgttgcccaggctggagtgcagtggcgtgatctcagcttgctacaacctccacctcccagccgcctgccttggcctcccaaagtgctaagattacagcctctgcccacccgccaccccgtctaggaagtgagcagcgtctctgcctggccgcccatcgtctgggatgtgaggagcacctttgcccggccgccccgtctgggaagtgaggagcgcctctgcccggccaccccgtctgggaggtgaggagcatctctgcccggccaccccgtctgggaggtgaggagcgcctctgcccggctgcccagtctgggaagtgaggagcgcccctgcccacccgcccattgtctgggaagtgaggagcacctctgcccagtcgccccgtctgggaagtgaggagcgcctctgcccggccgccccgtctgggatgtgaggagcgcctctgcccggccgccccgtctgggatgtgaggagcgcctctgcccagccgccaccccatctgggaagtggggagcgcctctgcccggccgccccatctgggatgtgaggagcgcctctgcctggcctccccgtctgggaggtggggagcgcctctgcccagccgccccgtctgggaggtgaggagcatctctacctggctgctcatcatctgggatgtgaggagcacctctgcccggccgccccatctgggaagtgaggagcgcctctgcccagccacccttcgtctgggaggtgaggagcgtctctgcctggccgcccattgtctgggatgtgaggagcgcctctgcccggccgccccctctgggaagtgaggagtgcctctgcctggccgccccatctgggaggtgtacccaacagctccgaagagacagcgaccattgagaacgggccatgatgacgatggtggttttgttgaaaaataaagggggaaatgtggggaaaagaaagagagatcagattgttactgtgtctgtgtagaaagaagtagacataggagactccattttgttctgtactaagaaaaattcttctgccttgggatgctgttaatctataaccttacccccaaccccgtgctctctgaaacatgtgctgtgtcaactcagggttaaatggattaagggtggtgcaagatgtgctttgttaaacagatgcttgaaggcagcatgctccttaagagtcatcaccactccctaatctcaagtacccagggacacaaacactgcggaaggccgcagggtcctctgcctaggaaaaccagagacctttgttcacgtgtttatctgctgaccttctctccactattatcctatgaccctgccacatccccctcgccgagaaacacccaagaatgatcaataaatact

SEQ ID NO: 5388 - protein, 106 aa, Homo sapiens
MMAWKKEPQISSIHLKVNLSKTELLMIFPLKSTLPTAYSSQIAGVQWHDHISLQLLPPGLKQSSYLSLLSSWDYSLPLLPSLDCTAMISARCNLPASSSGDSPASA

SEQ ID NO: 5389 - DNA, 704 bp, Homo sapiens
ggagggaggacagcgcgaggtccccggacaaagcgtggcgcataagtccggcccgtaacttggtgggcaggcaacttaggggatgtgggcctggttatagctgagcatgcttttctattcctcccagaccacagttcttcagacctggagccactttcagagaagaatatccagtatacatctcaaggtcaacttgtccaaaacagagctactgatgattttccccttgaaatctactcttcctacagcttattcatctcaatctccctctcttgccaagcctggactgtactgccatgatctcagctcgctgcaacctccctgcctcgagttctggtgattctcctgcctcggcctgacattccaggcaggcgccgccactcctgactggtttttgtatttttggtggagacggggtttcaccgtgttgaccgggctggtctccagctcctggcctcgggtgatctgcccacctcggcctcccgaggtgctgggattgcagacggagtctcgctcactcaatgctcaatgttgcccaggctggagtgcagtggcgtgatctcagcttgctacaacctccacctcccagccgcctgccttggcctcccaaagtgctaagattacagcctctgcccacccgccaccccgtctaggaagtgagcagcgtctctgcctggccgcccatcgtctgggatgtgaggagc

SEQ ID NO: 5390 - protein, 77 aa, Homo sapiens
MLFYSSQTTVLQTWSHFQRRISSIHLKVNLSKTELLMIFPLKSTLPTAYSSQSPSLAKPGLYCHDLSSLQPPCLEFW

SEQ ID NO: 5391 - DNA, 1341 bp, Homo sapiens
cgcgagggggcggcggcgtccgggctttgtggccgcggcgcgcgcggcggggcctggccggccgggggcgcgccgccgccgccgccgccgcccggcgttcgggagcccgcggccctcccggccgccctgcttgcgagaggagcccaggccgcccgccctcgcgcctcgccggcccctcccccggtcgccgcggctgccgcgccgccgctgcaggatagctagcggccaggagaaatacagtggaaaatgcaaaacaacgaaattataaagcctgccaaatacttctcagaattggaaaagagcatcctgctggctttagtagaaaagtataaatatgtgctggaatgtaagaaaagtgatgcgcgaactattgcccttaagcagcgtacctggcaggcgctggcccacgaatacaactctcagcccagcgtgtccctgcgggatttcaaacagctgaagaagtgctgggagaacatcaaggctcggaccaaaaaaattatggcccatgaaaggagagagaaagtgaaacggagcgtcagccctctcctgagtacccacgtcctagggaaggagaagatcgccagcatgctgccggagcagctctacttcctgcagagccccccggaggaggagcccgaataccaccccgacgcctcagcccaagaatcatttgctgtttcaaatagagaactgtgcgatgatgagaaagagttcatacattttccagtatgtgaggggacctctcaacctgaaccctcgtgttcagctgtcagaataacagccaataaaaactacaggagcaaaacctctcaggaaggtgctttaaaaaagatgcatgaggaagaacaccatcaacaaatgtccatcttacaactgcaactgatacaaatgaatgaggtgcatgtggccaaaatccagcagatagagcgagagtgtgagatggcagaggaggaacacaggataaaaatggaagttctcaataaaaagaagatgtattgggaaagaaaactacaaacttttaccaaggaatggcctgtttcctcatttaaccggccctttcccaattcgccctaagactttgggggtggctctcttgtaattaatctgtgttggcaaagaatgtctggaacatggacttggcggtcagtaacctgtaacagagctacaactaggaaaattagagtggtagtagtcacttatttaagaattcattcaggtaaacagctgcaccctctgtaccccttaagtggcaaagaagctgttatagtcttctgaaaattatcactatgagtgctataattctgaatataatgtctcttaattagaattcatacaagaacc

SEQ ID NO: 5392 - protein, 275 aa, Homo sapiens; identical to SEQ ID NO: 704

SEQ ID NO: 5393 - DNA, 1840 bp, Homo sapiens
cgcgagggggcggcggcgtccgggctttgtggccgcggcgcgcgcggcggggcctggccggccgggggcgcgccgccgccgccgccgccgcccggcgttcgggagcccgcggccctcccggccgccctgcttgcgagaggagcccaggccgcccgccctcgcgcctcgccggcccctcccccggtcgccgcggctgccgcgccgccgctgcaggatagctagcggccaggagaaatacagtggaaaatgcaaaacaacgaaattataaagcctgccaaatacttctcagaattggaaaagagcatcctgctggctttagtagaaaagtataaatatgtgctggaatgtaagaaaagtgatgcgcgaactattgcccttaagcagcgtacctggcaggcgctggcccacgaatacaactctcagcccagcgtgtccctgcgggatttcaaacagctgaagaagtgctgggagaacatcaaggctcggaccaaaaaaattatggcccatgaaaggagagagaaagtgaaacggagcgtcagccctctcctgagtacccacgtcctagggaaggagaagatcgccagcatgctgccggagcagctctacttcctgcagagccccccggaggaggagcccgaataccaccccgacgcctcagcccaagaatcatttgctgtttcaaatagagaactgtgcgatgatgagaaagagttcatacattttccagtatgtgaggggacctctcaacctgaaccctcgtgttcagctgtcagaataacagccaataaaaactacaggagcaaaacctctcaggaaggtgctttaaaaaagatgcatgaggaagaacaccatcaacaaatgtccatcttacaactgcaactgatacaaatgaatgaggtgcatgtggccaaaatccagcagatagagcgagagtgtgagatggcagaggaggaacacaggataaaaatggaagttctcaataaaaagaagatgtattgggaaagaaaactacaaacttttaccaaggaatggcctgtttcctcatttaaccggccctttcccaattcgccctaagactttgggggtggctctcttgtaattaatctgtgttggcaaagaatgtctggaacatggacttggcggtcagtaacctgtaacagagctacaactaggaaaattagagtggtagtagtcacttatttaagaattcattcaggtaaacagctgcaccctctgtaccccttaagtggcaaagaagctgttatagtcttctgaaaattatcactatgagtgctataattctgaatataatgtctcttaattagaattcatacaagaaccacgtgtgagtgttgttgttgttgtttttttttttaatcaaatgcaagtgtgactataaaggagtgtggctgatttttttttttttcttttttctttttaaacagacagcagaacttttctatccaaatgaatgccgtcccatggaaagtggctgtcctgggaggctacacgtttctccaatggtgatgctgttgctcagaacttgctagaggtctttagggaacctccgtgagagctgcagcacctttttaattttctcggtgtcatcctctgagtatggattttctgtttttaaacagcccaaagtttagaagggtattttctaatgtggctcataaaccaccttttaaggcctttcctcaaacaggagttctaaataagtctccaacaatagtagttttgttggagctaaggatgtaactactttgaggaagaaatgttcgtttagatttctacattctgttatgttggttttattaaaaaaaaaaaaaagacttgc

SEQ ID NO: 5394 - protein, 275 aa, Homo sapiens; identical to SEQ ID NO: 704

SEQ ID NO: 5395 - DNA, 1046 bp, Homo sapiens
cgccgccgccgccgccgccgcccggcgttcgggagcccgcggccctcccggccgccctgcttgcgagaggagcccaggccgcccgccctcgcgcctcgccggcccctcccccggtcgccgcggctgccgcgccgccgctgcaggatagctagcggccaggagaaatacagtggaaaatgcaaaacaacgaaattataaagcctgccaaatacttctcagaattggaaaagagcatcctgctggctttagtagaaaagtataaatatgtgctggaatgtaagaaaagtgatgcgcgaactattgcccttaagcagcgtacctggcaggcgctggcccacgaatacaactctcagcccagcgtgtccctgcgggatttcaaacagctgaagaagtgctgggagaacatcaaggctcggaccaaaaaaattatggcccatgaaaggagagagaaagtgaaacggagcgtcagccctctcctgagtacccacgtcctagggaaggagaagatcgccagcatgctgccggagcagctctacttcctgcagagccccccggaggaggagcccgaataccaccccgacgcctcagcccaaggtatccgttcctgatgccagtgtgcacgctctcactgggtatctgtttgacattttaattttaaaaccctccactttgagggaacttctaaaaatgaaacttttgtatcaaatccaattttcctaattcaagatctcaggattatataggacattcaaagtcttatagaagtgggcgtggtggctcgtgcctgtaatcccagcactttgggatgctgaggcgggaggatggcttgagctcaggaatttgagaccaccctgggcaacaaagtgagacccctgtttctacaaaaaatagaaaaaattagctgggcatggtagcatgcacctgtagttccagctactcgggaggctgaggctggaggataacttgagcccaggaggtggaagctgcagtgagctgttattgcgccactgcactccagcctgggtgacggagtgagaccctgtctc

SEQ ID NO: 5396 - protein, 143 aa, Homo sapiens
MQNNEIIKPAKYFSELEKSILLALVEKYKYVLECKKSDARTIALKQRTWQALAHEYNSQPSVSLRDFKQLKKCWENIKARTKKIMAHERREKVKRSVSPLLSTHVLGKEKIASMLPEQLYFLQSPPEEEPEYHPDASAQGIRS

SEQ ID NO: 5397 - DNA, 1314 bp, Homo sapiens
gttcgggagcccgcggccctcccggccgccctgcttgcgagaggagcccaggccgcccgccctcgcgcctcgccggcccctcccccggtcgccgcggctgccgcgccgccgctgcaggatagctagcggccaggagaaatacagtggaaaatgcaaaacaacgaaattataaagcctgccaaatacttctcagaattggaaaagagcatcctgctggctttagtagaaaagtataaatatgtgctggaatgtaagaaaagtgatgcgcgaactattgcccttaagcagcgtacctggcaggcgctggcccacgaatacaactctcagcccagcgtgtccctgcgggatttcaaacagctgaagaagtgctgggagaacatcaaggctcggaccaaaaaaattatggcccatgaaaggagagagaaagtgaaacggagcgtcagccctctcctgagtacccacgtcctagggaaggagaagatcgccagcatgctgccggagcagctctacttcctgcagagccccccggaggaggagcccgaataccaccccgacgcctcagcccaagttttctttcaagaaagaaaaagaagcctggaattgtcaatcatcctttctgggacttggtaggaaaaagaatcatttgctgtttcaaatagagaactgtgcgatgatgagaaagagttcatacattttccagtatgtgaggggacctctcaacctgaaccctcgtgttcagctgtcagaataacagccaataaaaactacaggagcaaaacctctcaggaaggtgctttaaaaaagatgcatgaggaagaacaccatcaacaaatgtccatcttacaactgcaactgatacaaatgaatgaggtgcatgtggccaaaatccagcagatagagcgagagtgtgagatggcagaggaggaacacaggataaaaatggaagttctcaataaaaagaagatgtattgggaaagaaaactacaaacttttaccaaggaatggcctgtttcctcatttaaccggccctttcccaattcgccctaagactttgggggtggctctcttgtaattaatctgtgttggcaaagaatgtctggaacatggacttggcggtcagtaacctgtaacagagctacaactaggaaaattagagtggtagtagtcacttatttaagaattcattcaggtaaacagctgcaccctctgtaccccttaagtggcaaagaagctgttatagtcttctgaaaattatcactatgagtgctataattctgaatataatgtctcttaattagaattcatacaagaacc

SEQ ID NO: 5398 - protein, 159 aa, Homo sapiens
MQNNEIIKPAKYFSELEKSILLALVEKYKYVLECKKSDARTIALKQRTWQALAHEYNSQPSVSLRDFKQLKKCWENIKARTKKIMAHERREKVKRSVSPLLSTHVLGKEKIASMLPEQLYFLQSPPEEEPEYHPDASAQVFFQERKRSLELSIILSGTW

SEQ ID NO: 5399 - DNA, 1813 bp, Homo sapiens
gttcgggagcccgcggccctcccggccgccctgcttgcgagaggagcccaggccgcccgccctcgcgcctcgccggcccctcccccggtcgccgcggctgccgcgccgccgctgcaggatagctagcggccaggagaaatacagtggaaaatgcaaaacaacgaaattataaagcctgccaaatacttctcagaattggaaaagagcatcctgctggctttagtagaaaagtataaatatgtgctggaatgtaagaaaagtgatgcgcgaactattgcccttaagcagcgtacctggcaggcgctggcccacgaatacaactctcagcccagcgtgtccctgcgggatttcaaacagctgaagaagtgctgggagaacatcaaggctcggaccaaaaaaattatggcccatgaaaggagagagaaagtgaaacggagcgtcagccctctcctgagtacccacgtcctagggaaggagaagatcgccagcatgctgccggagcagctctacttcctgcagagccccccggaggaggagcccgaataccaccccgacgcctcagcccaagttttctttcaagaaagaaaaagaagcctggaattgtcaatcatcctttctgggacttggtaggaaaaagaatcatttgctgtttcaaatagagaactgtgcgatgatgagaaagagttcatacattttccagtatgtgaggggacctctcaacctgaaccctcgtgttcagctgtcagaataacagccaataaaaactacaggagcaaaacctctcaggaaggtgctttaaaaaagatgcatgaggaagaacaccatcaacaaatgtccatcttacaactgcaactgatacaaatgaatgaggtgcatgtggccaaaatccagcagatagagcgagagtgtgagatggcagaggaggaacacaggataaaaatggaagttctcaataaaaagaagatgtattgggaaagaaaactacaaacttttaccaaggaatggcctgtttcctcatttaaccggccctttcccaattcgccctaagactttgggggtggctctcttgtaattaatctgtgttggcaaagaatgtctggaacatggacttggcggtcagtaacctgtaacagagctacaactaggaaaattagagtggtagtagtcacttatttaagaattcattcaggtaaacagctgcaccctctgtaccccttaagtggcaaagaagctgttatagtcttctgaaaattatcactatgagtgctataattctgaatataatgtctcttaattagaattcatacaagaaccacgtgtgagtgttgttgttgttgtttttttttttaatcaaatgcaagtgtgactataaaggagtgtggctgatttttttttttttcttttttctttttaaacagacagcagaacttttctatccaaatgaatgccgtcccatggaaagtggctgtcctgggaggctacacgtttctccaatggtgatgctgttgctcagaacttgctagaggtctttagggaacctccgtgagagctgcagcacctttttaattttctcggtgtcatcctctgagtatggattttctgtttttaaacagcccaaagtttagaagggtattttctaatgtggctcataaaccaccttttaaggcctttcctcaaacaggagttctaaataagtctccaacaatagtagttttgttggagctaaggatgtaactactttgaggaagaaatgttcgtttagatttctacattctgttatgttggttttattaaaaaaaaaaaaaagacttgc

SEQ ID NO: 5400 - protein, 159 aa, Homo sapiens; identical to SEQ ID NO: 5398

SEQ ID NO: 5401 - DNA, 1268 bp, Homo sapiens
gggggcgggggtggggggcgcgggccgggcgtagagggggccgggggccggcatggagggttttcgggccgagccgctgcgaccccggccttgcaggctgggcgccgggcggccgcctctgcgcgccgcgatgggactcggatagctagcggccaggagaaatacagtggaaaatgcaaaacaacgaaattataaagcctgccaaatacttctcagaattggaaaagagcatcctgctggctttagtagaaaagtataaatatgtgctggaatgtaagaaaagtgatgcgcgaactattgcccttaagcagcgtacctggcaggcgctggcccacgaatacaactctcagcccagcgtgtccctgcgggatttcaaacagctgaagaagtgctgggagaacatcaaggctcggaccaaaaaaattatggcccatgaaaggagagagaaagtgaaacggagcgtcagccctctcctgagtacccacgtcctagggaaggagaagatcgccagcatgctgccggagcagctctacttcctgcagagccccccggaggaggagcccgaataccaccccgacgcctcagcccaagaatcatttgctgtttcaaatagagaactgtgcgatgatgagaaagagttcatacattttccagtatgtgaggggacctctcaacctgaaccctcgtgttcagctgtcagaataacagccaataaaaactacaggagcaaaacctctcaggaaggtgctttaaaaaagatgcatgaggaagaacaccatcaacaaatgtccatcttacaactgcaactgatacaaatgaatgaggtgcatgtggccaaaatccagcagatagagcgagagtgtgagatggcagaggaggaacacaggataaaaatggaagttctcaataaaaagaagatgtattgggaaagaaaactacaaacttttaccaaggaatggcctgtttcctcatttaaccggccctttcccaattcgccctaagactttgggggtggctctcttgtaattaatctgtgttggcaaagaatgtctggaacatggacttggcggtcagtaacctgtaacagagctacaactaggaaaattagagtggtagtagtcacttatttaagaattcattcaggtaaacagctgcaccctctgtaccccttaagtggcaaagaagctgttatagtcttctgaaaattatcactatgagtgctataattctgaatataatgtctcttaattagaattcatacaagaacc

SEQ ID NO: 5402 - protein, 275 aa, Homo sapiens; identical to SEQ ID NO: 704

SEQ ID NO: 5403 - DNA, 1767 bp, Homo sapiens
gggggcgggggtggggggcgcgggccgggcgtagagggggccgggggccggcatggagggttttcgggccgagccgctgcgaccccggccttgcaggctgggcgccgggcggccgcctctgcgcgccgcgatgggactcggatagctagcggccaggagaaatacagtggaaaatgcaaaacaacgaaattataaagcctgccaaatacttctcagaattggaaaagagcatcctgctggctttagtagaaaagtataaatatgtgctggaatgtaagaaaagtgatgcgcgaactattgcccttaagcagcgtacctggcaggcgctggcccacgaatacaactctcagcccagcgtgtccctgcgggatttcaaacagctgaagaagtgctgggagaacatcaaggctcggaccaaaaaaattatggcccatgaaaggagagagaaagtgaaacggagcgtcagccctctcctgagtacccacgtcctagggaaggagaagatcgccagcatgctgccggagcagctctacttcctgcagagccccccggaggaggagcccgaataccaccccgacgcctcagcccaagaatcatttgctgtttcaaatagagaactgtgcgatgatgagaaagagttcatacattttccagtatgtgaggggacctctcaacctgaaccctcgtgttcagctgtcagaataacagccaataaaaactacaggagcaaaacctctcaggaaggtgctttaaaaaagatgcatgaggaagaacaccatcaacaaatgtccatcttacaactgcaactgatacaaatgaatgaggtgcatgtggccaaaatccagcagatagagcgagagtgtgagatggcagaggaggaacacaggataaaaatggaagttctcaataaaaagaagatgtattgggaaagaaaactacaaacttttaccaaggaatggcctgtttcctcatttaaccggccctttcccaattcgccctaagactttgggggtggctctcttgtaattaatctgtgttggcaaagaatgtctggaacatggacttggcggtcagtaacctgtaacagagctacaactaggaaaattagagtggtagtagtcacttatttaagaattcattcaggtaaacagctgcaccctctgtaccccttaagtggcaaagaagctgttatagtcttctgaaaattatcactatgagtgctataattctgaatataatgtctcttaattagaattcatacaagaaccacgtgtgagtgttgttgttgttgtttttttttttaatcaaatgcaagtgtgactataaaggagtgtggctgatttttttttttttcttttttctttttaaacagacagcagaacttttctatccaaatgaatgccgtcccatggaaagtggctgtcctgggaggctacacgtttctccaatggtgatgctgttgctcagaacttgctagaggtctttagggaacctccgtgagagctgcagcacctttttaattttctcggtgtcatcctctgagtatggattttctgtttttaaacagcccaaagtttagaagggtattttctaatgtggctcataaaccaccttttaaggcctttcctcaaacaggagttctaaataagtctccaacaatagtagttttgttggagctaaggatgtaactactttgaggaagaaatgttcgtttagatttctacattctgttatgttggttttattaaaaaaaaaaaaaagacttgc

SEQ ID NO: 5404 - protein, 275 aa, Homo sapiens; identical to SEQ ID NO: 704

SEQ ID NO: 5405 - DNA, 1314 bp, Homo sapiens
gcactgcacctgtggggaaaggcaggagaagaaggagctgaggacttcaccccaccatctgcagaatacccaacaggctgttcagttctcagctaccaagggggcaccctttcctctcccagttggtgatgatttgttaacgtattgtggaagatcaagggctggactcaggcactcctgtcctgagatagctagcggccaggagaaatacagtggaaaatgcaaaacaacgaaattataaagcctgccaaatacttctcagaattggaaaagagcatcctgctggctttagtagaaaagtataaatatgtgctggaatgtaagaaaagtgatgcgcgaactattgcccttaagcagcgtacctggcaggcgctggcccacgaatacaactctcagcccagcgtgtccctgcgggatttcaaacagctgaagaagtgctgggagaacatcaaggctcggaccaaaaaaattatggcccatgaaaggagagagaaagtgaaacggagcgtcagccctctcctgagtacccacgtcctagggaaggagaagatcgccagcatgctgccggagcagctctacttcctgcagagccccccggaggaggagcccgaataccaccccgacgcctcagcccaagaatcatttgctgtttcaaatagagaactgtgcgatgatgagaaagagttcatacattttccagtatgtgaggggacctctcaacctgaaccctcgtgttcagctgtcagaataacagccaataaaaactacaggagcaaaacctctcaggaaggtgctttaaaaaagatgcatgaggaagaacaccatcaacaaatgtccatcttacaactgcaactgatacaaatgaatgaggtgcatgtggccaaaatccagcagatagagcgagagtgtgagatggcagaggaggaacacaggataaaaatggaagttctcaataaaaagaagatgtattgggaaagaaaactacaaacttttaccaaggaatggcctgtttcctcatttaaccggccctttcccaattcgccctaagactttgggggtggctctcttgtaattaatctgtgttggcaaagaatgtctggaacatggacttggcggtcagtaacctgtaacagagctacaactaggaaaattagagtggtagtagtcacttatttaagaattcattcaggtaaacagctgcaccctctgtaccccttaagtggcaaagaagctgttatagtcttctgaaaattatcactatgagtgctataattctgaatataatgtctcttaattagaattcatacaagaacc

SEQ ID NO: 5406 - protein, 275 aa, Homo sapiens; identical to SEQ ID NO: 704

SEQ ID NO: 5407 - DNA, 1813 bp, Homo sapiens
gcactgcacctgtggggaaaggcaggagaagaaggagctgaggacttcaccccaccatctgcagaatacccaacaggctgttcagttctcagctaccaagggggcaccctttcctctcccagttggtgatgatttgttaacgtattgtggaagatcaagggctggactcaggcactcctgtcctgagatagctagcggccaggagaaatacagtggaaaatgcaaaacaacgaaattataaagcctgccaaatacttctcagaattggaaaagagcatcctgctggctttagtagaaaagtataaatatgtgctggaatgtaagaaaagtgatgcgcgaactattgcccttaagcagcgtacctggcaggcgctggcccacgaatacaactctcagcccagcgtgtccctgcgggatttcaaacagctgaagaagtgctgggagaacatcaaggctcggaccaaaaaaattatggcccatgaaaggagagagaaagtgaaacggagcgtcagccctctcctgagtacccacgtcctagggaaggagaagatcgccagcatgctgccggagcagctctacttcctgcagagccccccggaggaggagcccgaataccaccccgacgcctcagcccaagaatcatttgctgtttcaaatagagaactgtgcgatgatgagaaagagttcatacattttccagtatgtgaggggacctctcaacctgaaccctcgtgttcagctgtcagaataacagccaataaaaactacaggagcaaaacctctcaggaaggtgctttaaaaaagatgcatgaggaagaacaccatcaacaaatgtccatcttacaactgcaactgatacaaatgaatgaggtgcatgtggccaaaatccagcagatagagcgagagtgtgagatggcagaggaggaacacaggataaaaatggaagttctcaataaaaagaagatgtattgggaaagaaaactacaaacttttaccaaggaatggcctgtttcctcatttaaccggccctttcccaattcgccctaagactttgggggtggctctcttgtaattaatctgtgttggcaaagaatgtctggaacatggacttggcggtcagtaacctgtaacagagctacaactaggaaaattagagtggtagtagtcacttatttaagaattcattcaggtaaacagctgcaccctctgtaccccttaagtggcaaagaagctgttatagtcttctgaaaattatcactatgagtgctataattctgaatataatgtctcttaattagaattcatacaagaaccacgtgtgagtgttgttgttgttgtttttttttttaatcaaatgcaagtgtgactataaaggagtgtggctgatttttttttttttcttttttctttttaaacagacagcagaacttttctatccaaatgaatgccgtcccatggaaagtggctgtcctgggaggctacacgtttctccaatggtgatgctgttgctcagaacttgctagaggtctttagggaacctccgtgagagctgcagcacctttttaattttctcggtgtcatcctctgagtatggattttctgtttttaaacagcccaaagtttagaagggtattttctaatgtggctcataaaccaccttttaaggcctttcctcaaacaggagttctaaataagtctccaacaatagtagttttgttggagctaaggatgtaactactttgaggaagaaatgttcgtttagatttctacattctgttatgttggttttattaaaaaaaaaaaaaagacttgc

SEQ ID NO: 5408 - protein, 275 aa, Homo sapiens; identical to SEQ ID NO: 704

SEQ ID NO: 5409 - DNA, 231 bp, Homo sapiens
aggtcccatctggagggtggtggagaaccttggtgctttgtcatttgggaagtgtgtccaaagttttctttcaagaaagaaaaagaagcctggaattgtcaatcatcctttctgggacttggtaggaaaaaggtggaaaatctgctatagagttatggccctcattacatcttgtgtatttgacataaggaatgtgtgtgtgtgatctttctatttctaacactgtgctgt

SEQ ID NO: 5410 - protein, 49 aa, Homo sapiens
RSHLEGGGEPWCFVIWEVCPKFSFKKEKEAWNCQSSFLGLGRKKVENLL

SEQ ID NO: 5411 - DNA, 2606 bp, Homo sapiens
ccgtcacgcgcccctcaccgggcgggccggggtctttgtgacgcggtggcaacggccacggacacaaagggaaggcgaggaggcgagcaagaggctgggcctgcctccggcccgcgacccccgcccgccgcgcgcgcgcccgcccgctcccctcgccgcggtgtcccccacgccggctcgcaccctcgcgcgcacccttgcgcgcccgcgaccctcgcacgcgcccggacccgccgactccgtcccgagcgccgcgggcccgggcctggcggacgctgcgggtggggcggggatgctgacgggctgctccccggctcagcggcgcggctgctaggaggcaccgaggcagcggcggggctctgggcgcgcggctggatgcccccggcctgcggctccctgcgcttcccgccgtccaggggcaccagtcatgggcgccgcagccgctgaggcgccgctccggctgcctgccgcgcctccgctcgccttctgctgctacacgtcggtgcttctgctcttcgccttctctctgcccgggagccgcgcgtccaaccagcccccgggtggtggcggcggcagcggcggggactgtcccggcggcaaaggcaagagcatcaactgctcagaattaaatgtgagggagtctgacgtaagagtttgtgatgagtcatcatgtaaatatggaggagtctgtaaagaagatggagatggtttgaaatgtgcatgccaatttcagtgccatacaaattatattcctgtctgtggatcaaatggggacacttatcaaaatgaatgctttctcagaagggctgcttgtaagcaccagaaagagataacagtaatagcaagaggaccatgctactctgataatggatctggatctggagaaggagaagaggaagggtcaggggcagaagttcacagaaaacactccaagtgtggaccctgcaaatataaagctgagtgtgatgaagatgcagaaaatgttgggtgtgtatgtaatatagattgcagtggatacagttttaatcctgtgtgtgcttctgatgggagttcctataacaatccctgttttgttcgagaagcatcttgtataaagcaagaacaaattgatataaggcatcttggtcattgcacagatacagatgacactagtttgttgggaaagaaagatgatggactacaatatcgaccagatgtgaaagatgctagtgatcaaagagaagatgtttatattggaaaccacatgccttgccctgaaaacctcaatggttactgcatccatggaaaatgtgaattcatctattctactcagaaggcttcttgtagatgtgaatctggctacactggacagcactgtgaaaagacagactttagtattctctatgtagtgccaagtaggcaaaagctcactcatgttcttattgcagcaattattggagctgtacagattgccatcatagtagcaattgtaatgtgcataacaagaaaatgccccaaaaacaatagaggacgtcgacagaagcaaaacctaggtcattttacttcagatacgtcatccagaatggtttaaactgatgacttttatatgtacactgaccatgtgatgtacatttattatgtctttttttaaagaatggaaatatttatttcagaggccttatttttggacatttttagtgtagtactgttggctcgtatttagaatattcagctacgacagttttggactgtttagtagtctttgttttatgtttttaaatacagaaattgctttcacaaatttgtaccacatggtaattctaagacttgttctttacccatggaatgtaatatttttgcaaagatggactacttcacaaatggttataaagtcatatccacttcttccacaatgaccacagcaaatgaccaagcatgaactaaaggtaaagatgtttacagattacttttcttacaaaaaaaatctagaagacactgtgtttaaatagatatttaaatgtttttgagatttagtaactgattttttagacactgcctatcgcatgaactgtaaagctgtgtgtattaggtgtaaaatatttataagatatatggactggggaatttgattattcctccctttgaaaaaatagtcctaataatttgaacaaatatgttagtaatgatggaacagatcaatgaaaagtagatatagatattgtgaaaataggctgtttaacaaacagattggaataaagcctattctaccagttaaactactttaatacacattcatttttaaagaaaatgtttgttttaacataaataaacaaatcgtatcagtgtttgtgaataaaatacaaaaatgattgttaatgattggtgctcttaaagtgagcttaaaatttatccaagacgtatatccaaatttgtcctgtagtaatagattaatattcatagattgttggtgtttaaagatctgaagtgtgagtagaatgtattcagctgtttaacatgtagtttagatattcaaaagtatgcatgtagaatttaaagaatatgttaaaaattattaattttaatattttgtttggaaaagcatgttataatataatgttttcactata

SEQ ID NO: 5412 - protein, 380 aa, Homo sapiens; identical to SEQ ID NO: 706

SEQ ID NO: 5413 - DNA, 3238 bp, Homo sapiens
aacagtccccggtgctttgcaagggttcagattgcagaacagtcacatatgggtatttgtagttataaatacttgaccgttctctaggggtggggtttccaactctttaaacaaccctgttgcctgttatcaagctgactttttgctccaagtgccagaattgattgtggttaggacatcttacgctgagaaataaataaaatggaacataatgggtctgcttcaaatgctgataaaatccaccagaatcgcctgtcgagtgttacagaagatgaagaccaagacgctgctcttaccattgtgactgtgctggacaaagtagcctccatcgtggacagtgtgcaggcaagccagaagagaatagaagagagacacagggaaatggaaaatgccataaaatccgtccagattgacctgttgaagctttcacagtcgcatagcaatacagggcatatcattaacaaattgtttgagaaaacccgaaaagttagtgctcacattaaagatgtgaaagcccgggtggagaagcaacaaattcatgttaaaaaagttgaagtcaagcaagaggaaataatgaagaaaaacaaattccgcgtggtaatattccaggagaagtttcggtgtccgacatccctgtctgttgttaaagacagaaacctaactgagaaccaagaagaggatgatgatgatatctttgatcccccagtagatctgtcttcggatgaagaatattatgttgaagaaagcagatctgccaggcttaggaagtcaggcaaggagcacattgataatatcaagaaggcattttccaaagaaaacatgcagaagacacggcagaatcttgacaagaaagtgaacagaattagaactagaatagtgaccccggagaggagagagaggctaaggcagtcaggagagaggctgagacagtcaggggagaggctgagacagtcaggggagaggtttaagaaatctatttctaatgcagctccctcaaaggaagcttttaagatgcgcagcctcaggaaaggtaaggaccgaacagtggctgaaggtgaggaatgtgccagggagatgggtgtggacatcattgccaggagcgagtctctgggccccatcagtgagctctactctgatgagctcagtgaaccagaacacgaggcagccaggccggtgtatcctccccatgaaggaagggaaatccccacccccgagcctttaaaagttacttttaaatctcaggtgaaagtagaggatgatgaatctcttttgttagatttaaagcactcatcgtaaagaggaattaagtatatcctaaatatgaatctcctaatcatgcagttttagtttgaatagtgtagtcgtctacatttctgtgccatgtaggaaaacataaatgtattttttttcttatatttaaaatcttgaagataatataaatattattatcactctttctcatggcagctgtggattttttagttcctttctcttgtccaccagaaaaatagtttcctaggttgggccagttacgtgtttggtaagggcaactttgcggccgtcatttgcaggagaactctaaatattggttaggattaatattgtggccagcctcaaaggggaataactcatgtgtgggttatatcgtccagatgttcagatcaacagatttgttagtaaattagcagtcacaccccttttttgatgctttcacattaaaaaattgaagttttggacttgagcatttggctctagtatcatagctttacttataagaaaaccctgggcaagtcatctgcttattctcatcagtaaaaatggagagggttggcctctgctgcctgcctcagaggactgttgtgatgatcaaaggaaatggtacacattctgggggaacaagaagcacacccagagaaaacaagcctcatcagttcctccaaaacagaatggaaagagttacaccttctgaaaaagccctcagcaccaatcaataaggtcctaggttggagagaaactaaagctggtcttcagaagccttttcacagaatcaagagtgaaaaataagtaaatgtttgggtgaccactttttcatcagactaactatatcttgggttttagttgggtctcaaaatgttccccagccagaccctttctaatttccttttgattaagatctttggtggactatagcactaaatttgtttaagcagtatgaggcataaaattgtgactatgtttctaaagtcggccctgatgcattgggtttggaaatgaccacaaatattcctgttttcctgagtgtacccttcagggtccagctgtccaaaacagtgttgataggagttcatcatagctgctttgggaggaagccagattctccttatcttttagctttagatcgtggaatccaggaagtagaacaatgtctattgttgctaaagaaagaaagaaatgggccgggtgtggtggctcacggggagtaatcccagcactttgcgaggccgaggtgggtgaatcacctgaggtcagaagttcacgaccagcctgaccaacatggcgaaaccctgactctactgaaaatacaaaaattagctgggcatggtggcatgcgcctgtcccagctactcaggaggctgagacaggagaattgcctgaacccaggaggcggaggttgcagtgagccgagattgtgccactgcactcaagcctgggcaaaagagccagactctgtttcaaaaaaaaagaaaaaaagaaaagaaagaaatggtagtactgattctgtacttgaaggatgtttaatgtagcatggtgttgtaatagagaagaaatgatgaaattgttgaatttgaagagttgggacaacgatcagctatcccactttttttctcactttcagatcagtttttggataatcatatggtagttaaaataataagtgtacacatatacacacaggcatacataaatcggctttaaaatatttgactcagttactcagatgtttgggtttgggagtctgattcagcatcatttcctcttcaccttgcatgaatacatgaaatcataatatcgttcatgttgttacctttttatattgaaaactaaagtgtatacaacattggataacactttcaaatgaataattttaaaatgtttttatgacattttggaaagatcttgggtgcctaatcacatattttcttaagaaccataataaatttgaatttaagaaaatgtt

SEQ ID NO: 5414 - protein, 364 aa, Homo sapiens; identical to SEQ ID NO: 708

SEQ ID NO: 5415 - DNA, 5536 bp, Homo sapiens
attcagaccctgctctttccttccattctcctccttggcccagtacccttgtgcaggttacaatttgcctgtcatatgtggctgcctgattttagatagaagatgtatctcctctgtttcggtgatatctgttgtatgtagacctcttgtttcccaccagtatctgaatggtattatatgatagagcagaagagaaatgtatttgaattaaaaccctagagacaaatatgaataagatgaggcaattaagatgttttcaacatttggtgaagtcttaaaaaagacctactggagcatagaatatttgctgaagttgtataatggaaggagaaatagattttgatttttaggacattatacctggaatggtttagataacttattatttttaaagtcatccaaatgcaatgtaaatatgtaaggttttgtgggcaaatggagcctctgtgtaaaacaggaaaaggcactctttcctctgggcaagtacagtcccacagtgggatgaaccgctcgccgagagacaagggacacatgggatttaaaacttccttggataaagatattcattaattcgttcattcattcattcatgtttgctggaaaaaaaactcttctggattttatctattctttagttaggtgagctttcgatattgtaacactctgagtttgctttaagaccctcaggcagtttgattgcatctacacaagataaacccaaccagcaggatattgtgttttttgagaaaaatggactccttcatggacactttacacttcccttccttaaagatgaggttaaggtaaatgacttgctctggaatgcagattcctctgtgcttgcagtctggctggaagaccttcagagagaagaaagctccattccgaaaacctgtgttcagctctggactgttggaaactatcactggtatctcaagcaaagtttatccttcagcacctgtgggaagagcaagattgtgtctctgatgtgggaccctgtgaccccataccggctgcatgttctctgtcagggctggcattacctcgcctatgattggcactggacgactgaccggagcgtgggagataattcaagtgacttgtccaatgtggctgtcattgatggaaacagggtgttggtgacagtcttccggcagactgtggttccgcctcccatgtgcacctaccaactgctgttcccacaccctgtgaatcaagtcacattcttagcacaccctcaaaagagtaatgaccttgctgttctagatgccagtaaccagatttctgtttataaatgtggtgattgtccaagtgctgaccctacagtgaaactgggagctgtgggtggaagtggatttaaagtttgccttagaactcctcatttggaaaagagatacaaaatccagtttgagaataatgaagatcaagatgtaaacccgctgaaactaggccttctcacttggattgaagaagacgtcttcctggctgtaagccacagtgagttcagcccccggtctgtcattcaccatttgactgcagcttcttctgagatggatgaagagcatggacagctcaatgtcagttcatctgcagcggtggatggggtcataatcagtctatgttgcaattccaagaccaagtcagtagtattacagctggctgatggccagatatttaagtacctttgggagtcaccttctctggctattaaaccatggaagaactctggtggatttcctgttcggtttccttatccatgcacccagaccgaattggccatgattggagaagaggaatgtgtccttggtctgactgacaggtgtcgctttttcatcaatgacattgaggttgcgtcaaatatcacgtcatttgcagtatatgatgagtttttattgttgacaacccattcccatacctgccagtgtttttgcctgagggatgcttcatttaaaacattacaggccggcctgagcagcaatcatgtgtcccatggggaagttctgcggaaagtggagaggggttcacggattgtcactgttgtgccccaggacacaaagcttgtattacagatgccaaggggaaacttagaagttgttcatcatcgagccctggttttagctcagattcggaagtggttggacaaacttatgtttaaagaggcatttgaatgcatgagaaagctgagaatcaatctcaatctgatttatgatcataaccctaaggtgtttcttggaaatgtggaaaccttcattaaacagatagattctgtgaatcatattaacttgttttttacagaattgaaagaagaagatgtcacgaagaccatgtaccctgcaccagttaccagcagtgtctacctgtccagggatcctgacgggaataaaatagaccttgtctgcgatgctatgagagcagtcatggagagcataaatcctcataaatactgcctatccatacttacatctcatgtaaagaagacaaccccagaactggaaattgtactgcaaaaagtacacgagcttcaaggaaatgctccctctgatcctgatgctgtgagtgctgaagaggccttgaaatatttgctgcatctggtagatgttaatgaattatatgatcattctcttggcacctatgactttgatttggtcctcatggtagctgagaagtcacagaaggatcccaaagaatatcttccatttcttaatacacttaagaaaatggaaactaattatcagcggtttactatagacaaatacttgaaacgatatgaaaaagccattggccacctcagcaaatgtggacctgagtacttcccagaatgcttaaacttgataaaagataaaaacttgtataacgaagctctgaagttatattcaccaagctcacaacagtaccaggatatcagcattgcttatggggagcacctgatgcaggagcacatgtatgagccagcggggctcatgtttgcccgttgcggtgcccacgagaaagctctctcagcctttctgacatgtggcaactggaagcaagccctctgtgtggcagcccagcttaactttaccaaagaccagctggtgggcctcggcagaactctggcaggaaagctggttgagcagaggaagcacattgatgcggccatggttttggaagagtgtgcccaggattatgaagaagctgtgctcttgctgttagaaggagctgcctgggaagaagctttgaggctggtatacaaatataacagactggatattatagaaaccaacgtaaagccttccattttagaagcccagaaaaattatatggcatttctggactctcagacagccacattcagtcgccacaagaaacgtttattggtagttcgagagctcaaggagcaagcccagcaggcaggtctggatgatgaggtaccccacgggcaagagtcagacctcttctctgaaactagcagtgtcgtgagtggcagtgagatgagtggcaaatactcccatagtaactccaggatatcagcgagatcatccaagaatcgccgaaaagcggagcggaagaagcacagcctcaaagaaggcagtccgctggaggacctggccctcctggaggcactgagtgaagtggtgcagaacactgaaaacctgaaagatgaagtataccatattttaaaggtactctttctctttgagtttgatgaacaaggaagggaattacagaaggcctttgaagatacgctgcagttgatggaaaggtcacttccagaaatttggactcttacttaccagcagaattcagctaccccggttctaggtcccaattctactgcaaatagtatcatggcatcttatcagcaacagaagacttcggttcctgttcttgatgctgagctttttataccaccaaagatcaacagaagaacccagtggaagctgagcctgctagactgagtgactgcagttaggagggatccgacagagaagaccatttccactcattcctgttgtcctaccaccccttgctctttgagggctggctattgagaactggaaagagtaaaatgataacttaccttagcattgccaagaacttcagcagacaacaagcaattctatttattttatgttgtgtatacatcttgatcattagcaagacattaagctttaaccattatggcaccattttgtgagaatgattgttctttcacttgggctgtttgagagcataattatggtaatcatgagattaatgtttcatgatttctacctccaaagtgtgaagacaagtaaaacaatgtttctaaattgtcttattttgttggcggagaagattacaatggctattagtgctacatttggtcaaatgtaatcacttaaatagcttcttgtcaccttaaactaaagcagaataaaaagtatcctttgaaattataagccctcctttgctgacagctattattttgtaacatcttaccaggtcatgtgctttcagttataactgggctgagcctcctataattacaatgtctatagggactgttttactgcctgtgtattttctgctagagagttagcaatgttagagctagaacagattagaatttctaaacagtatcatgcacagttggtgtgagtgatcagtgtgcattgtatggcatgcatggttgtgaattattctctgttctccaaatactgtttctttaactcagatatttttgttagtgtctaggccacttcatttatttttcgtcatggtactttactgacttctctttattcaattctccacgccctcaccaaaaaaaactgtctcaaaatgagaatattttattttcatggtgagtctagaaaacgcccacttcattctgattaaaaattcttccatgttttaaatatcagaaccagacctttcttactgtgtatcttagcccatttgtgtctctataacaacaaccagctttcaaaggaactaatagagtgaaaactcactcattaccacgaggatggcacaagcgattcacgtaggatctgcccctgtgaccaaaacacctcccattgggccccacttccaacactggtgatcacatttcaacatgaggtttagggaaacaaatgcctaaactacagcactgtacataaactaacaggaaatgctgcttttgatcctcaaagaagtgatatagccaaaattgtaatttaagaagcctttcccagtatagcaagatgttaactatagaatcaatctaggagtattcactgtaaaattcaacttttctgtatgtttgaacattttcacaatctcataggagtttttaaaaagaagagaaagaagatatactttgctttggagaaatctactttttgacttacatgggtttgctgtaattaagtgcccaatattgaaaggctgcaagtactttgtaatcactctttggcatgggtaaataagcatggtaacttatattgaaatatagtgctcttgctttggataactgtaaagggacccatgctgatagactggaaatagaagtaaatgtgtttattgataa

SEQ ID NO: 5416 - protein, 983 aa, Homo sapiens
MWDPVTPYRLHVLCQGWHYLAYDWHWTTDRSVGDNSSDLSNVAVIDGNRVLVTVFRQTVVPPPMCTYQLLFPHPVNQVTFLAHPQKSNDLAVLDASNQISVYKCGDCPSADPTVKLGAVGGSGFKVCLRTPHLEKRYKIQFENNEDQDVNPLKLGLLTWIEEDVFLAVSHSEFSPRSVIHHLTAASSEMDEEHGQLNVSSSAAVDGVIISLCCNSKTKSVVLQLADGQIFKYLWESPSLAIKPWKNSGGFPVRFPYPCTQTELAMIGEEECVLGLTDRCRFFINDIEVASNITSFAVYDEFLLLTTHSHTCQCFCLRDASFKTLQAGLSSNHVSHGEVLRKVERGSRIVTVVPQDTKLVLQMPRGNLEVVHHRALVLAQIRKWLDKLMFKEAFECMRKLRINLNLIYDHNPKVFLGNVETFIKQIDSVNHINLFFTELKEEDVTKTMYPAPVTSSVYLSRDPDGNKIDLVCDAMRAVMESINPHKYCLSILTSHVKKTTPELEIVLQKVHELQGNAPSDPDAVSAEEALKYLLHLVDVNELYDHSLGTYDFDLVLMVAEKSQKDPKEYLPFLNTLKKMETNYQRFTIDKYLKRYEKAIGHLSKCGPEYFPECLNLIKDKNLYNEALKLYSPSSQQYQDISIAYGEHLMQEHMYEPAGLMFARCGAHEKALSAFLTCGNWKQALCVAAQLNFTKDQLVGLGRTLAGKLVEQRKHIDAAMVLEECAQDYEEAVLLLLEGAAWEEALRLVYKYNRLDIIETNVKPSILEAQKNYMAFLDSQTATFSRHKKRLLVVRELKEQAQQAGLDDEVPHGQESDLFSETSSVVSGSEMSGKYSHSNSRISARSSKNRRKAERKKHSLKEGSPLEDLALLEALSEVVQNTENLKDEVYHILKVLFLFEFDEQGRELQKAFEDTLQLMERSLPEIWTLTYQQNSATPVLGPNSTANSIMASYQQQKTSVPVLDAELFIPPKINRRTQWKLSLLD

SEQ ID NO: 5417 - DNA, 1372 bp, Homo sapiens
ccgactctgggtgcggactgtgggagctgactctgggtagccggctgcgcgtggctggggaggcgaggccggacgcacctctgtttgggggtcctcagtgtgaagacaagtaaaacaatgtttctaaattgtcttattttgttggcggagaagattacaatggctattagtgctacatttggtcaaatgtaatcacttaaatagcttcttgtcaccttaaactaaagcagaataaaaagtatcctttgaaattataagccctcctttgctgacagctattattttgtaacatcttaccaggtcatgtgctttcagttataactgggctgagcctcctataattacaatgtctatagggactgttttactgcctgtgtattttctgctagagagttagcaatgttagagctagaacagattagaatttctaaacagtatcatgcacagttggtgtgagtgatcagtgtgcattgtatggcatgcatggttgtgaattattctctgttctccaaatactgtttctttaactcagatatttttgttagtgtctaggccacttcatttatttttcgtcatggtactttactgacttctctttattcaattctccacgccctcaccaaaaaaaactgtctcaaaatgagaatattttattttcatggtgagtctagaaaacgcccacttcattctgattaaaaattcttccatgttttaaatatcagaaccagacctttcttactgtgtatcttagcccatttgtgtctctataacaacaaccagctttcaaaggaactaatagagtgaaaactcactcattaccacgaggatggcacaagcgattcacgtaggatctgcccctgtgaccaaaacacctcccattgggccccacttccaacactggtgatcacatttcaacatgaggtttagggaaacaaatgcctaaactacagcactgtacataaactaacaggaaatgctgcttttgatcctcaaagaagtgatatagccaaaattgtaatttaagaagcctttcccagtatagcaagatgttaactatagaatcaatctaggagtattcactgtaaaattcaacttttctgtatgtttgaacattttcacaatctcataggagtttttaaaaagaagagaaagaagatatactttgctttggagaaatctactttttgacttacatgggtttgctgtaattaagtgcccaatattgaaaggctgcaagtactttgtaatcactctttggcatgggtaaataagcatggtaacttatattgaaatatagtgctcttgctttggataactgtaaagggacccatgctgatagactggaaatagaagtaaatgtgtttattgataa

SEQ ID NO: 5418 - protein, 36 aa, Homo sapiens [sequence omitted]

SEQ ID NO: 5419 - DNA, 6187 bp, Homo sapiens
gcgcgtgtcgtgcgcacgcgcgctgctctcaggtccgcaggttccacccccccccccgccccccccaattacagtgctttggggttcgacatcaaaacagagatcaaatacaaaagtttgggcagatgggcaagagggcagagggacaggggacgcggccaatgtagctcctctacctctacggtgccaggcctacaaagaaggccggccgccgtaagtgaccagaagcgggcccggcctcgccccctccgcctggtgacgtcactcccgcgccgcactcccagtgctgcggctgcctagttgacgcacccattgagtcgctggcttctttgcagcgcttcagcgttttcccctggagggcgcctccatccttggaggcctagtgccgtcggagagagagcgggagccgcggacagagacgcgtgcgcaattcggagccgactctgggtgcggactgtgggagctgactctgggtagccggctgcgcgtggctggggaggcgaggccggacgcacctctgtttgggggtcctcagagattaatgattcatcaagggatagttgtacttgtctcgtgggaatcacttcatcatgcgaaatctgaaattatttcggaccctggagttcagggatattcaaggtccagggaatcctcagtgcttctctctccgaactgaacaggggacggtgctcattggttcagaacatggcctgatagaagtagaccctgtctcaagagaagtgaaaaatgaagtttctttggtggcagaaggctttctcccagaggatggaagtggccgcattgttggtgttcaggacttgctggatcaggagtctgtgtgtgtggccacagcctctggagacgtcatactctgcagtctcagcacacaacagctggagtgtgttgggagtgtagccagtggtatctctgttatgagttggagtcctgaccaagagctggtgcttcttgccacaggtcaacagaccctgattatgatgacaaaagattttgagccaatcctggagcagcagatccatcaggatgattttggtgaaagcaagtttatcactgttggatggggtaggaaggagacacagttccatggatcagaaggcagacaagcagcttttcagatgcaaatgcatgagtctgctttgccctgggatgaccatagaccacaagttacctggcggggggatggacagttttttgctgtgagtgttgtttgcccagaaacaggggctcggaaggtcagagtgtggaaccgagagtttgctttgcagtcaaccagtgagcctgtggcaggactgggaccagccctggcttggaaaccctcaggcagtttgattgcatctacacaagataaacccaaccagcaggatattgtgttttttgagaaaaatggactccttcatggacactttacacttcccttccttaaagatgaggttaaggtaaatgacttgctctggaatgcagattcctctgtgcttgcagtctggctggaagaccttcagagagaagaaagctccattccgaaaacctgtgttcagctctggactgttggaaactatcactggtatctcaagcaaagtttatccttcagcacctgtgggaagagcaagattgtgtctctgatgtgggaccctgtgaccccataccggctgcatgttctctgtcagggctggcattacctcgcctatgattggcactggacgactgaccggagcgtgggagataattcaagtgacttgtccaatgtggctgtcattgatggaaacagggtgttggtgacagtcttccggcagactgtggttccgcctcccatgtgcacctaccaactgctgttcccacaccctgtgaatcaagtcacattcttagcacaccctcaaaagagtaatgaccttgctgttctagatgccagtaaccagatttctgtttataaatgtggtgattgtccaagtgctgaccctacagtgaaactgggagctgtgggtggaagtggatttaaagtttgccttagaactcctcatttggaaaagagatacaaaatccagtttgagaataatgaagatcaagatgtaaacccgctgaaactaggccttctcacttggattgaagaagacgtcttcctggctgtaagccacagtgagttcagcccccggtctgtcattcaccatttgactgcagcttcttctgagatggatgaagagcatggacagctcaatgtcagttcatctgcagcggtggatggggtcataatcagtctatgttgcaattccaagaccaagtcagtagtattacagctggctgatggccagatatttaagtacctttgggagtcaccttctctggctattaaaccatggaagaactctggtggatttcctgttcggtttccttatccatgcacccagaccgaattggccatgattggagaagaggaatgtgtccttggtctgactgacaggtgtcgctttttcatcaatgacattgaggttgcgtcaaatatcacgtcatttgcagtatatgatgagtttttattgttgacaacccattcccatacctgccagtgtttttgcctgagggatgcttcatttaaaacattacaggccggcctgagcagcaatcatgtgtcccatggggaagttctgcggaaagtggagaggggttcacggattgtcactgttgtgccccaggacacaaagcttgtattacagatgccaaggggaaacttagaagttgttcatcatcgagccctggttttagctcagattcggaagtggttggacaaacttatgtttaaagaggcatttgaatgcatgagaaagctgagaatcaatctcaatctgatttatgatcataaccctaaggtgtttcttggaaatgtggaaaccttcattaaacagatagattctgtgaatcatattaacttgttttttacagaattgaaagaagaagatgtcacgaagaccatgtaccctgcaccagttaccagcagtgtctacctgtccagggatcctgacgggaataaaatagaccttgtctgcgatgctatgagagcagtcatggagagcataaatcctcataaatactgcctatccatacttacatctcatgtaaagaagacaaccccagaactggaaattgtactgcaaaaagtacacgagcttcaaggaaatgctccctctgatcctgatgctgtgagtgctgaagaggccttgaaatatttgctgcatctggtagatgttaatgaattatatgatcattctcttggcacctatgactttgatttggtcctcatggtagctgagaagtcacagaaggatcccaaagaatatcttccatttcttaatacacttaagaaaatggaaactaattatcagcggtttactatagacaaatacttgaaacgatatgaaaaagccattggccacctcagcaaatgtggacctgagtacttcccagaatgcttaaacttgataaaagataaaaacttgtataacgaagctctgaagttatattcaccaagctcacaacagtaccaggatatcagcattgcttatggggagcacctgatgcaggagcacatgtatgagccagcggggctcatgtttgcccgttgcggtgcccacgagaaagctctctcagcctttctgacatgtggcaactggaagcaagccctctgtgtggcagcccagcttaactttaccaaagaccagctggtgggcctcggcagaactctggcaggaaagctggttgagcagaggaagcacattgatgcggccatggttttggaagagtgtgcccaggattatgaagaagctgtgctcttgctgttagaaggagctgcctgggaagaagctttgaggctggtatacaaatataacagactggatattatagaaaccaacgtaaagccttccattttagaagcccagaaaaattatatggcatttctggactctcagacagccacattcagtcgccacaagaaacgtttattggtagttcgagagctcaaggagcaagcccagcaggcaggtctggatgatgaggtaccccacgggcaagagtcagacctcttctctgaaactagcagtgtcgtgagtggcagtgagatgagtggcaaatactcccatagtaactccaggatatcagcgagatcatccaagaatcgccgaaaagcggagcggaagaagcacagcctcaaagaaggcagtccgctggaggacctggccctcctggaggcactgagtgaagtggtgcagaacactgaaaacctgaaagatgaagtataccatattttaaaggtactctttctctttgagtttgatgaacaaggaagggaattacagaaggcctttgaagatacgctgcagttgatggaaaggtcacttccagaaatttggactcttacttaccagcagaattcagctaccccggttctaggtcccaattctactgcaaatagtatcatggcatcttatcagcaacagaagacttcggttcctgttcttgatgctgagctttttataccaccaaagatcaacagaagaacccagtggaagctgagcctgctagactgagtgactgcagttaggagggatccgacagagaagaccatttccactcattcctgttgtcctaccaccccttgctctttgagggctggctattgagaactggaaagagtaaaatgataacttaccttagcattgccaagaacttcagcagacaacaagcaattctatttattttatgttgtgtatacatcttgatcattagcaagacattaagctttaaccattatggcaccattttgtgagaatgattgttctttcacttgggctgtttgagagcataattatggtaatcatgagattaatgtttcatgatttctacctccaaagtgtgaagacaagtaaaacaatgtttctaaattgtcttattttgttggcggagaagattacaatggctattagtgctacatttggtcaaatgtaatcacttaaatagcttcttgtcaccttaaactaaagcagaataaaaagtatcctttgaaattataagccctcctttgctgacagctattattttgtaacatcttaccaggtcatgtgctttcagttataactgggctgagcctcctataattacaatgtctatagggactgttttactgcctgtgtattttctgctagagagttagcaatgttagagctagaacagattagaatttctaaacagtatcatgcacagttggtgtgagtgatcagtgtgcattgtatggcatgcatggttgtgaattattctctgttctccaaatactgtttctttaactcagatatttttgttagtgtctaggccacttcatttatttttcgtcatggtactttactgacttctctttattcaattctccacgccctcaccaaaaaaaactgtctcaaaatgagaatattttattttcatggtgagtctagaaaacgcccacttcattctgattaaaaattcttccatgttttaaatatcagaaccagacctttcttactgtgtatcttagcccatttgtgtctctataacaacaaccagctttcaaaggaactaatagagtgaaaactcactcattaccacgaggatggcacaagcgattcacgtaggatctgcccctgtgaccaaaacacctcccattgggccccacttccaacactggtgatcacatttcaacatgaggtttagggaaacaaatgcctaaactacagcactgtacataaactaacaggaaatgctgcttttgatcctcaaagaagtgatatagccaaaattgtaatttaagaagcctttcccagtatagcaagatgttaactatagaatcaatctaggagtattcactgtaaaattcaacttttctgtatgtttgaacattttcacaatctcataggagtttttaaaaagaagagaaagaagatatactttgctttggagaaatctactttttgacttacatgggtttgctgtaattaagtgcccaatattgaaaggctgcaagtactttgtaatcactctttggcatgggtaaataagcatggtaacttatattgaaatatagtgctcttgctttggataactgtaaagggacccatgctgatagactggaaatagaagtaaatgtgtttattgataa

SEQ ID NO: 5420 - protein, 1332 aa, Homo sapiens; identical to SEQ ID NO: 710

SEQ ID NO: 5421 - DNA, 4886 bp, Homo sapiens
attcagaccctgctctttccttccattctcctccttggcccagtacccttgtgcaggttacaatttgcctgtcatatgtggctgcctgattttagatagaagatgtatctcctctgtttcggtgatatctgttgtatgtagacctcttgtttcccaccagtatctgaatggtattatatgatagagcagaagagaaatgtatttgaattaaaaccctagagacaaatatgaataagatgaggcaattaagatgttttcaacatttggtgaagtcttaaaaaagacctactggagcatagaatatttgctgaagttgtataatggaaggagaaatagattttgatttttaggacattatacctggaatggtttagataacttattatttttaaagtcatccaaatgcaatgtaaatatgtaaggttttgtgggcaaatggagcctctgtgtaaaacaggaaaaggcactctttcctctgggcaagtacagtcccacagtgggatgaaccgctcgccgagagacaagggacacatgggatttaaaacttccttggataaagatattcattaattcgttcattcattcattcatgtttgctggaaaaaaaactcttctggattttatctattctttagttaggtgagctttcgatattgtaacactctgagtttgctttaagaccctcaggcagtttgattgcatctacacaagataaacccaaccagcaggatattgtgttttttgagaaaaatggactccttcatggacactttacacttcccttccttaaagatgaggttaaggtaaatgacttgctctggaatgcagattcctctgtgcttgcagtctggctggaagaccttcagagagaagaaagctccattccgaaaacctgtgttcagctctggactgttggaaactatcactggtatctcaagcaaagtttatccttcagcacctgtgggaagagcaagattgtgtctctgatgtgggaccctgtgaccccataccggctgcatgttctctgtcagggctggcattacctcgcctatgattggcactggacgactgaccggagcgtgggagataattcaagtgacttgtccaatgtggctgtcattgatggaaacagggtgttggtgacagtcttccggcagactgtggttccgcctcccatgtgcacctaccaactgctgttcccacaccctgtgaatcaagtcacattcttagcacaccctcaaaagagtaatgaccttgctgttctagatgccagtaaccagatttctgtttataaatgtggtgattgtccaagtgctgaccctacagtgaaactgggagctgtgggtggaagtggatttaaagtttgccttagaactcctcatttggaaaagagatacaaaatccagtttgagaataatgaagatcaagatgtaaacccgctgaaactaggccttctcacttggattgaagaagacgtcttcctggctgtaagccacagtgagttcagcccccggtctgtcattcaccatttgactgcagcttcttctgagatggatgaagagcatggacagctcaatgtcagttcatctgcagcggtggatggggtcataatcagtctatgttgcaattccaagaccaagtcagtagtattacagctggctgatggccagatatttaagtacctttgggagtcaccttctctggctattaaaccatggaagaactctggtggatttcctgttcggtttccttatccatgcacccagaccgaattggccatgattggagaagaggaatgtgtccttggtctgactgacaggtgtcgctttttcatcaatgacattgaggttgcgtcaaatatcacgtcatttgcagtatatgatgagtttttattgttgacaacccattcccatacctgccagtgtttttgcctgagggatgcttcatttaaaacattacaggccggcctgagcagcaatcatgtgtcccatggggaagttctgcggaaagtggagaggggttcacggattgtcactgttgtgccccaggacacaaagcttgtattacagatgccaaggggaaacttagaagttgttcatcatcgagccctggttttagctcagattcggaagtggttggacaaacttatgtttaaagaggcatttgaatgcatgagaaagctgagaatcaatctcaatctgatttatgatcataaccctaaggtgtttcttggaaatgtggaaaccttcattaaacagatagattctgtgaatcatattaacttgttttttacagaattgaaagaagaagatgtcacgaagaccatgtaccctgcaccagttaccagcagtgtctacctgtccagggatcctgacgggaataaaatagaccttgtctgcgatgctatgagagcagtcatggagagcataaatcctcataaatactgcctatccatacttacatctcatgtaaagaagacaaccccagaactggaaattgtactgcaaaaagtacacgagcttcaaggaaatgctccctctgatcctgatgctgtgagtgctgaagaggccttgaaatatttgctgcatctggtagatgttaatgaattatatgatcattctcttggcacctatgactttgatttggtcctcatggtagctgagaagtcacagaaggatcccaaagaatatcttccatttcttaatacacttaagaaaatggaaactaattatcagcggtttactatagacaaatacttgaaacgatatgaaaaagccattggccacctcagcaaatgtggacctgagtacttcccagaatgcttaaacttgataaaagataaaaacttgtataacgaagctctgaagttatattcaccaagctcacaacagtaccaggatatcagcattgcttatggggagcacctgatgcaggagcacatgtatgagccagcggggctcatgtttgcccgttgcggtgcccacgagaaagctctctcagcctttctgacatgtggcaactggaagcaagccctctgtgtggcagcccagcttaactttaccaaagaccagctggtgggcctcggcagaactctggcaggaaagctggttgagcagaggaagcacattgatgcggccatggttttggaagagtgtgcccaggattatgaagaagctgtgctcttgctgttagaaggagctgcctgggaagaagctttgaggctggtatacaaatataacagactggatattatagaaaccaacgtaaagccttccattttagaagcccagaaaaattatatggcatttctggactctcagacagccacattcagtcgccacaagaaacgtttattggtagttcgagagctcaaggagcaagcccagcaggcaggtctggatgatgaggtaccccacgggcaagagtcagacctcttctctgaaactagcagtgtcgtgagtggcagtgagatgagtggcaaatactcccatagtaactccaggatatcagcgagatcatccaagaatcgccgaaaagcggagcggaagaagcacagcctcaaagaaggcagtccgctggaggacctggccctcctggaggcactgagtgaagtggtgcagaacactgaaaacctgaaagatgaagtataccatattttaaaggtactctttctctttgagtttgatgaacaaggaagggaattacagaaggcctttgaagatacgctgcagttgatggaaaggtcacttccagaaatttggactcttacttaccagcagaattcagctaccccggttctaggtcccaattctactgcaaatagtatcatggcatcttatcagcaacagaagacttcggttcctgttcttgatgctgagctttttataccaccaaagatcaacagaagaacccagtggaagctgagcctgctagactgagtgactgcagttaggagggatccgacagagaagaccatttccactcattcctgttgtcctaccaccccttgctctttgagggctggctattgagaactggaaagagtaaaatgataacttaccttagcattgccaagaacttcagcagacaacaagcaattctatttattttatgttgtgtatacatcttgatcattagcaagacattaagctttaaccattatggcaccattttgtgagaatgattgttctttcacttgggctgtttgagagcataattatggtaatcatgagattaatgtttcatgatttctacctccaaagtgtgaagacaagtaaaacaatgtttctaaattgtcttattttgttggcggagaagattacaatggctattagtgctacatttggtcaaatgtaatcacttaaatagcttcttgtcaccttaaactaaagcagaataaaaagtatcctttgaaattataagccctcctttgctgacagctattattttgtaacatcttaccaggtcatgtgctttcagttataactgggctgagcctcctataattacaatgtctatagggactgttttactgcctgtgtattttctgctagagagttagcaatgttagagctagaacagattagaatttctaaacagtatcatgcacagttggtgtgagtgatcagtgtgcattgtatggcatgcatggttgtgaattattctctgttctccaaatactgtttctttaactcagatatttttgttagtgtctaggccacttcatttatttttcgtcatggtactttactgacttctctttattcaattctccacgccctcaccaaaaaaaactgtctcaaaatgagaatattttattttcatggtgagtctagaaaacgcccacttcattctgattaaaaattcttccatgttttaaatatcag

SEQ ID NO: 5422 - protein, 983 aa, Homo sapiens; identical to SEQ ID NO: 5416

SEQ ID NO: 5423 - DNA, 722 bp, Homo sapiens
ccgactctgggtgcggactgtgggagctgactctgggtagccggctgcgcgtggctggggaggcgaggccggacgcacctctgtttgggggtcctcagtgtgaagacaagtaaaacaatgtttctaaattgtcttattttgttggcggagaagattacaatggctattagtgctacatttggtcaaatgtaatcacttaaatagcttcttgtcaccttaaactaaagcagaataaaaagtatcctttgaaattataagccctcctttgctgacagctattattttgtaacatcttaccaggtcatgtgctttcagttataactgggctgagcctcctataattacaatgtctatagggactgttttactgcctgtgtattttctgctagagagttagcaatgttagagctagaacagattagaatttctaaacagtatcatgcacagttggtgtgagtgatcagtgtgcattgtatggcatgcatggttgtgaattattctctgttctccaaatactgtttctttaactcagatatttttgttagtgtctaggccacttcatttatttttcgtcatggtactttactgacttctctttattcaattctccacgccctcaccaaaaaaaactgtctcaaaatgagaatattttattttcatggtgagtctagaaaacgcccacttcattctgattaaaaattcttccatgttttaaatatcag

SEQ ID NO: 5424 - protein, 36 aa, Homo sapiens [sequence omitted]

SEQ ID NO: 5425 - DNA, 5537 bp, Homo sapiens
gcgcgtgtcgtgcgcacgcgcgctgctctcaggtccgcaggttccacccccccccccgccccccccaattacagtgctttggggttcgacatcaaaacagagatcaaatacaaaagtttgggcagatgggcaagagggcagagggacaggggacgcggccaatgtagctcctctacctctacggtgccaggcctacaaagaaggccggccgccgtaagtgaccagaagcgggcccggcctcgccccctccgcctggtgacgtcactcccgcgccgcactcccagtgctgcggctgcctagttgacgcacccattgagtcgctggcttctttgcagcgcttcagcgttttcccctggagggcgcctccatccttggaggcctagtgccgtcggagagagagcgggagccgcggacagagacgcgtgcgcaattcggagccgactctgggtgcggactgtgggagctgactctgggtagccggctgcgcgtggctggggaggcgaggccggacgcacctctgtttgggggtcctcagagattaatgattcatcaagggatagttgtacttgtctcgtgggaatcacttcatcatgcgaaatctgaaattatttcggaccctggagttcagggatattcaaggtccagggaatcctcagtgcttctctctccgaactgaacaggggacggtgctcattggttcagaacatggcctgatagaagtagaccctgtctcaagagaagtgaaaaatgaagtttctttggtggcagaaggctttctcccagaggatggaagtggccgcattgttggtgttcaggacttgctggatcaggagtctgtgtgtgtggccacagcctctggagacgtcatactctgcagtctcagcacacaacagctggagtgtgttgggagtgtagccagtggtatctctgttatgagttggagtcctgaccaagagctggtgcttcttgccacaggtcaacagaccctgattatgatgacaaaagattttgagccaatcctggagcagcagatccatcaggatgattttggtgaaagcaagtttatcactgttggatggggtaggaaggagacacagttccatggatcagaaggcagacaagcagcttttcagatgcaaatgcatgagtctgctttgccctgggatgaccatagaccacaagttacctggcggggggatggacagttttttgctgtgagtgttgtttgcccagaaacaggggctcggaaggtcagagtgtggaaccgagagtttgctttgcagtcaaccagtgagcctgtggcaggactgggaccagccctggcttggaaaccctcaggcagtttgattgcatctacacaagataaacccaaccagcaggatattgtgttttttgagaaaaatggactccttcatggacactttacacttcccttccttaaagatgaggttaaggtaaatgacttgctctggaatgcagattcctctgtgcttgcagtctggctggaagaccttcagagagaagaaagctccattccgaaaacctgtgttcagctctggactgttggaaactatcactggtatctcaagcaaagtttatccttcagcacctgtgggaagagcaagattgtgtctctgatgtgggaccctgtgaccccataccggctgcatgttctctgtcagggctggcattacctcgcctatgattggcactggacgactgaccggagcgtgggagataattcaagtgacttgtccaatgtggctgtcattgatggaaacagggtgttggtgacagtcttccggcagactgtggttccgcctcccatgtgcacctaccaactgctgttcccacaccctgtgaatcaagtcacattcttagcacaccctcaaaagagtaatgaccttgctgttctagatgccagtaaccagatttctgtttataaatgtggtgattgtccaagtgctgaccctacagtgaaactgggagctgtgggtggaagtggatttaaagtttgccttagaactcctcatttggaaaagagatacaaaatccagtttgagaataatgaagatcaagatgtaaacccgctgaaactaggccttctcacttggattgaagaagacgtcttcctggctgtaagccacagtgagttcagcccccggtctgtcattcaccatttgactgcagcttcttctgagatggatgaagagcatggacagctcaatgtcagttcatctgcagcggtggatggggtcataatcagtctatgttgcaattccaagaccaagtcagtagtattacagctggctgatggccagatatttaagtacctttgggagtcaccttctctggctattaaaccatggaagaactctggtggatttcctgttcggtttccttatccatgcacccagaccgaattggccatgattggagaagaggaatgtgtccttggtctgactgacaggtgtcgctttttcatcaatgacattgaggttgcgtcaaatatcacgtcatttgcagtatatgatgagtttttattgttgacaacccattcccatacctgccagtgtttttgcctgagggatgcttcatttaaaacattacaggccggcctgagcagcaatcatgtgtcccatggggaagttctgcggaaagtggagaggggttcacggattgtcactgttgtgccccaggacacaaagcttgtattacagatgccaaggggaaacttagaagttgttcatcatcgagccctggttttagctcagattcggaagtggttggacaaacttatgtttaaagaggcatttgaatgcatgagaaagctgagaatcaatctcaatctgatttatgatcataaccctaaggtgtttcttggaaatgtggaaaccttcattaaacagatagattctgtgaatcatattaacttgttttttacagaattgaaagaagaagatgtcacgaagaccatgtaccctgcaccagttaccagcagtgtctacctgtccagggatcctgacgggaataaaatagaccttgtctgcgatgctatgagagcagtcatggagagcataaatcctcataaatactgcctatccatacttacatctcatgtaaagaagacaaccccagaactggaaattgtactgcaaaaagtacacgagcttcaaggaaatgctccctctgatcctgatgctgtgagtgctgaagaggccttgaaatatttgctgcatctggtagatgttaatgaattatatgatcattctcttggcacctatgactttgatttggtcctcatggtagctgagaagtcacagaaggatcccaaagaatatcttccatttcttaatacacttaagaaaatggaaactaattatcagcggtttactatagacaaatacttgaaacgatatgaaaaagccattggccacctcagcaaatgtggacctgagtacttcccagaatgcttaaacttgataaaagataaaaacttgtataacgaagctctgaagttatattcaccaagctcacaacagtaccaggatatcagcattgcttatggggagcacctgatgcaggagcacatgtatgagccagcggggctcatgtttgcccgttgcggtgcccacgagaaagctctctcagcctttctgacatgtggcaactggaagcaagccctctgtgtggcagcccagcttaactttaccaaagaccagctggtgggcctcggcagaactctggcaggaaagctggttgagcagaggaagcacattgatgcggccatggttttggaagagtgtgcccaggattatgaagaagctgtgctcttgctgttagaaggagctgcctgggaagaagctttgaggctggtatacaaatataacagactggatattatagaaaccaacgtaaagccttccattttagaagcccagaaaaattatatggcatttctggactctcagacagccacattcagtcgccacaagaaacgtttattggtagttcgagagctcaaggagcaagcccagcaggcaggtctggatgatgaggtaccccacgggcaagagtcagacctcttctctgaaactagcagtgtcgtgagtggcagtgagatgagtggcaaatactcccatagtaactccaggatatcagcgagatcatccaagaatcgccgaaaagcggagcggaagaagcacagcctcaaagaaggcagtccgctggaggacctggccctcctggaggcactgagtgaagtggtgcagaacactgaaaacctgaaagatgaagtataccatattttaaaggtactctttctctttgagtttgatgaacaaggaagggaattacagaaggcctttgaagatacgctgcagttgatggaaaggtcacttccagaaatttggactcttacttaccagcagaattcagctaccccggttctaggtcccaattctactgcaaatagtatcatggcatcttatcagcaacagaagacttcggttcctgttcttgatgctgagctttttataccaccaaagatcaacagaagaacccagtggaagctgagcctgctagactgagtgactgcagttaggagggatccgacagagaagaccatttccactcattcctgttgtcctaccaccccttgctctttgagggctggctattgagaactggaaagagtaaaatgataacttaccttagcattgccaagaacttcagcagacaacaagcaattctatttattttatgttgtgtatacatcttgatcattagcaagacattaagctttaaccattatggcaccattttgtgagaatgattgttctttcacttgggctgtttgagagcataattatggtaatcatgagattaatgtttcatgatttctacctccaaagtgtgaagacaagtaaaacaatgtttctaaattgtcttattttgttggcggagaagattacaatggctattagtgctacatttggtcaaatgtaatcacttaaatagcttcttgtcaccttaaactaaagcagaataaaaagtatcctttgaaattataagccctcctttgctgacagctattattttgtaacatcttaccaggtcatgtgctttcagttataactgggctgagcctcctataattacaatgtctatagggactgttttactgcctgtgtattttctgctagagagttagcaatgttagagctagaacagattagaatttctaaacagtatcatgcacagttggtgtgagtgatcagtgtgcattgtatggcatgcatggttgtgaattattctctgttctccaaatactgtttctttaactcagatatttttgttagtgtctaggccacttcatttatttttcgtcatggtactttactgacttctctttattcaattctccacgccctcaccaaaaaaaactgtctcaaaatgagaatattttattttcatggtgagtctagaaaacgcccacttcattctgattaaaaattcttccatgttttaaatatcag

SEQ ID NO: 5426 - protein, 1332 aa, Homo sapiens; identical to SEQ ID NO: 710

SEQ ID NO: 5427 - DNA, 4419 bp, Homo sapiens
attcagaccctgctctttccttccattctcctccttggcccagtacccttgtgcaggttacaatttgcctgtcatatgtggctgcctgattttagatagaagatgtatctcctctgtttcggtgatatctgttgtatgtagacctcttgtttcccaccagtatctgaatggtattatatgatagagcagaagagaaatgtatttgaattaaaaccctagagacaaatatgaataagatgaggcaattaagatgttttcaacatttggtgaagtcttaaaaaagacctactggagcatagaatatttgctgaagttgtataatggaaggagaaatagattttgatttttaggacattatacctggaatggtttagataacttattatttttaaagtcatccaaatgcaatgtaaatatgtaaggttttgtgggcaaatggagcctctgtgtaaaacaggaaaaggcactctttcctctgggcaagtacagtcccacagtgggatgaaccgctcgccgagagacaagggacacatgggatttaaaacttccttggataaagatattcattaattcgttcattcattcattcatgtttgctggaaaaaaaactcttctggattttatctattctttagttaggtgagctttcgatattgtaacactctgagtttgctttaagaccctcaggcagtttgattgcatctacacaagataaacccaaccagcaggatattgtgttttttgagaaaaatggactccttcatggacactttacacttcccttccttaaagatgaggttaaggtaaatgacttgctctggaatgcagattcctctgtgcttgcagtctggctggaagaccttcagagagaagaaagctccattccgaaaacctgtgttcagctctggactgttggaaactatcactggtatctcaagcaaagtttatccttcagcacctgtgggaagagcaagattgtgtctctgatgtgggaccctgtgaccccataccggctgcatgttctctgtcagggctggcattacctcgcctatgattggcactggacgactgaccggagcgtgggagataattcaagtgacttgtccaatgtggctgtcattgatggaaacagggtgttggtgacagtcttccggcagactgtggttccgcctcccatgtgcacctaccaactgctgttcccacaccctgtgaatcaagtcacattcttagcacaccctcaaaagagtaatgaccttgctgttctagatgccagtaaccagatttctgtttataaatgtggtgattgtccaagtgctgaccctacagtgaaactgggagctgtgggtggaagtggatttaaagtttgccttagaactcctcatttggaaaagagatacaaaatccagtttgagaataatgaagatcaagatgtaaacccgctgaaactaggccttctcacttggattgaagaagacgtcttcctggctgtaagccacagtgagttcagcccccggtctgtcattcaccatttgactgcagcttcttctgagatggatgaagagcatggacagctcaatgtcagttcatctgcagcggtggatggggtcataatcagtctatgttgcaattccaagaccaagtcagtagtattacagctggctgatggccagatatttaagtacctttgggagtcaccttctctggctattaaaccatggaagaactctggtggatttcctgttcggtttccttatccatgcacccagaccgaattggccatgattggagaagaggaatgtgtccttggtctgactgacaggtgtcgctttttcatcaatgacattgaggttgcgtcaaatatcacgtcatttgcagtatatgatgagtttttattgttgacaacccattcccatacctgccagtgtttttgcctgagggatgcttcatttaaaacattacaggccggcctgagcagcaatcatgtgtcccatggggaagttctgcggaaagtggagaggggttcacggattgtcactgttgtgccccaggacacaaagcttgtattacagatgccaaggggaaacttagaagttgttcatcatcgagccctggttttagctcagattcggaagtggttggacaaacttatgtttaaagaggcatttgaatgcatgagaaagctgagaatcaatctcaatctgatttatgatcataaccctaaggtgtttcttggaaatgtggaaaccttcattaaacagatagattctgtgaatcatattaacttgttttttacagaattgaaagaagaagatgtcacgaagaccatgtaccctgcaccagttaccagcagtgtctacctgtccagggatcctgacgggaataaaatagaccttgtctgcgatgctatgagagcagtcatggagagcataaatcctcataaatactgcctatccatacttacatctcatgtaaagaagacaaccccagaactggaaattgtactgcaaaaagtacacgagcttcaaggaaatgctccctctgatcctgatgctgtgagtgctgaagaggccttgaaatatttgctgcatctggtagatgttaatgaattatatgatcattctcttggcacctatgactttgatttggtcctcatggtagctgagaagtcacagaaggatcccaaagaatatcttccatttcttaatacacttaagaaaatggaaactaattatcagcggtttactatagacaaatacttgaaacgatatgaaaaagccattggccacctcagcaaatgtggacctgagtacttcccagaatgcttaaacttgataaaagataaaaacttgtataacgaagctctgaagttatattcaccaagctcacaacagtaccaggatatcagcattgcttatggggagcacctgatgcaggagcacatgtatgagccagcggggctcatgtttgcccgttgcggtgcccacgagaaagctctctcagcctttctgacatgtggcaactggaagcaagccctctgtgtggcagcccagcttaactttaccaaagaccagctggtgggcctcggcagaactctggcaggaaagctggttgagcagaggaagcacattgatgcggccatggttttggaagagtgtgcccaggattatgaagaagctgtgctcttgctgttagaaggagctgcctgggaagaagctttgaggctggtatacaaatataacagactggatattatagaaaccaacgtaaagccttccattttagaagcccagaaaaattatatggcatttctggactctcagacagccacattcagtcgccacaagaaacgtttattggtagttcgagagctcaaggagcaagcccagcaggcaggtctggatgatgaggtaccccacgggcaagagtcagacctcttctctgaaactagcagtgtcgtgagtggcagtgagatgagtggcaaatactcccatagtaactccaggatatcagcgagatcatccaagaatcgccgaaaagcggagcggaagaagcacagcctcaaagaaggcagtccgctggaggacctggccctcctggaggcactgagtgaagtggtgcagaacactgaaaacctgaaagatgaagtataccatattttaaaggtactctttctctttgagtttgatgaacaaggaagggaattacagaaggcctttgaagatacgctgcagttgatggaaaggtcacttccagaaatttggactcttacttaccagcagaattcagctaccccggttctaggtcccaattctactgcaaatagtatcatggcatcttatcagcaacagaagacttcggttcctgttcttgatgctgagctttttataccaccaaagatcaacagaagaacccagtggaagctgagcctgctagactgagtgactgcagttaggagggatccgacagagaagaccatttccactcattcctgttgtcctaccaccccttgctctttgagggctggctattgagaactggaaagagtaaaatgataacttaccttagcattgccaagaacttcagcagacaacaagcaattctatttattttatgttgtgtatacatcttgatcattagcaagacattaagctttaaccattatggcaccattttgtgagaatgattgttctttcacttgggctgtttgagagcataattatggtaatcatgagattaatgtttcatgatttctacctccaaagtgtgaagacaagtaaaacaatgtttctaaattgtcttattttgttggcggagaagattacaatggctattagtgctacatttggtcaaatgtaatcacttaaatagcttcttgtcaccttaaactaaagcagaataaaaagtatcctttgaaattat

SEQ ID NO: 5428 - protein, 983 aa, Homo sapiens; identical to SEQ ID NO: 5416

SEQ ID NO: 5429 - DNA, 5070 bp, Homo sapiens
gcgcgtgtcgtgcgcacgcgcgctgctctcaggtccgcaggttccacccccccccccgccccccccaattacagtgctttggggttcgacatcaaaacagagatcaaatacaaaagtttgggcagatgggcaagagggcagagggacaggggacgcggccaatgtagctcctctacctctacggtgccaggcctacaaagaaggccggccgccgtaagtgaccagaagcgggcccggcctcgccccctccgcctggtgacgtcactcccgcgccgcactcccagtgctgcggctgcctagttgacgcacccattgagtcgctggcttctttgcagcgcttcagcgttttcccctggagggcgcctccatccttggaggcctagtgccgtcggagagagagcgggagccgcggacagagacgcgtgcgcaattcggagccgactctgggtgcggactgtgggagctgactctgggtagccggctgcgcgtggctggggaggcgaggccggacgcacctctgtttgggggtcctcagagattaatgattcatcaagggatagttgtacttgtctcgtgggaatcacttcatcatgcgaaatctgaaattatttcggaccctggagttcagggatattcaaggtccagggaatcctcagtgcttctctctccgaactgaacaggggacggtgctcattggttcagaacatggcctgatagaagtagaccctgtctcaagagaagtgaaaaatgaagtttctttggtggcagaaggctttctcccagaggatggaagtggccgcattgttggtgttcaggacttgctggatcaggagtctgtgtgtgtggccacagcctctggagacgtcatactctgcagtctcagcacacaacagctggagtgtgttgggagtgtagccagtggtatctctgttatgagttggagtcctgaccaagagctggtgcttcttgccacaggtcaacagaccctgattatgatgacaaaagattttgagccaatcctggagcagcagatccatcaggatgattttggtgaaagcaagtttatcactgttggatggggtaggaaggagacacagttccatggatcagaaggcagacaagcagcttttcagatgcaaatgcatgagtctgctttgccctgggatgaccatagaccacaagttacctggcggggggatggacagttttttgctgtgagtgttgtttgcccagaaacaggggctcggaaggtcagagtgtggaaccgagagtttgctttgcagtcaaccagtgagcctgtggcaggactgggaccagccctggcttggaaaccctcaggcagtttgattgcatctacacaagataaacccaaccagcaggatattgtgttttttgagaaaaatggactccttcatggacactttacacttcccttccttaaagatgaggttaaggtaaatgacttgctctggaatgcagattcctctgtgcttgcagtctggctggaagaccttcagagagaagaaagctccattccgaaaacctgtgttcagctctggactgttggaaactatcactggtatctcaagcaaagtttatccttcagcacctgtgggaagagcaagattgtgtctctgatgtgggaccctgtgaccccataccggctgcatgttctctgtcagggctggcattacctcgcctatgattggcactggacgactgaccggagcgtgggagataattcaagtgacttgtccaatgtggctgtcattgatggaaacagggtgttggtgacagtcttccggcagactgtggttccgcctcccatgtgcacctaccaactgctgttcccacaccctgtgaatcaagtcacattcttagcacaccctcaaaagagtaatgaccttgctgttctagatgccagtaaccagatttctgtttataaatgtggtgattgtccaagtgctgaccctacagtgaaactgggagctgtgggtggaagtggatttaaagtttgccttagaactcctcatttggaaaagagatacaaaatccagtttgagaataatgaagatcaagatgtaaacccgctgaaactaggccttctcacttggattgaagaagacgtcttcctggctgtaagccacagtgagttcagcccccggtctgtcattcaccatttgactgcagcttcttctgagatggatgaagagcatggacagctcaatgtcagttcatctgcagcggtggatggggtcataatcagtctatgttgcaattccaagaccaagtcagtagtattacagctggctgatggccagatatttaagtacctttgggagtcaccttctctggctattaaaccatggaagaactctggtggatttcctgttcggtttccttatccatgcacccagaccgaattggccatgattggagaagaggaatgtgtccttggtctgactgacaggtgtcgctttttcatcaatgacattgaggttgcgtcaaatatcacgtcatttgcagtatatgatgagtttttattgttgacaacccattcccatacctgccagtgtttttgcctgagggatgcttcatttaaaacattacaggccggcctgagcagcaatcatgtgtcccatggggaagttctgcggaaagtggagaggggttcacggattgtcactgttgtgccccaggacacaaagcttgtattacagatgccaaggggaaacttagaagttgttcatcatcgagccctggttttagctcagattcggaagtggttggacaaacttatgtttaaagaggcatttgaatgcatgagaaagctgagaatcaatctcaatctgatttatgatcataaccctaaggtgtttcttggaaatgtggaaaccttcattaaacagatagattctgtgaatcatattaacttgttttttacagaattgaaagaagaagatgtcacgaagaccatgtaccctgcaccagttaccagcagtgtctacctgtccagggatcctgacgggaataaaatagaccttgtctgcgatgctatgagagcagtcatggagagcataaatcctcataaatactgcctatccatacttacatctcatgtaaagaagacaaccccagaactggaaattgtactgcaaaaagtacacgagcttcaaggaaatgctccctctgatcctgatgctgtgagtgctgaagaggccttgaaatatttgctgcatctggtagatgttaatgaattatatgatcattctcttggcacctatgactttgatttggtcctcatggtagctgagaagtcacagaaggatcccaaagaatatcttccatttcttaatacacttaagaaaatggaaactaattatcagcggtttactatagacaaatacttgaaacgatatgaaaaagccattggccacctcagcaaatgtggacctgagtacttcccagaatgcttaaacttgataaaagataaaaacttgtataacgaagctctgaagttatattcaccaagctcacaacagtaccaggatatcagcattgcttatggggagcacctgatgcaggagcacatgtatgagccagcggggctcatgtttgcccgttgcggtgcccacgagaaagctctctcagcctttctgacatgtggcaactggaagcaagccctctgtgtggcagcccagcttaactttaccaaagaccagctggtgggcctcggcagaactctggcaggaaagctggttgagcagaggaagcacattgatgcggccatggttttggaagagtgtgcccaggattatgaagaagctgtgctcttgctgttagaaggagctgcctgggaagaagctttgaggctggtatacaaatataacagactggatattatagaaaccaacgtaaagccttccattttagaagcccagaaaaattatatggcatttctggactctcagacagccacattcagtcgccacaagaaacgtttattggtagttcgagagctcaaggagcaagcccagcaggcaggtctggatgatgaggtaccccacgggcaagagtcagacctcttctctgaaactagcagtgtcgtgagtggcagtgagatgagtggcaaatactcccatagtaactccaggatatcagcgagatcatccaagaatcgccgaaaagcggagcggaagaagcacagcctcaaagaaggcagtccgctggaggacctggccctcctggaggcactgagtgaagtggtgcagaacactgaaaacctgaaagatgaagtataccatattttaaaggtactctttctctttgagtttgatgaacaaggaagggaattacagaaggcctttgaagatacgctgcagttgatggaaaggtcacttccagaaatttggactcttacttaccagcagaattcagctaccccggttctaggtcccaattctactgcaaatagtatcatggcatcttatcagcaacagaagacttcggttcctgttcttgatgctgagctttttataccaccaaagatcaacagaagaacccagtggaagctgagcctgctagactgagtgactgcagttaggagggatccgacagagaagaccatttccactcattcctgttgtcctaccaccccttgctctttgagggctggctattgagaactggaaagagtaaaatgataacttaccttagcattgccaagaacttcagcagacaacaagcaattctatttattttatgttgtgtatacatcttgatcattagcaagacattaagctttaaccattatggcaccattttgtgagaatgattgttctttcacttgggctgtttgagagcataattatggtaatcatgagattaatgtttcatgatttctacctccaaagtgtgaagacaagtaaaacaatgtttctaaattgtcttattttgttggcggagaagattacaatggctattagtgctacatttggtcaaatgtaatcacttaaatagcttcttgtcaccttaaactaaagcagaataaaaagtatcctttgaaattat

SEQ ID NO: 5430 - protein, 1332 aa, Homo sapiens; identical to SEQ ID NO: 710

SEQ ID NO: 5431 - DNA, 526 bp, Homo sapiens
gaagaaaacattctaaagttgagaatcttgcctctcctaaaaagaacataaaataggtttcagaattcctaatttgtagaccataactgtatagagtgggtcaggttgctgctataatccatacatgggtgtgtactcagagaggtaagttttttcttttcttggttattctgattctgactaccacttcttcaccccctgaatcatttcatttaaataaatatggtcatttatcactattaagctatttatttttctcttagagattaatgattcatcaagggatagttgtacttgtctcgtgggaatcacttcatcatgcgaaatctgaaattatttcggaccctggagttcagggatattcaaggtccagggaatcctcagtgcttctctctccgaactgaacaggggacggtgctcattggttcagaacatggcctgatagaagtagaccctgtctcaagagaagtgaaaaatgaagtttctttggtggcagaaggctttctcccagaggatggaagtggcc

SEQ ID NO: 5432 - protein, 68 aa, Homo sapiens
MRNLKLFRTLEFRDIQGPGNPQCFSLRTEQGTVLIGSEHGLIEVDPVSREVKNEVSLVAEGFLPEDGS

SEQ ID NO: 5433 - DNA, 2124 bp, Homo sapiens
cttacggcggccggccttctttgtaggcctggcaccgtagaggtagaggagctacattggccgcgtcccctgtccctctgccctcttgcccatctgcccaaacttttgtatttgatctctgttttgatgtcgaaccccaaagcactgtaattggggggggcgggggggggggtggaacctgcggacctgagagcagcgcgcgtgcgcacgacacgcgctgtgcgccggaagagcacgcccagtccgggctgcgcggaggaagcgctggggtcccggagggcgggggtggcggcgccggaggtcgccatggctaccgagcccgaagccgcggagccggtggtgccttcgctcgtggatcgatacttcactcgctggtacaaaccggatgtcaaaggaaaattttgtgaggaccactgtatactacagcactctaaccgaatatgtgtcatcacattggcagaatctcatccagttcttcaaagtggaaaaacaattaaaagcatttcctatcagatcagtaccaactgtagcagacttcagaacaaggtctctgggaaatttaagcggggggcacagtttctaacagagcttgcacctctctgtaagatttactgctcagatggtgaagaatatactgtgtctagttgtgttagaggacgtttgatggaagtgaatgaaaacatcctccataagccatctattcttcaagaaaagccatctactgaaggctacattgcagttgtgttacccaaatttgaagaaagtaaaagcataacagaagggttactgacacaaaaacaatatgaagaagtcatggtgaaacgcattaatgccacaacagctacgtcatgaggattgacatggaacaaaaagcaaagtgggattcttgttacctggcctaaaccatcagggtactaaaggagaagaaccagtatatgtaaagcatacctaacagccagccatatgcaggggaggcctagtgcttcacttagttttccctctctgtcttcataatgagccttggttcccatttgtctacagcctgccagatctggcctgcccatgtactcacactgttctcttgcatctctctaacaactggcatgcaaggcatgtttttctgattaaaaacaaacaaagctctttgaagaagatttagaaaatacagaagagttttaagtagccaagtaaaaataatttacccatcatcccataatccagaagtaaatacatttgacccttgagcaacataggtttgaactgcaagggtccacttatgcatggactattttcaactataaacgagtcaaaaatatatcattaaccaaacacgaaacccacttatagagcaggttcatatactcaggttccaaagggccaactgcaggacttgagttctcacgtatggatttgggtatatgtggaagttcctggaaccaatcccctatgtaaaccaagggataactactacattttaacctacttctgtttgaacatatggtatggttattgcttttgcctcgttttcctaacagtttgaagtttaaaaaaacctaacccacctttcttacccagtcttctataatgtgcctaccaaaaagcctagtcctagcccatctgcctcaactcctctcccttttaggttgtagggaagaggccggagtgtagagtatattatatcttctgtcccccttatgccaacaagatggccttcccctctgaaacaaagtaaaactgcaacactgtgacttcttaaatgagggatatgtgaaaaggctatgaaaaatacaaaggctttcctaggaaatgtgttataatgcagcgggaagctaattcttgaaatatgcacattatagttactcagtctcacatactctagttactggcaaagaagttactgagaatatgtcattcaaaggcataggggcctttgaatggaacaaatgctttcacatcatttaaagtaaaaaaaaacctccaacaactgtgaatttatagtttaagagtgatttacactgaatttcaaataaaaggactataaaacgtgttatttttctgtaagggctataacatacatgtcaatatcactgtttttaaataaaatatacttttatacagaagaaa

SEQ ID NO: 5434 - protein, 181 aa, Homo sapiens; identical to SEQ ID NO: 712

SEQ ID NO: 5435 - DNA, 2480 bp, Homo sapiens
cgctggggtcccggagggcgggggtggcggcgccggaggtcgccatggctaccgagcccgaagccgcggagccggtggtgccttcgctcgtggatcgatacttcactcgctggtacaaaccggatgtcaaaggaaaattttgtgaggaccactgtatactacagcactctaaccggtaagcaaattgggaattttaaattatcaaaaatttttttttcctggtattgtagcctggtatggtcttgtggtcttggattgaacaaatgttcactaaacaaacatgcattaattatcttctactgtgttgaaatggtattattataggagtttgtttggcaagaatgagtattccagtgcctggccactctgaacatataaatttgattactcaaacatccaaatggaggaccacatcatcagctgctacttgaagtggccagtctgtgcccaactactgaactgttcagagcccacagaaagggctacggtagagacatgtatggtatctcgtatacacaggcatgccttatttctttgtcttctaccccagtgctacctacctaaagacctctggtactcttccctttcctgggaaagaaattcaatcttgttttctcttttattattgtattctctattctacagttatgccccaatagtagccaaaggaaaaagggggaagatgatagtttgactaaacaaataccagttcatacattcttgttccaataggagttatgggaggaaaaattattccaagcaatcacacaggatcaactttttctccttgtagaatatgtgtcatcacattggcagaatctcatccagttcttcaaagtggaaaaacaattaaaagcatttcctatcagatcagtaccaactgtagcagacttcagaacaaggtctctgggaaatttaagcggggggcacagtttctaacagagcttgcacctctctgtaagatttactgctcagatggtgaagaatatactgtgtctagttgtgttagaggacgtttgatggaagtgaatgaaaacatcctccataagccatctattcttcaagaaaagccatctactgaaggctacattgcagttgtgttacccaaatttgaagaaagtaaaagcataacagaagggttactgacacaaaaacaatatgaagaagtcatggtgaaacgcattaatgccacaacagctacgtcatgaggattgacatggaacaaaaagcaaagtgggattcttgttacctggcctaaaccatcagggtactaaaggagaagaaccagtatatgtaaagcatacctaacagccagccatatgcaggggaggcctagtgcttcacttagttttccctctctgtcttcataatgagccttggttcccatttgtctacagcctgccagatctggcctgcccatgtactcacactgttctcttgcatctctctaacaactggcatgcaaggcatgtttttctgattaaaaacaaacaaagctctttgaagaagatttagaaaatacagaagagttttaagtagccaagtaaaaataatttacccatcatcccataatccagaagtaaatacatttgacccttgagcaacataggtttgaactgcaagggtccacttatgcatggactattttcaactataaacgagtcaaaaatatatcattaaccaaacacgaaacccacttatagagcaggttcatatactcaggttccaaagggccaactgcaggacttgagttctcacgtatggatttgggtatatgtggaagttcctggaaccaatcccctatgtaaaccaagggataactactacattttaacctacttctgtttgaacatatggtatggttattgcttttgcctcgttttcctaacagtttgaagtttaaaaaaacctaacccacctttcttacccagtcttctataatgtgcctaccaaaaagcctagtcctagcccatctgcctcaactcctctcccttttaggttgtagggaagaggccggagtgtagagtatattatatcttctgtcccccttatgccaacaagatggccttcccctctgaaacaaagtaaaactgcaacactgtgacttcttaaatgagggatatgtgaaaaggctatgaaaaatacaaaggctttcctaggaaatgtgttataatgcagcgggaagctaattcttgaaatatgcacattatagttactcagtctcacatactctagttactggcaaagaagttactgagaatatgtcattcaaaggcataggggcctttgaatggaacaaatgctttcacatcatttaaagtaaaaaaaaacctccaacaactgtgaatttatagtttaagagtgatttacactgaatttcaaataaaaggactataaaacgtgttatttttctgtaagggctataacatacatgtcaatatcactgtttttaaataaaatatacttttatacagaagaaa

SEQ ID NO: 5436 - protein, 156 aa, Homo sapiens
MGGKIIPSNHTGSTFSPCRICVITLAESHPVLQSGKTIKSISYQISTNCSRLQNKVSGKFKRGAQFLTELAPLCKIYCSDGEEYTVSSCVRGRLMEVNENILHKPSILQEKPSTEGYIAVVLPKFEESKSITEGLLTQKQYEEVMVKRINATTATS

SEQ ID NO: 5437 - DNA, 531 bp, Homo sapiens
ggagggcgggggtggcggcgccggaggtcgccatggctaccgagcccgaagccgcggagccggtggtgccttcgctcgtggatcgatacttcactcgctggtacaaaccggatgtcaaaggaaaattttgtgaggaccactgtatactacagcactctaaccgaatatgtgtcatcacattggcagaatctcatccagttcttcaaagtggaaaaacaattaaaagcatttcctatcagatcagtaccaactgtagcagacttcagaacaaggtctctgggaaatttaagcggagaattatctatctagaaaaggtagaagacgtcatcaagaggaaaatgatgcctctaagcttgggactgcatcttccccactcttaatcctccttctataggaaggaatcttcacgagcacaggatccctcacttctgtctgctgcctcacctatcccatcccataaaaggaggtggatgctcatcttttcagtctttctggtgactttgcaaaaataaattgaacacattaaccctt

SEQ ID NO: 5438 - protein, 115 aa, Homo sapiens
MATEPEAAEPVVPSLVDRYFTRWYKPDVKGKFCEDHCILQHSNRICVITLAESHPVLQSGKTIKSISYQISTNCSRLQNKVSGKFKRRIIYLEKVEDVIKRKMMPLSLGLHLPHS

SEQ ID NO: 5439 - DNA, 1961 bp, Homo sapiens
gactatgttgacagatcataagccacgcgcgctctccctggctctccgtccccacgtcagaaggcactggacttctgtgttccgtctagccccagggaatggcatttgcaaagacctggtggcctgaaatacttcagggcgcattctggggccggcgattgcagtgcgagctctagggtgttgctcgcagtaagatgagtactctaaacggaggccccaaagatgtcaaaggaaaattttgtgaggaccactgtatactacagcactctaaccgaatatgtgtcatcacattggcagaatctcatccagttcttcaaagtggaaaaacaattaaaagcatttcctatcagatcagtaccaactgtagcagacttcagaacaaggtctctgggaaatttaagcggggggcacagtttctaacagagcttgcacctctctgtaagatttactgctcagatggtgaagaatatactgtgtctagttgtgttagaggacgtttgatggaagtgaatgaaaacatcctccataagccatctattcttcaagaaaagccatctactgaaggctacattgcagttgtgttacccaaatttgaagaaagtaaaagcataacagaagggttactgacacaaaaacaatatgaagaagtcatggtgaaacgcattaatgccacaacagctacgtcatgaggattgacatggaacaaaaagcaaagtgggattcttgttacctggcctaaaccatcagggtactaaaggagaagaaccagtatatgtaaagcatacctaacagccagccatatgcaggggaggcctagtgcttcacttagttttccctctctgtcttcataatgagccttggttcccatttgtctacagcctgccagatctggcctgcccatgtactcacactgttctcttgcatctctctaacaactggcatgcaaggcatgtttttctgattaaaaacaaacaaagctctttgaagaagatttagaaaatacagaagagttttaagtagccaagtaaaaataatttacccatcatcccataatccagaagtaaatacatttgacccttgagcaacataggtttgaactgcaagggtccacttatgcatggactattttcaactataaacgagtcaaaaatatatcattaaccaaacacgaaacccacttatagagcaggttcatatactcaggttccaaagggccaactgcaggacttgagttctcacgtatggatttgggtatatgtggaagttcctggaaccaatcccctatgtaaaccaagggataactactacattttaacctacttctgtttgaacatatggtatggttattgcttttgcctcgttttcctaacagtttgaagtttaaaaaaacctaacccacctttcttacccagtcttctataatgtgcctaccaaaaagcctagtcctagcccatctgcctcaactcctctcccttttaggttgtagggaagaggccggagtgtagagtatattatatcttctgtcccccttatgccaacaagatggccttcccctctgaaacaaagtaaaactgcaacactgtgacttcttaaatgagggatatgtgaaaaggctatgaaaaatacaaaggctttcctaggaaatgtgttataatgcagcgggaagctaattcttgaaatatgcacattatagttactcagtctcacatactctagttactggcaaagaagttactgagaatatgtcattcaaaggcataggggcctttgaatggaacaaatgctttcacatcatttaaagtaaaaaaaaacctccaacaactgtgaatttatagtttaagagtgatttacactgaatttcaaataaaaggactataaaacgtgttatttttctgtaagggctataacatacatgtcaatatcactgtttttaaataaaatatacttttatacagaagaaa

SEQ ID NO: 5440 - protein, 164 aa, Homo sapiens
MSTLNGGPKDVKGKFCEDHCILQHSNRICVITLAESHPVLQSGKTIKSISYQISTNCSRLQNKVSGKFKRGAQFLTELAPLCKIYCSDGEEYTVSSCVRGRLMEVNENILHKPSILQEKPSTEGYIAVVLPKFEESKSITEGLLTQKQYEEVMVKRINATTATS

SEQ ID NO: 5441 - DNA, 369 bp, Homo sapiens
gaatatgtgtcatcacattggcagaatctcatccagttcttcaaagtggaaaaacaattaaaagcatttcctatcagatcagtaccaactgtagcagacttcagaacaaggtctctgggaaatttaagcggagaattatctatctagaaaaggtagaagacgtcatcaagaggaaaatgatgcctctaagcttgggactgcatcttccccactcttaatcctccttctataggaaggaatcttcacgagcacaggatccctcacttctgtctgctgcctcacctatcccatcccataaaaggaggtggatgctcatcttttcagtctttctggtgactttgcaaaaataaattgaacacattaaccctt

SEQ ID NO: 5442 - protein, 48 aa, Homo sapiens
EYVSSHWQNLIQFFKVEKQLKAFPIRSVPTVADFRTRSLGNLSGELSI

SEQ ID NO: 5443 - DNA, 834 bp, Homo sapiens
catcaatcctggccagctgattctcctctttaccagaacaccattgagcttagtacagaagaataatgcaaacctgaaatcattaaagccagacaagcctgactctgaggagcaagccaagatagcaaagcttggacttaagctgggtttgctcacctctgacgctgactgcgaaattgagaagtgggaagatcaggagaatgagattgttcaatatggacggaacatgtccagtatggcctattctctgtatttatttactagaggagaggggccactgaaaacttcccaggatttaattcatcaactagaggtttttgctgcagagggtttaaagcttacttccagtgttcaagctttttcaaaacagctgaaagacgatgacaagcttatgcttctcctggaaataaacaagctaattcctctatgccaccagctccagacagtaactaagacttctttgcagaataaagtatttctaaaggttgacaagtgtattacgaagacaagatccatgatggctctcttagtccaacttctttcactttgttataaactgctgaagaagcttcagatggaaaataacggatgggtctcagttacaaataaggacactatggatagtaaaacttgagaagcttttggggtcagatctctggaacatcatgtgatgaagctgacatttttaaaaatcaaatgatcctttatcttttcagaaattcatcaattttataaagaaaacaatattgaaattttgctctattttctgatcatgaaactgattgtaaagctttttgacaactaataaatgtcttggtaattgctagattctaa

SEQ ID NO: 5444 - protein, 135 aa, Homo sapiens
MSSMAYSLYLFTRGEGPLKTSQDLIHQLEVFAAEGLKLTSSVQAFSKQLKDDDKLMLLLEINKLIPLCHQLQTVTKTSLQNKVFLKVDKCITKTRSMMALLVQLLSLCYKLLKKLQMENNGWVSVTNKDTMDSKT

SEQ ID NO: 5445 - DNA, 2507 bp, Homo sapiens
ggttggcgcgagtgtcctgtcgccgccgcctcgggcgggtgggctgactggcggcaggctcgccgcggcgcggagtcccggctgcgggatagaccgagggccatggccgcctctcccggacccgccggcgttggcggcgccggagcagtctacggctccggctcttcgggcttcgccctcgactcgggactggagatcaaaactcgctcggtggagcagacgctactcccgctggtttctcagatcaccacgcttattaatcataaagataataccaaaaagtctgataaaactctgcaagcaattcagcgtgtaggacaagctgtcaacttggcagttggaagatttgttaaagtaggagaagctatagccaatgaaaactgggatttgaaagaagaaataaatattgcttgtattgaagctaaacaagcaggagaaacaattgcagcacttacagacataaccaacttgaaccatctggaatctgatgggcagatcacaatttttacagacaaaacaggagtgataaaggctgcaagattacttctttcttcagtgacaaaagtgttgttgctggcagaccgagtagtcattaaacagataataacatcaagaaataaggttctcgcaactatggaaagactagagaaagtgaatagctttcaagagtttgtccaaatattcagtcaatttggaaatgaaatggtggagtttgcacatctgagtggagatagacaaaatgatttgaaagatgaaaagaaaaaggcaaaaatggcagcagctagggcagttcttgaaaagtgtacaatgatgcttctcacagcttcaaagacatgtctgaggcatcctaactgcgaatcagcccataaaaacaaagaaggagtatttgaccgtatgaaagtggcattggataaggtcattgaaattgtgactgactgtaaaccgaatggagagactgacatttcatctatcagtatttttactggaattaaggaattcaagatgaatattgaagctcttcgggagaatctttattttcagtccaaagagaacctttctgtgacattggaagtcatcttggagcgtatggaggactttactgattctgcctacaccagccatgagcacagagaacgcatcttggaactgtcaactcaggcgagaatggaactgcagcagttaatttctgtgtggattcaagctcaaagcaagaaaacaaaaagcatcgctgaagaactggaactcagtattttgaaaatcagtcacagtcttaatgaacttaagaaagaacttcatagtacagcgacacagctggcagcagatctattaaaataccatgctgatcatgtggttctaaaagcattaaaacttactggagtagaaggaaatttagaagctttggctgaatatgcctgtaaactctctgaacagaaagagcagcttgttgagacctgtcgattgttacgacacatatctgggacagaacctctggaaataacctgtatacatgcagaggagacatttcaggtgactggccaacagataatttctgctgctgaaacattgacattgcatccatctagtaaaattgctaaagaaaacctagatgtattttgtgaagcttgggaatcccaaattagtgacatgtcaacactgctgagagaaatcaatgacgtgtttgaaggaagacgaggagagaagtatggctacctttcacttccaaagccaatgaagaataatgcaaacctgaaatcattaaagccagacaagcctgactctgaggagcaagccaagatagcaaagcttggacttaagctgggtttgctcacctctgacgctgactgcgaaattgagaagtgggaagatcaggagaatgagattgttcaatatggacggaacatgtccagtatggcctattctctgtatttatttactagaggagaggggccactgaaaacttcccaggatttaattcatcaactagaggtttttgctgcagagggtttaaagcttacttccagtgttcaagctttttcaaaacagctgaaagacgatgacaagcttatgcttctcctggaaataaacaagctaattcctctatgccaccagctccagacagtaactaagacttctttgcagaataaagtatttctaaaggttgacaagtgtattacgaagacaagatccatgatggctctcttagtccaacttctttcactttgttataaactgctgaagaagcttcagatggaaaataacggatgggtctcagttacaaataaggacactatggatagtaaaacttgagaagcttttggggtcagatctctggaacatcatgtgatgaagctgacatttttaaaaatcaaatgatcctttatcttttcagaaattcatcaattttataaagaaaacaatattgaaattttgctctattttctgatcatgaaactgattgtaaagctttttgacaactaataaatgtcttggtaattgctagattctaa

SEQ ID NO: 5446 - protein, 734 aa, Homo sapiens; identical to SEQ ID NO: 714

SEQ ID NO: 5447 - DNA, 462 bp, Homo sapiens
ctgaaagacgatgacaagcttatgcttctcctggaaataaacaagctaattcctctatgccaccagctccagacagtaactaagacttctttgcagaataaagtatttctaaaggttgacaagtgtattacgaagacaagatccatgatggctctcttagtccaacttctttcactttgttataaactgctgaagaagcttcagatggaaaataacggatgggtctcagttacaaataaggacactatggatagtaaaacttgagaagcttttggggtcagatctctggaacatcatgtgatgaagctgacatttttaaaaatcaaatgatcctttatcttttcagaaattcatcaattttataaagaaaacaatattgaaattttgctctattttctgatcatgaaactgattgtaaagctttttgacaactaataaatgtcttggtaattgctagattct

SEQ ID NO: 5448 - protein, 80 aa, Homo sapiens
MLLLEINKLIPLCHQLQTVTKTSLQNKVFLKVDKCITKTRSMMALLVQLLSLCYKLLKKLQMENNGWVSVTNKDTMDSKT

SEQ ID NO: 5449 - DNA, 3383 bp, Homo sapiens
atagatgcaataataagctttaggtttacctaagtaggtgaaaatatcctgtaagcagatgcaaatccagagttctagaaagatttttggcctcttcattattgaattggataaaatatattgattaaatgagataacacatgagagagtatctgttaaaatgcttaagactattagagggtattaagtacatcttagtttccttctttccttcagtattcatgatgatttagggcattaaaggagagacagatatgctaacatccactcttgtgccatgtgtcttaacaggactccacataggcccatctgtaattctactccctctagttagaggctttagattggcaagtgggttgcaaaattccttttatgttttccctgatccccatgttagcctgtttgcctctctagaaccaagagcattcttgtgtgtaaatttgaaatttctgtcactttatcactcatatagtctcctttggcattcccatgtacatctgagatttgaaatttctatcactttaggccaggcgcggtggctcacgcctgtaatcccatgctgggattacaggcctgagccactatgcccagctgatcctattatgttttaagtaaggtttttggcttggccaacagagtgagtggtagtgccattttctgagacagggaacactgagggagaacactagatttagagggtggaaatcgagcattttgttttgcacatgttaagtacaaaggtcagataggatatacacttggccctccctatctgcaggttttgcatctgcagattcaaccaactatggattgaaaatattcaaaacagtaaaaacagtctgggcacaatggctcactcctgtaaccctagcactttgggagaccaagctgggaggatcacttgagtccaggagtttgagaccagctggggcaacatagtgagaccttgtctctacaaaaaaacaaaacaaaaaaaaaaaaaactagcggggcatggtggcacacacctgtaatcctagctactcaggcagctgaggcaggaggatcgcttgagcctgggaggtcaaggctgtagtgagctgtgatcacaccacttcacttcactctggacaacagagtgagaccctgtctcaaaaaaaaaaaaaaaaggaagaaaaccaataaaatataacaacagtaaaaaaaaacaaaatacattttaaaaggttagagttccaagggagggaaaacaatacagtataactgcgatttacttagcatttacattaacttagatattataatttagagatgagatgatttaaagtttatgggatgatgtgtgtaggttatatgcaaatactacactgttttatttaagggacttaagcatctacagattttggtatccttggggaggtctgggaaccaatctcccatggatactgagggatgactgtacaagactgatgtcaggatagttcaggagtggagagagagacctgggagttaccagctttcaggtagttttaaaaccatcatactgtatgagacagacatggattttgtccccaaggggtttgcaggctagaaggaaagagaaaatttgcagaatagaaagtggtaacatgaagtgataaggaacacttggggaagtgaatcatttcatttggttggagtctagatgtaaagcttactggtttcccttttaaagggaaggttgcaaagtacgatttgaccttgagatcattttatccagtgatagcaaggtgttaagccttttgaatagagggtaaaaattaaccctggaattattgcctcctccttcttagtattctttaatttattatgaagacctattattttcattcacaaaccactctcagattttccctgttctctccattattactgacgccacctaaaactaagccttcctccctttactcccctggcatctcactctaaaatagtctgcaaaccattttaacataatatgctaaatacttctgtcttacctgtacaaccttctttttcactctacttctccatcatcctgttcatctcattaaattatagaattcatggtacatggtgaatagtgaaaattaatctgaaaaaaagtggcaacaaaaaccaaccacctggattggttctctcaaatgtctggttatggaatatgtatgggtgacaaattttgtcttgcctagatggaattgggaaggtcctaacccttttgacctcatgcttgaaaattcatcatccttttataattgagcatatttgagatgagctctaggtcccttgcgtaatctagacataatttgtgtggctgaatatcacaggtctgtgtgaccctccagaataattggaggtctggtgtagagaagcctctccagggatggattctgcatctggtctgtggaaactccttctgaaaacagttaaacccttgtgcattcctggtactggaaaaagtttaggagttcctgacagactttttatatctaggctttatttttaaaattctacgtaaaaattattagtaagtatatttcttaccaactatccatagacatcagtctaaaatagtggtgttttctctttctaccaggtttttgctgcagagggtttaaagcttacttccagtgttcaagctttttcaaaacaggtaacacatgtctacctacctggagctggtggtggtattatgtataacctactttgggggtataatatcaatgtataaatgtgtttaaggtattaaagatggagttttgttgcgggctgttataacttgttaaattacatttcagctgaaagacgatgacaagcttatgcttctcctggaaataaacaagctaattcctctatgccaccagctccagacagtaactaagacttctttgcagaataaagtatttctaaaggttgacaagtgtattacgaagacaagatccatgatggctctcttagtccaacttctttcactttgttataaactgctgaagaaggtgaggtagtttttctattttagactcatactttaaaaaatggtttaaaagaaaatagttactacttaattttgtaatttttttttcagagtgaaaccagatactaattgtcttaactctttccagcttcagatggaaaataacggatgggtctcagttacaaataaggacactatggatagtaaaacttgagaagcttttggggtcagatctctggaacatcatgtgatgaagctgacatttttaaaaatcaaatgatcctttatcttttcagaaattcatcaattttataaagaaaacaatattgaaattttgctctattttctgatcatgaaactgattgtaaagctttttgacaactaataaatgtcttggtaattgctagattct

SEQ ID NO: 5450 - protein, 118 aa, Homo sapiens
MLTSTLVPCVLTGLHIGPSVILLPLVRGFRLASGLQNSFYVFPDPHVSLFASLEPRAFLCVNLKFLSLYHSYSLLWHSHVHLRFEISITLGQARWLTPVIPCWDYRPEPLCPADPIMF

SEQ ID NO: 5451 - DNA, 2542 bp, Homo sapiens
ggttggcgcgagtgtcctgtcgccgccgcctcgggcgggtgggctgactggcggcaggctcgccgcggcgcggagtcccggctgcgggatagaccgagggccatggccgcctctcccggacccgccggcgttggcggcgccggagcagtctacggctccggctcttcgggcttcgccctcgactcgggactggagatcaaaactcgctcggtggagcagacgctactcccgctggtttctcagatcaccacgcttattaatcataaagataataccaaaaagtctgataaaactctgcaagcaattcagcgtgtaggacaagctgtcaacttggcagttggaagatttgttaaagtaggagaagctatagccaatgaaaactgggatttgaaagaagaaataaatattgcttgtattgaagctaaacaagcaggagaaacaattgcagcacttacagacataaccaacttgaaccatctggaatctgatgggcagatcacaatttttacagacaaaacaggagtgataaaggctgcaagattacttctttcttcagtgacaaaagtgttgttgctggcagaccgagtagtcattaaacagataataacatcaagaaataaggttctcgcaactatggaaagactagagaaagtgaatagctttcaagagtttgtccaaatattcagtcaatttggaaatgaaatggtggagtttgcacatctgagtggagatagacaaaatgatttgaaagatgaaaagaaaaaggcaaaaatggcagcagctagggcagttcttgaaaagtgtacaatgatgcttctcacagcttcaaagacatgtctgaggcatcctaactgcgaatcagcccataaaaacaaagaaggagtatttgaccgtatgaaagtggcattggataaggtcattgaaattgtgactgactgtaaaccgaatggagagactgacatttcatctatcagtatttttactggaattaaggaattcaagatgaatattgaagctcttcgggagaatctttattttcagtccaaagagaacctttctgtgacattggaagtcatcttggagcgtatggaggactttactgattctgcctacaccagccatgagcacagagaacgcatcttggaactgtcaactcaggcgagaatggaactgcagcagttaatttctgtgtggattcaagctcaaagcaagaaaacaaaaagcatcgctgaagaactggaactcagtattttgaaaatcagtcacagtcttaatgaacttaagaaagaacttcatagtacagcgacacagctggcagcagatctattaaaataccatgctgatcatgtggttctaaaagcattaaaacttactggagtagaaggaaatttagaagctttggctgaatatgcctgtaaactctctgaacagaaagagcagcttgttgagacctgtcgattgttacgacacatatctgggacagaacctctggaaataacctgtatacatgcagaggagacatttcaggtgactggccaacagataatttctgctgctgaaacattgacattgcatccatctagtaaaattgctaaagaaaacctagatgtattttgtgaagcttgggaatcccaaattagtgacatgtcaacactgctgagagaaatcaatgacgtgtttgaaggaagacgaggagagaagtatggctacctttcacttccaaagccaatgaagaataatgcaaacctgaaatcattaaagccagacaagcctgactctgaggagcaagccaagatagcaaagcttggacttaagctgggtttgctcacctctgacgctgactgcgaaattgagaagtgggaagatcaggagaatgagattgttcaatatggacggaacatgtccagtatggcctattctctgtatttatttactagaggagaggggccactgaaaacttcccaggatttaattcatcaactagaggtttttgctgcagagggtttaaagcttacttccagtgttcaagctttttcaaaacagctgaaagacgatgacaagcttatgcttctcctggaaataaacaagctaattcctctatgccaccagctccagacagtaactaagacttctttgcagaataaagtatttctaaaggttgacaagtgtattacgaagacaagatccatgatggctctcttagtccaacttctttcactttgttataaactgctgaagaagagtgaaaccagatactaattgtcttaactctttccagcttcagatggaaaataacggatgggtctcagttacaaataaggacactatggatagtaaaacttgagaagcttttggggtcagatctctggaacatcatgtgatgaagctgacatttttaaaaatcaaatgatcctttatcttttcagaaattcatcaattttataaagaaaacaatattgaaattttgctctattttctgatcatgaaactgattgtaaagctttttgacaactaataaatgtcttggtaattgctagattct

SEQ ID NO: 5452 - protein, 718 aa, Homo sapiens
MAASPGPAGVGGAGAVYGSGSSGFALDSGLEIKTRSVEQTLLPLVSQITTLINHKDNTKKSDKTLQAIQRVGQAVNLAVGRFVKVGEAIANENWDLKEEINIACIEAKQAGETIAALTDITNLNHLESDGQITIFTDKTGVIKAARLLLSSVTKVLLLADRVVIKQIITSRNKVLATMERLEKVNSFQEFVQIFSQFGNEMVEFAHLSGDRQNDLKDEKKKAKMAAARAVLEKCTMMLLTASKTCLRHPNCESAHKNKEGVFDRMKVALDKVIEIVTDCKPNGETDISSISIFTGIKEFKMNIEALRENLYFQSKENLSVTLEVILERMEDFTDSAYTSHEHRERILELSTQARMELQQLISVWIQAQSKKTKSIAEELELSILKISHSLNELKKELHSTATQLAADLLKYHADHVVLKALKLTGVEGNLEALAEYACKLSEQKEQLVETCRLLRHISGTEPLEITCIHAEETFQVTGQQIISAAETLTLHPSSKIAKENLDVFCEAWESQISDMSTLLREINDVFEGRRGEKYGYLSLPKPMKNNANLKSLKPDKPDSEEQAKIAKLGLKLGLLTSDADCEIEKWEDQENEIVQYGRNMSSMAYSLYLFTRGEGPLKTSQDLIHQLEVFAAEGLKLTSSVQAFSKQLKDDDKLMLLLEINKLIPLCHQLQTVTKTSLQNKVFLKVDKCITKTRSMMALLVQLLSLCYKLLKKSETRY

SEQ ID NO: 5453 - DNA, 288 bp, Homo sapiens
agtttggagacaattcattgaacattgatttaatgactaagctcacataggaagaagagaattatctatctagaaaaggtagaagacgtcatcaagaggaaaatgatgcctctaagcttgggactgcatcttccccactcttaatcctccttctataggaaggaatcttcacgagcacaggatccctcacttctgtctgctgcctcacctatcccatcccataaaaggaggtggatgctcatcttttcagtctttctggtgactttgcaaaaataaattgaacacatt

SEQ ID NO: 5454 - protein, 35 aa, Homo sapiens [sequence omitted]

SEQ ID NO: 5455 - DNA, 338 bp, Homo sapiens
atagaaaaaattttttaagttatatgtgttatttgtaggagagaagtatggctacctttcacttccaaagccaatgaagaataatgcaaacctgaaatcattaaagccagacaagcctgactctgaggagcaagccaagatagcaaagcttggacttaagctgggtttgctcacctctgacgctgactgcgaaattgagaagtgggaagatcaggagaatgagattgttcaatatggacggaacatgtccagtatggcctattctctgtatttatttactaggtaaatgtagttgtatttttattttttaaatcagtataatgatatctggtgtaaag

SEQ ID NO: 5456 - protein, 70 aa, Homo sapiens
MKNNANLKSLKPDKPDSEEQAKIAKLGLKLGLLTSDADCEIEKWEDQENEIVQYGRNMSSMAYSLYLFTR

SEQ ID NO: 5457 - DNA, 793 bp, Homo sapiens
ggttggcgcgagtgtcctgtcgccgccgcctcgggcgggtgggctgactggcggcaggctcgccgcggcgcggagtcccggctgcgggatagaccgagggccatggccgcctctcccggacccgccggcgttggcggcgccggagcagtctacggctccggctcttcgggcttcgccctcgactcgggactggagatcaaaactcgctcggtggagcagacgctactcccgctggtttctcagatcaccacgcttattaatcataaagataataccaaaaagtctgataaaactctgcaagcaattcagcgtgtaggacaagctgtcaacttggcagttggaagatttgttaaagtaggagaagctatagccaatgaaaactgggatttgaaagaagaaataaatattgcttgtattgaagctaaacaagcaggagaaacaattgcagcacttacagacataaccaacttgaaccatctggaatctgatgggcagatcacaatttttacagacaaaacaggagtgataaaggctgcaagattacttctttcttcagtgacaaaagtgttgttgctggcagaccgagtagtcattaaacagataataacatcaagaaataagagactaacaatatataacttaagacacagttaaatcagtggaaatgataattatccacaactacaaaatttctgtactcagagtccctaaatgttactgaataatctcaaaacttacagaacagatttaaactcttccagtccagaagttaatctctcagatgatggtcatg

SEQ ID NO: 5458 - protein, 183 aa, Homo sapiens
MAASPGPAGVGGAGAVYGSGSSGFALDSGLEIKTRSVEQTLLPLVSQITTLINHKDNTKKSDKTLQAIQRVGQAVNLAVGRFVKVGEAIANENWDLKEEINIACIEAKQAGETIAALTDITNLNHLESDGQITIFTDKTGVIKAARLLLSSVTKVLLLADRVVIKQIITSRNKRLTIYNLRHS

SEQ ID NO: 5459 - DNA, 7989 bp, Homo sapiens
accacatgattcattcaacactagtaattttatttcaaaatataaatatttcacattaataaagaagttacatcagtaggttgtcaaagcaagttagctaagaaacagcatttgtgtgagaacagagggtatttattgtattcgaatattcttttttacttttgaattgcctccttcacctgagaacccagggatgatacattttcaaagagttatgtaagcaattacaactctatatcaaatcttagttcaaaatcaaattgtactggaaatacacttcagttacctaaataagtggcactgcaaagggcaaagaagggttttctttgggatggctacaatgagagttacatctgctgggtctctgcaataaaaaataaatgatatttgataataagccaaaattatcaggatttgcttccatacttttcactgtaaaataaaaagctagcaaaaagctagtaagaaaccagatgtctagtaaagaactctggacttggagtcagaagttctgcaactaaattctggctccatcattttgtggtataaacttaggggaatatcaccaaaaacttttcagagcctccagagcccccccatctgtacaataaggataatattgtctgtctcacagggctgttacaaaaggtgtctgaaaactataaagtgccatacaaaagcattattaaaatgtaatatcaatatatcaccactgtatttgcacattagttgatccttgaaaaacctgcaaaattaaacacaatactgattttacacaccacaggtggaaaagaatctctataccttaagtatagctctaaacagcaaatatacttgctttctggacttcaagatttattacacactacatggtaccacagtaatagatctgccattcagtatttccattagggatgtcttctcaaagagttgtaaacttgatcaagggccatgtttctcaaaggaccctgtagtcctttgagatgctctgaggaataaagaaggggagtgcagtctaaggtcaaacagtgtttgtccccttttataaattcacaatgtgtaatagcatgttcaaaactcttagaagtcctacagtaaggaaacaaactcagcattccttcattttaattgaccatgcaatcccccacccccaacacacacacactttttttcttacatctattaacatctcttggaactactgctatatggaacacattttgccaaaagctgctcaaccatgaagaaaaggaaagagaagtagaacaacggactgacagaaaaaaaagaactctattctattctgaattctgttactaactggctgtatgtgtatgtcagacaagccacttaaacctatgaatttgggtctttctctagaaagtgacaggaccacctaattttagaagtcccattctagcacagaatttctgactctagtagacagaacaacttgatttataattctcttaaactatcaaaaataaccaaacagtggctgcagacagcatgtgtgtttttttttttttttttttttgcaggttcccaataatcggtaagttaataaaatgaatatattttgatggcagaatgttgaaagacaagaaactaataaaaagtacttgtttttagctggaactagcatttggaagtaatgctagccagaggctatttccactgtgaaatgcacactcaaagtcctattgtaatattattttaagggtcttaggaggcccctcagaggagactgcaaggtcagggctagagtatgagaagtcctaagggtttttgtattttgtttttttttcctataaaccctgaggttgaaagctctggatagctcacctaaattactttcctctaatctaacccctcacagcctgaatttctgagtattgcttgaccagtagtgacacattcctgaggcactaatataacccaaatggaaactacaggtcctaggaaatccagataggtcacaatgggttcatgtgaagatcaaggtgagccagaagatctcatctgcaagccatttagcagccctttaactgtaaaaagcagttccactttcaaaggctacagagtttgtttacatacaaggtctccatgtaacatgttggatttcttcccactgtcatgggccaacccacactagactcagaagtcaagggaaagctctgccagctaaacacttcttatcaaagagggtgtgaagaaaccttgcaattttaacaataactaagaccagcatgtaaggtggtcttacagagatcacttgcaggaacagatattgataggaacttcagaactcaaacagcactcacataacatggaatttatgctgaaaatcccatgccttctctctcagaaaagagaggagcatacctgtgtggagagcttgtattttctcccctcccatccattcggtttacaactgaatagcgaatgtgaacttgaaactaatctttaataaatctataaaatgcaagatattatgaccaagttctgtactccgtttttactgaaatgacttctacttcatcaacgtacggtctgttcctgaagaaacttcctctttctgggtcaaattctgactgagaatgtaaaggtaggttatctttgagacttgagcttaaaactcctaccttttcataccacttgatctctgttgccctgtgaaaattctgtaaaccttcctcattgcatctgaggaatcatgctggaatgcttctttctggctcggagggttccaagacctccccagctagtggaccttcctagtccttatgccgttgctgtagcaatggggcaggtcaagtttcctgatcatagctgtgaagcactctggggcacctctgctcctggtatttcagggtgatattacatcactgctgctaattttggtagctctaaagtattctcttaaagacctctaagaacctgatatttatgctaataattacccagcaagaaacattagctgtagttttttgcaatatcactttatacagctaaaatcactttgtatatgtatagtaactcattgtatatatttgtctcttatgaatatgtgctaattacatctataaatcaaccagtatataattaacaaaaacaaatgattttttagccttttaatgcaaaaaatttaaatttagtattacatatgatctggctaagagcaagaggccttcttatgagtgatctccatcaccctgtacagtgcctggcacagaatctagagtttagccaactctcaacaaatgttttagtgaatgaatgaatgattgactaaagaaaaacatgagttacttagtgaccaaatctaatactcagtggaatagctgattataatcgctaaaatattcataatagaaataaagagatctgtatgcagtctactccatatagtcaaaagatctcatggtagccttttctaaatgaaatttttcttaagtagtgtaagaataaatttaaactaattataattatcagtgacttcttagggagatgttttaggaaaaattattaatatttctacctttaaatactttccaaaaaggaaatcttcaacgcttaagaactaccccccaacacttttttttttccttgggacagtgtctcactctctcacccaggctggagtgcagtggcgccatcttggctcactgcagcctcgacctcctggactcaggtgatcctcatacatcagcctcctgagtagctcagactatagccacaccaccgtgcccagctaatttttttttttttttttttttttttgtagagatggggttttgccatgttgcctaggctgatctcaaatccctgggctcaagcaatccacccacctcagccttccaaagtgctgggattacagatgtgagccaccacctacagcctggccaagaacccttttctctcccacattcccctgggagcagaggataggcctgatgattgttttaaacagtagaaagggttcagctaagaactacagtccactctcagccctgtcatgtactataggacaagtcttcattcacaacaaatggatagcaacaccaatctcgtaacactgggaaaactgcatacaatatttagaaggaacactaatacagcagaatctgcacacaacggagtcaaagatctgaggccaaatcctactacactttacgactttgagttggtcacttttctgaaccttagcttctccatcagtgtaaaactgatgtaaaataatataaagctatatgaaagctgatgtgatgtacttgtgaaatagtatgtgcaaaaggactttgtaaaatgtaaagcactatgctggttattgtgatatctgagatatttttaaagttgcaattcaattcaacaagcattcatttagagtcatgtgcaaggcactgtgctaagagatgggaaaatactacataaatacaaaattctgctgaaaactaacttattggcagagttccaaataatgaaacggatacatttaacaaatcagagtattgctacacctgagatttttcacttcaaccacctggaaggagaaaacctaataacagcatgaattttatcatactgttaccattcatagcagcttaataagtatttcacttcaacgtggtcagccaagttttataatttggcaatagtgtaaagaagcgtgaagagaaaaggaagaggaggaagagcttcagtctttgtatctcccagggttataatataaaactgaacatcaaataagccaccccacccttatacttatgatttattatttcttaaagagcgtataatacattgtgggagaagggtagaagattcatttttcctgctcactcaactacacactcaaaagtgaaagccctcttccttgaaaagtgactgtcttagaaaagtttaacaatacatttcttaaaccaggaaaaaattacaccatctattcttttaacagcaggtagtttagagttcttaaaataactttataaatatataatatagtaacatagataaccaaagtggaaaaatttcaagccagggtaccagtgtataaaatgaaacttttcaagccatcttaacaacagttaagtgagcaaaccaccaactctgaactctcaagctgtgttttaaaatacaaagcagcccgcagcaagttctctcttgtccaggcattctgtatgtaaggccaggaggcttctgcttctttcctgggttttgcttgctaggcacagctggaagggcagagggccacagctgagctgaactcgctgtcaaatttgaacttcctagaaaaatcactgcagaggaaaccacatcaacctactgaagatttcagatcttcagaaatgtcacggaaagtccgctgaggctgagcaggccatggggtctggtttggcgtgggaactgaattcgtgggactcactagcatggcactatagatattggaagcaaccacaagtatgcagagaagaataggaccgatgattgctccttccaggcctaggtagtatgctccaccggccactgccaagcctgtcaggtaaggatggccacctcctgatatgtcagagtagattgcagtatctacaaagtatgttggcaagagatgaaaaatcaacagtaaaatggccttgcatcctaacccttgtgtcagccacaggtcaagaactgcaggtactgctgcccagtatgtccccaggaatggcactgctccaaggattgctgctaatgctgatggtatgaagacaatattgatgccaaacatagtatgagtcagccaggtatacaatccatagaagccagccattttgagggaagcatcaaacacccctctgatagcttcttccacagactggccaataatattagaagaaggacctggctgagatagtggagtcaggcttatcacccacttcactggcttgtagtactcatcactggaacttaatagataaaatagtgtggtcaggaaaattatcagagagagtacaaaattgagaagggctgtcccgctgtagaagaggatggtcaagagtgtagtgacagtggtgaacagcaggctcacattccggctcataacgatccacagagactccaagatcgaaagaaatgtctcaatgttctcgtgaacaaaggaaacaatatcctgccagtccagaatgtctcccagccagctattctgacgactgacatgcaacttctgtcctttgtgccttccagagtgtgttacattctttacaaaccaagagtgatacagtctgtcccaaagttctagtacttgcttttcaattacagcagtattgttcaccttatctcctagaattttatggagcttgtgagttatccattctcgtccatactgatacacgttgttagccgcagaattcagggctctttggactacctgagcctcaggaagccaatttgcccactcagggtgatttgctagagtttcattaatcaaattacttgtgacttcaatcatgtgtacactctcttgatgtacctttgcagtcaggagtagggctaaaagaagagttcctatcactaacaaaaatatgatgaaaatgctaattattttatctaacatcttctccaaccagatgatcatcttcttatttagccagtgccagagcttgctatcaacttttaacaagaattttccaagcccgacaatgggccaaggcgcgagagctccctgccgctccttcaggaagctttctataatgccccaccacacatggtagcgtttctctaggaaatccacaactccaaagtgaatgacaagctttttgagtatccagactgcaatcggcactggcagcaactgcacaatccacaggttcaaccagatctgcatgacgacaatggcccaaactagagacacaaagtagatgtcactagttttcttctttctaagaaacgttcctatttcaggccttcgtctgcccagagtaggtgaaggggaagtgggtgaaggggaggagggtgaaggggaggtggacaacgttggagcggattctcccctgtccactgcttctgcaggctgagtggagggctggtcttcactgcttgattcataccctgtgatagagatggccaagtttgccagagtagaagctgccatggagataacctgccctggtaactctgccccagaagactcttttccattctgtttttcatagagggtacccacagacatcaggaaaacaataaccaggaatactggaattctccatgagccagccagggatgctaaatgaaaaagcaatataatccagacaggaattgaaactgctctcaagtagcgttcagtgcttgcattccacttgaatgaaacagtcaacacatagccaaccaccaacgtccagatccacaggctgctgaagtagtccagcccgcggcagatgagcgtggcagcgtgcaccagcagcacctgcacgcccaagtagctgccgaggcagtagaggccgtacaggagcgggccgccggcgccgagcagcaggagcaggcggcggcggcgcagcgcctgctcgcccagggcctcgacgccgtagtcgacgaagcagagcggcaggagcagcgcggccaggacgatgggcgtgtgcgcgcggtgcaggcgctgcagccagtggcggcccaggcgcgtcagcgagctcttgaaggggtgcagaaaagtgccgcatagcacggcccagagcagcggccgcaggaaggcctccaggatgaagtagaccagcaccgcggcgccgcagcacaggcacacgaacagcacggccccggtgttgtagaaggcctgcttaatgggcttgtcgaagcgcagcgccagcgccgcggtccgcggggtctccccgccaccgccactcggcccgaccgcgcgcgggacccgcggcgccggcccgggagagctccgcaggcttggcgcgtccttagggccgccgccgtcggccatcgttcctccgccacagccgcccccgaggggcg

SEQ ID NO: 5460 - protein, 77 aa, Homo sapiens
MLHRPLPSLSGKDGHLLICQSRLQYLQSMLARDEKSTVKWPCILTLVSATGQELQVLLPSMSPGMALLQGLLLMLMV

SEQ ID NO: 5461 - DNA, 3283 bp, Homo sapiens
tttttttttttttttttttgtagagatggggttttgccatgttgcctaggctgatctcaaatccctgggctcaagcaatccacccacctcagccttccaaagtgctgggattacagatgtgagccaccacctacagcctggccaagaacccttttctctcccacattcccctgggagcagaggataggcctgatgattgttttaaacagtagaaagggttcagctaagaactacagtccactctcagccctgtcatgtactataggacaagtcttcattcacaacaaatggatagcaacaccaatctcgtaacactgggaaaactgcatacaatatttagaaggaacactaatacagcagaatctgcacacaacggagtcaaagatctgaggccaaatcctactacactttacgactttgagttggtcacttttctgaaccttagcttctccatcagtgtaaaactgatgtaaaataatataaagctatatgaaagctgatgtgatgtacttgtgaaatagtatgtgcaaaaggactttgtaaaatgtaaagcactatgctggttattgtgatatctgagatatttttaaagttgcaattcaattcaacaagcattcatttagagtcatgtgcaaggcactgtgctaagagatgggaaaatactacataaatacaaaattctgctgaaaactaacttattggcagagttccaaataatgaaacggatacatttaacaaatcagagtattgctacacctgagatttttcacttcaaccacctggaaggagaaaacctaataacagcatgaattttatcatactgttaccattcatagcagcttaataagtatttcacttcaacgtggtcagccaagttttataatttggcaatagtgtaaagaagcgtgaagagaaaaggaagaggaggaagagcttcagtctttgtatctcccagggttataatataaaactgaacatcaaataagccaccccacccttatacttatgatttattatttcttaaagagcgtataatacattgtgggagaagggtagaagattcatttttcctgctcactcaactacacactcaaaagtgaaagccctcttccttgaaaagtgactgtcttagaaaagtttaacaatacatttcttaaaccaggaaaaaattacaccatctattcttttaacagcaggtagtttagagttcttaaaataactttataaatatataatatagtaacatagataaccaaagtggaaaaatttcaagccagggtaccagtgtataaaatgaaacttttcaagccatcttaacaacagttaagtgagcaaaccaccaactctgaactctcaagctgtgttttaaaatacaaagcagcccgcagcaagttctctcttgtccaggcattctgtatgtaaggccaggaggcttctgcttctttcctgggttttgcttgctaggcacagctggaagggcagagggccacagctgagctgaactcgctgtcaaatttgaacttcctagaaaaatcactgcagaggaaaccacatcaacctactgaagatttcagatcttcagaaatgtcacggaaagtccgctgaggctgagcaggccatggggtctggtttggcgtgggaactgaattcgtgggactcactagcatggcactatagatattggaagcaaccacaagtatgcagagaagaataggaccgatgattgctccttccaggcctaggtagtatgctccaccggccactgccaagcctgtcaggtaaggatggccacctcctgatatgtcagagtagattgcagtatctacaaagtatgttggcaagagatgaaaaatcaacagtaaaatggccttgcatcctaacccttgtgtcagccacaggtcaagaactgcaggtactgctgcccagtatgtccccaggaatggcactgctccaaggattgctgctaatgctgatggtatgaagacaatattgatgccaaacatagtatgagtcagccaggtatacaatccatagaagccagccattttgagggaagcatcaaacacccctctggaatgcccaaagataaaaagaaagagtaaataaacagtgtcatatcgtgattcagaaaaatcacgtgaccacttgattccaaatcatgtaatagcttcagtttttctgctggcctgagaatgctattttcattttatttcaaagaaacataaacaccttactttaaatacatttactaagttattctttatgtaatatgaaatatgttttatttggaaatatgtttactattccttaaatttctgatgaaaaaataactgaaacaccttaaaataccctattctctgaaataattcatcaacttttcactctgaagcagatatttcaccaccaaaacaaatggaaagaaaattaagcgtgaataacatgtttccaagaatacagtttaaactctaagaaacccaggctgtggccagtcctccccttttggaaagagccaataagggatagtgtaacttgtatttcaccatctttctttgccttaacaaaatcttcctatgtttcttaaactatgtaactaagcctacaaagtaacatctcttacaaatgctatcaaagaaagtaggtcattgggagagaatttgtgggaaaaaaaatattcctaactccaaagtaaaatcagagaggaaaatacaagagagataaaaacagacacatatatttggtgactaatataggaattcaatacatgaaaatctgcaatgtcaggtgctctgtgtttttcagttggaagattagtaaggcagtgcagcactataaggaggggaaataaggaactgttcagagagcacaaaggtggcaacccgtaagtaatctcaaggcagcacaaaatcataaaaacctggactctatggggtggtgcagaggggtgcagggaaagcaccttcatatggtcactacagaagaaaagctgtagttgaaaaagaagacgttagcggcaaacgtgaccttgtacatgcaaaaagaaacaccaagcttttctaaagcatcccaagaggtatactgttaggagcaaagtgaagccctgtaatctagtgatttagtcatttagtagtgttctgggacatggatccaggggcagagtggctccccaattgtaaaacctgctttgtcatccggaccaatggctttcactagagaacgtcttaaaggagccatatgactctgcaacaagaacccagaataaagtggtatcaaaaataccaaaagg

SEQ ID NO: 5462 - protein, 77 aa, Homo sapiens; identical to SEQ ID NO: 5460

SEQ ID NO: 5463 - DNA, 553 bp, Homo sapiens
catgccttgtaaacaatactattttcaatgaaaatttcatttgtgggaacacaaaaggctatttcactgaaaattcctactaccagttcttttgtatacccccaggagaaaaaaatcctcctttaaaaaaaaaaaaacggaaatgcctggatgattcactaataagaaattctgtggcttacttaccctgatatgtcagagtagattgcagtatctacaaagtatgttggcaagagatgaaaaatcaacagtaaaatggccttgcatcctaacccttgtgtcagccacaggtcaagaactgcaggtactgctgcccagtatgtccccaggaatggcactgctccaaggattgctgctaatgctgatggtatgaagacaatattgatgccaaacatagtatgagtcagccaggtatacaatccatagaagccagccattttgagggaagcatcaaacacccctctggaatgcccaaagataaaaagaaagagtaaataaacagtgtcatatcgtgattcagaaaaatcacgtgaccacttgattccaaatcatg

SEQ ID NO: 5464 - protein, 49 aa, Homo sapiens
MLARDEKSTVKWPCILTLVSATGQELQVLLPSMSPGMALLQGLLLMLMV

SEQ ID NO: 5465 - DNA, 866 bp, Homo sapiens
ttcatctcataaacttaagtttccaaggtaaattaccttaaaaatgtgtcttttactttctcattgtgatgcttcgaaaactgctaaattcattttagtgggctaataatggaactagttttgaaatacacgtttactatttgcctatgtaattgaaacaaccccttgttatttttttagttagcattagagtaagcatccacaatcactaggcattgtcaaggacacaaaaccatgtattactgtatgaaaatattgaattaatatttactactaccatagcctccagatgatctattgtgatgctgtcattgtatgtttctgtgtttcaccactgttttggagggtgagaatggaagaattccacgtaagcagctcatcccctgtgcccttcagcagctcggccgttcccctcatgctggaaatctaatgtcagccaggttgctatatgacaccctgtggagctgggtttccagggcagattaatcaagaaagggaagatgtgacctctcaagggaggttggggctgggaaggggtgggtagagagagatttgttaaaggatacaaaaattacttagaaggcataagttctaatgttctacagcactgtagaatgactgtagttcaacaataaattatatcatttcaagtagctagaaggaagatacagaatgctcccaacatggagaaaccccatctccactaaaaatacaaaaattagctgggcttggtggcatgcacctgtagtcctagctactcgggaggctcaggtgggagaatctcttgaacccaggtggtggaggttgcagtgagctgtggtcatgccactgtactgcagcctgggcgacagtgagactctatctca

SEQ ID NO: 5466 - protein, 46 aa, Homo sapiens
MLPTWRNPISTKNTKISWAWWHAPVVLATREAQVGESLEPRWWRLQ

SEQ ID NO: 5467 - DNA, 390 bp, Homo sapiens
gttagccgcagaattcagggctctttggactacctgagcctcaggaagccaaccacaggctgctgaagtagtccagcccgcggcagatgagcgtggcagcgtgcaccagcagcacctgcacgcccaagtagctgccgaggcagtagaggccgtacaggagcgggccgccggcgccgagcagcaggagcaggcggcggcggcgcagcgcctgctcgcccagggcctcgacgccgtagtcgacgaagcagagcggcaggagcagcgcggccaggacgatgggcgtgtgcgcgcggtgcaggcgctgcagccagtggcggcccaggcgcgtcagcgagctcttgaaggggtgcagaaaagtgccgcatagcacggcccagagcagcggccgca

SEQ ID NO: 5468 - protein, 37 aa, Homo sapiens
MGVCARCRRCSQWRPRRVSELLKGCRKVPHSTAQSSG

SEQ ID NO: 5469 - DNA, 2099 bp, Homo sapiens
atgcgcagaccgaggcagggaggcgggggtgcgggaggctccgcggctgcgcgggcgcgtgctggtggcctcggcggaggctcagtcccggcccgcgcccgcggcgcccccgctgcggcccgagcggcctggctgcgggatctgtgcgcacggatggcgcggccgccccggcagcacccgggggtctgggcgtcgctgctcctgctgctactgacggggcccgccgcctgcgcagccagccccgcggacgacggtgcgggcccggggggccggggaccccggggacgcgcgcggggggacacgggcgccgacgaggcggtgccgcgccacgactcctcctacggcaccttcgcgggggagttctacgacctgcgctacctgtcggaggagggttaccccttccctactgctcctcctgtggatccatttgccaaaatcaaagtggacgactgtggaaaaactaagggatgctttagatatggcaaaccaggctgtaatgcagagacctgtgactatttcctcagctaccggatgataggggctgatgtagaatttgagctgagtgcagacacagatggttgggtagcagttggattctcttcagacaagaaaatgggtggtgatgatgtcatggcctgcgtccatgatgacaatggcagggtccgcatacagcacttctataatgtaggccagtgggcaaaggagattcagagaaaccctgccagagatgaagaaggagtttttgagaacaatcgcgtcacctgcagatttaaacgccctgtgaatgttcccagagatgaaacaattgttgatctgcatttgagttggtattatctgtttgcttggggtccagccattcagggctctatcactcgacatgatatagactcaccgccggcttcagagcgtgttgtcagtatttacaagtatgaagacatttttatgccatcagctgcctatcaaaccttctcatctccattttgtttgcttctgattgttgctctgaccttctacctattgatgggaaccccctaaccacagctgcagggccaacagattacatggattgggaagtctttagtataaatatattttttaaagaatatccagtataattttagcttcaattatttaagaaaaaaaacctcatataatttcagctttttggaagaaagaacaagcttcttttgtagtcaaagaagattgtttaataatgaccctatacttttggaacatacttacaccttttctaagcactttcacatatgttttcttatttaacttcacaacatctctgagttggattgatgaaaattgtgattgccatcttcctgaatgggatttgagacccaaaaagactgcctttttatgatccacataccatataactttggctagaaatgacaaatagaaaggcagagaaggaactaagtatagaaatcatgtctcaaaacagtctttactatgagtgctatagcacagagagttattttgaatattactagggagaactttactgaatgtcataagttcacagtcagccttttgggcagaagaaatttcaaatttccgtaaagcagaagtgcttttggatatttacacagccaatggggagattggaggaaaatacaatgatatgaaaatagttcatatttatttgaaattttggccgagcatggtggctcacgcctgtgatcccagcactttaggaggccaagacgggcaggtcacctgaggtcaggagttcgagaccagcctggccaatgtggtgaaacccccgtctctattaaaaagtacaaaaatgagccaggcgtggtggtgcacacctataatcccagctattcgggaggctgaggcaggagaattgctggaacccaggaggcggaggttgcagtgagccgagattgtgccagtgcactccagcctaggtgacagagccagactctgtctcaaaaataactaactaaataaataatatttatttgaaatttcttctcagttagagagcagctatgggaaaacatttttactgctatttgcaaaggttggagaccaaactgtgagcattcctgaagatgtaaagttgtgttaatgatatt

SEQ ID NO: 5470 - protein, 344 aa, Homo sapiens
MRRPRQGGGGAGGSAAARARAGGLGGGSVPARARGAPAAARAAWLRDLCARMARPPRQHPGVWASLLLLLLTGPAACAASPADDGAGPGGRGPRGRARGDTGADEAVPRHDSSYGTFAGEFYDLRYLSEEGYPFPTAPPVDPFAKIKVDDCGKTKGCFRYGKPGCNAETCDYFLSYRMIGADVEFELSADTDGWVAVGFSSDKKMGGDDVMACVHDDNGRVRIQHFYNVGQWAKEIQRNPARDEEGVFENNRVTCRFKRPVNVPRDETIVDLHLSWYYLFAWGPAIQGSITRHDIDSPPASERVVSIYKYEDIFMPSAAYQTFSSPFCLLLIVALTFYLLMGTP

SEQ ID NO: 5471 - DNA, 2198 bp, Homo sapiens
atgcgcagaccgaggcagggaggcgggggtgcgggaggctccgcggctgcgcgggcgcgtgctggtggcctcggcggaggctcagtcccggcccgcgcccgcggcgcccccgctgcggcccgagcggcctggctgcgggatctgtgcgcacggatggcgcggccgccccggcagcacccgggggtctgggcgtcgctgctcctgctgctactgacggggcccgccgcctgcgcagccagccccgcggacgacggtgcgggcccggggggccggggaccccggggacgcgcgcggggggacacgggcgccgacgaggcggtgccgcgccacgactcctcctacggcaccttcgcgggggagttctacgacctgcgctacctgtcggaggagggttaccccttccctactgctcctcctgtggatccatttgccaaaatcaaagtggacgactgtggaaaaactaagggatgctttagctgtaccaccattgctccaggtgtctcctactcaccaattgctgatatgcagaagactcatgtgacacagaacgtgtctgtgcttattcagcaggggctatatggcaaaccaggctgtaatgcagagacctgtgactatttcctcagctaccggatgataggggctgatgtagaatttgagctgagtgcagacacagatggttgggtagcagttggattctcttcagacaagaaaatgggtggtgatgatgtcatggcctgcgtccatgatgacaatggcagggtccgcatacagcacttctataatgtaggccagtgggcaaaggagattcagagaaaccctgccagagatgaagaaggagtttttgagaacaatcgcgtcacctgcagatttaaacgccctgtgaatgttcccagagatgaaacaattgttgatctgcatttgagttggtattatctgtttgcttggggtccagccattcagggctctatcactcgacatgatatagactcaccgccggcttcagagcgtgttgtcagtatttacaagtatgaagacatttttatgccatcagctgcctatcaaaccttctcatctccattttgtttgcttctgattgttgctctgaccttctacctattgatgggaaccccctaaccacagctgcagggccaacagattacatggattgggaagtctttagtataaatatattttttaaagaatatccagtataattttagcttcaattatttaagaaaaaaaacctcatataatttcagctttttggaagaaagaacaagcttcttttgtagtcaaagaagattgtttaataatgaccctatacttttggaacatacttacaccttttctaagcactttcacatatgttttcttatttaacttcacaacatctctgagttggattgatgaaaattgtgattgccatcttcctgaatgggatttgagacccaaaaagactgcctttttatgatccacataccatataactttggctagaaatgacaaatagaaaggcagagaaggaactaagtatagaaatcatgtctcaaaacagtctttactatgagtgctatagcacagagagttattttgaatattactagggagaactttactgaatgtcataagttcacagtcagccttttgggcagaagaaatttcaaatttccgtaaagcagaagtgcttttggatatttacacagccaatggggagattggaggaaaatacaatgatatgaaaatagttcatatttatttgaaattttggccgagcatggtggctcacgcctgtgatcccagcactttaggaggccaagacgggcaggtcacctgaggtcaggagttcgagaccagcctggccaatgtggtgaaacccccgtctctattaaaaagtacaaaaatgagccaggcgtggtggtgcacacctataatcccagctattcgggaggctgaggcaggagaattgctggaacccaggaggcggaggttgcagtgagccgagattgtgccagtgcactccagcctaggtgacagagccagactctgtctcaaaaataactaactaaataaataatatttatttgaaatttcttctcagttagagagcagctatgggaaaacatttttactgctatttgcaaaggttggagaccaaactgtgagcattcctgaagatgtaaagttgtgttaatgatatt

SEQ ID NO: 5472 - protein, 377 aa, Homo sapiens
MRRPRQGGGGAGGSAAARARAGGLGGGSVPARARGAPAAARAAWLRDLCARMARPPRQHPGVWASLLLLLLTGPAACAASPADDGAGPGGRGPRGRARGDTGADEAVPRHDSSYGTFAGEFYDLRYLSEEGYPFPTAPPVDPFAKIKVDDCGKTKGCFSCTTIAPGVSYSPIADMQKTHVTQNVSVLIQQGLYGKPGCNAETCDYFLSYRMIGADVEFELSADTDGWVAVGFSSDKKMGGDDVMACVHDDNGRVRIQHFYNVGQWAKEIQRNPARDEEGVFENNRVTCRFKRPVNVPRDETIVDLHLSWYYLFAWGPAIQGSITRHDIDSPPASERVVSIYKYEDIFMPSAAYQTFSSPFCLLLIVALTFYLLMGTP

SEQ ID NO: 5473 - DNA, 5577 bp, Homo sapiens
caggccgccggcccgggagagcgcgcggcggcggcggcggcgggacggccccgagcgcgccctcccgcctgcggccactcgcagccggcgctggccgggccggcgcgccccgcaggcggctagagcgcggcctcggcctcggcgcgggcttgccccgggccgtagcccgcgagaggcggcgcgggcggccgagggcactgacggcgtcgcgggacgctcccgggcggcggcgcagcggcagcggcagcggcagcggcagcgcagggggcggaggcagggggcgcccccagccaggatgctgcggttcctgcgccggacctttggccgccgctccatgcagcgctacgcgcggggcgcggcggggcgcggggccgccgggctgggggacgagcgcgatggggggccacgggggggcccggccgccgccgcctcctcctcggcgctgcccgccgcgcccgggggcagcgtgttcccggcgggcggcgggcccctgctcaccggcggcgcggccgtgcacatctccgccgccggcgccgccaaggccaccctctactgccgcgtcttcctgctcgacgggaccgaagtgagcgtggacctgccgaaacatgccaaaggccaggatttgtttgatcagattgtgtaccacttggaccttgtggaaacagattactttggcctccagttcctcgactctgcccaggttgcgcactggctggatcatgccaaacccataaaaaagcagatgaaaattggacctgcttatgctttacactttcgagttaaatactattcttcagaaccaaacaaccttcgtgaggagtttacaaggtacctgtttgttttacaactcaggcatgacattctttctggaaaattgaaatgcccttatgaaacagctgtggaattagctgctctctgtctacaagcggagcttggggagtgcgagcttccagaacacacaccagagcttgtgtctgagtttcggttcattccaaatcagacagaagcaatggaatttgatatcttccagagatggaaagagtgcaggggaaagagccctgcccaggcggaactctcctatctgaataaagcgaagtggctggaaatgtatggggtagacatgcacgttgtcaggggaagagatggctgtgaatattctcttggactgaccccgacaggcatattaatctttgaaggagctaacaaaataggcttattcttttggcctaaaattaccaaaatggattttaaaaagagcaaattgacactcgtggtggtcgaggatgatgatcagggacgtgagcaagagcacacgtttgtgttccggttagacagtgccaggacctgcaaacacctttggaagtgtgcagttgagcaccacgcattcttccgactgcggacgccaggaaacagcaaatccaatagatccgactttatcaggctgggctctcgcttcagattcagtgggcggacagaatatcaagctacacatggctccaggttacgaagaaccagcacctttgagaggaagcctagtaaacgttatccatcccggagacattcaacgttcaaagcaagcaacccagtgatagcagcccagctctgctctaaaacaaatccagaagtccataattaccagcctcaatatcatcctaatatccatcccagccagccccggtggcatcctcactctccaaatgtcagctacccgctcccttccccagtgcttagcagctcggaccggttgccttttggcattgaggagaatgggggcacaccgttcctcaccgcagcttcaggaaggcatcaccaccagcaccagcatcagcatcagcaccagcaccactcaaactacagcctctcactgaccctggagaacaaagaggggcctctgaggtccccaaactccagcagcaagtcccttacaaaactgagtccaggaacacctgccttgttcagtgaagccgctgcccatctaaagaagctggaactggaaactgtgaaggctgctggaccctggcctcctctgcacatcaacataaacaaggctgaagaaaagaaagtctcggagaaaactcttcagactccacttttgccttcccctgttgcggatcatgtgaagtgtaacattctgaaagcccagttggaaaatgcttcccgagtgaacatccagggtggaaaggaggaatcaccgtttgtaaatatcaataagaaatccagtcttcaggacgctagtgtaagaagtcctattcctattcgtgtggaaactgcccagccagctgtggaaaagccggaaatcaagcctccccgagtgaggaagttaacaagacagtatagttttgatgaagacgacctccctccagacctggccgaggcagtgggagtgaccacatctacaaccacaaacaccacaacggccgccacacaagtctccgtgccgctgccgtcccccaaggtccagaatgtcagctcgcctcacaagtcagaaggcaaaggcctgctgtcccctggggccaagagcccctctgaccgaggaggtgcctttaccctggagccgggtgatcttctgatggatttcacagaagccactcctctggcagagcccgccagcaacccccactgtgcccactctcgctgttctcctccactctctctccccatgaaggaagagaccactggagtttgcatgtaccctccaatcaaaacgaggctgataaaaacattcccggttgatacaatgaacccgtttcctgatactttcaccacagggccacagtttactgcagacttcagagacagtaaattacagtgctgtcctggcccgacttccccgctgatcccagcagcgaccctgaggcctttgacagagaccgtctccacagtgcagaccatttacaccacccggaaacctgtttctctggcagccagtgcagagacactccggcaggaactggagagagagaagatgatgaaaagactgttgatgaccgaactgtgaaattctccccttgtcacctggaagatggcatggtgccttctgtccgtcttctttcttcgggctttgtgtgctcactctagcacagcatacaagtgtgtgctctgttcgcccaggtctccatggttagttgaagccaatttctggcttgacttttatgggaaaagttattttatgtctcctaagcattagagtttttctattactctatgtagttgagacaggatttgataagtctaggaaaagaaagatgggaaaacgggattccttttcagaagtacctgtgtgtatctgttaataaccacaggggttaatatgatgtaggatcttttactatcaatttcaaccatttgattttgtatgattgaaacttgcaccgagctttgactgtttgttaaagagtcatttttaatgaaagaataattctttattgctggtttttcatttacactgataaatacacagatcttataaagtctttaacattcatttgtattcagatgtgagtagaagaactaaaaaaagaaagttacatatcactatgactgaaggtacttcagcttaatctgaaatataatttaacttgtgaactccttggatatgatattatttggaataaacagaatttatcattgaacccaaagtaggaaatgatagcttacattgtctaaaaatccttacaaggttaagatgattcaatatcaagaagattcagaaaattatttctaaagttgatcgattcatgtcgtattgatagaatcttgaccagaagaaattttgctctttttatatagtttcaagaaatgtgtttttaaatttttattaatgcacttgaacaactttgcaggaataaagcaaccccctaaccacaaaatatccctctaaattagttccctagctttctcaatgaatacacacatatttttacatagctatgatcgttgtgtacattctcctttgttttacttctcggcctaacacttgtctcctcttgtcaacacagattctactctcaccaatttaaatgtctttatatccatgtaacatgggtaacctcacttcaccccattattagatatttgagttatatctaatttttcactcttataaatagtgctgctatgaatgtctgtaaaaaaaaaaaactgctccttcttttggattattcccttaggaatatctccaaagagggattacaaggtcaaagagcatgaagtattttatagctcttgttttatattgccagattgctttctagaaagatccaatctttgggttggaaggaccttaaaggtcatctagtttagcctccccaccccctctgaatgcttgaatcccctcgacaatttatgatgccaccagcaatgtataagcatttctgtttaccaatagctctgccagtattgggttttgccatttttatttatttttgctagtttaataggtatgtatagttgttcttgaagagttgttttatttcattaattgctagcaaggctgagcacttttccatgtgatgatttactagttgtatttccttgtgtgtaaaatgttcattcatttcttatgaccacttgttaagaggaactgatctcatatatttgtatcagaactgtatttttatgttatattgtatagtttgctctcctgcccctctccttaaaactgaatggtgccaataatttgatactaatgactacaaaaaaaggtaatgcctcatttactagtattgttgtaaaatgaggaatgtatgtgaatattcagataaccgaggattaaccctttaagtgctgaatctttaaaattttaatatatttttttttgagggaaatctttctaaaatgtattacgcacttccctgccttagtaaacagagtatactggagagtatttaaccttttcttgatgagtcatggtcatgattataaacatcagccccttttataccttggtacggtgcagtgatatcattaagagctatcaatatgtgtagggcttggcttggccttttataggatattatgctgttctcactgatggttttttactgctctctgctctgtcagtggagctatccggggcaattgtagcgtttgggtccttttacccctatgtcccccggctatacttttaaaacagctttagctgttctttatcttgtgcacatgatacaaaatatgttcccgtacaatatggggctgtcacttcttgccaacccagcaccctcttcctcttctaacctgctttctgaggcttctgctcttcacctcctgctcgctgatggaaacctccagggcaaagctgaaggtttcttggggaagccaggaaagccagtatttcctatgtgtcagatctgcttggcttccaagaagggatgcatgggctttttggccagtgtttccaggaggctctgggcttcctgcttcttccccgcttcccccagagttcacagatgttgaagtttctgaaggttgacgtcactggaagtctgaccacaaacaagttggctgttactgtatttgaaacccagtacctttggcagctcacctctaaccagtaaaataagaggattccatggtttc

SEQ ID NO: 5474 - protein, 900 aa, Homo sapiens
MLRFLRRTFGRRSMQRYARGAAGRGAAGLGDERDGGPRGGPAAAASSSALPAAPGGSVFPAGGGPLLTGGAAVHISAAGAAKATLYCRVFLLDGTEVSVDLPKHAKGQDLFDQIVYHLDLVETDYFGLQFLDSAQVAHWLDHAKPIKKQMKIGPAYALHFRVKYYSSEPNNLREEFTRYLFVLQLRHDILSGKLKCPYETAVELAALCLQAELGECELPEHTPELVSEFRFIPNQTEAMEFDIFQRWKECRGKSPAQAELSYLNKAKWLEMYGVDMHVVRGRDGCEYSLGLTPTGILIFEGANKIGLFFWPKITKMDFKKSKLTLVVVEDDDQGREQEHTFVFRLDSARTCKHLWKCAVEHHAFFRLRTPGNSKSNRSDFIRLGSRFRFSGRTEYQATHGSRLRRTSTFERKPSKRYPSRRHSTFKASNPVIAAQLCSKTNPEVHNYQPQYHPNIHPSQPRWHPHSPNVSYPLPSPVLSSSDRLPFGIEENGGTPFLTAASGRHHHQHQHQHQHQHHSNYSLSLTLENKEGPLRSPNSSSKSLTKLSPGTPALFSEAAAHLKKLELETVKAAGPWPPLHININKAEEKKVSEKTLQTPLLPSPVADHVKCNILKAQLENASRVNIQGGKEESPFVNINKKSSLQDASVRSPIPIRVETAQPAVEKPEIKPPRVRKLTRQYSFDEDDLPPDLAEAVGVTTSTTTNTTTAATQVSVPLPSPKVQNVSSPHKSEGKGLLSPGAKSPSDRGGAFTLEPGDLLMDFTEATPLAEPASNPHCAHSRCSPPLSLPMKEETTGVCMYPPIKTRLIKTFPVDTMNPFPDTFTTGPQFTADFRDSKLQCCPGPTSPLIPAATLRPLTETVSTVQTIYTTRKPVSLAASAETLRQELEREKMMKRLLMTEL

SEQ ID NO: 5475 - DNA, 8142 bp, Homo sapiens
agaggcgggaaacgcctccgcgtcccttccaacagtaccggagagggagaggggcgtggctgagactagccccgaccacgcgcgcgcggcccctcggcaaccggcacaacacaacaaaatggctgccgcgccgctgggcccctgaggaaagagcccgaacttctcccgctctacctcagcctgcgggactgctcggctcggcttctaggcggttttgatgaacacctggctttattcttgcaatgaagaaaggttctcaacaaaaaatattctccaaagcaaagataccatcatcatctcactctcctatcccatcatctatgtccaatatgagatctaggtcactttcacctttgattggatcagagactctaccttttcattctggaggacagtggtgtgagcaagttgagattgcagatgaaaacaatatgcttttggactatcaagaccataaaggagctgattcacatgcaggagttagatatattacagaggccctcattaaaaaacttactaaacaggataatttggctttgataaaatctctgaacctttcactttctaaagacggtggcaagaaatttaagtatattgagaatttggaaaaatgtgttaaacttgaagtactgaatctcagctataatctaatagggaagattgaaaagttggacaagctgttaaaattacgtgaactcaacttatcatataacaaaatcagcaaaattgaaggcatagaaaatatgtgtaatctgcaaaagcttaaccttgcaggaaatgaaattgagcatattccagtatggttagggaagaagttaaaatctttgcgagtcctcaatttgaaaggcaacaagatatcatcgctccaagatataagcaagttgaaaccgcttcaagatttgatttctctgatcctagttgaaaatccagttgtgacccttcctcattacctccagtttaccattttccacctccgttcattggaaagtttggaaggtcagccagtaaccactcaggatagacaggaggcttttgagagattcagtttagaagaggtagaaagactggaaagagacctagaaaaaaagatgatagaaactgaagagcttaagagcaaacaaacaaggttccttgaggaaattaaaaatcaagataaattgaataaatcattaaaagaggaggccatgttacagaaacagagctgtgaggaactcaagagtgacttaaacacaaaaaatgaattgctaaaacagaagaccatagaattaacacgagcatgtcagaagcaatatgagctggaacaggaattggccttttataaaattgatgctaaatttgagccactaaattattatccatcagagtatgctgaaattgataaagccccagatgaaagcccttacattggcaaatccagatacaagagaaatatgtttgccacagagagttatattattgacagtgctcaggcagtacagatcaagaagatggagccagatgaacaacttagaaatgatcacatgaacttgagaggccacacaccactggacacgcaactggaagacaaagaaaaaaaaataagtgcagcacaaactcgactatcagaactgcatgatgaaatagaaaaggcagaacaacaaattttgagagctactgaagaatttaaacaactggaagaagctatacaactaaaaaagatttcagaagcagggaaagaccttctttacaagcagttgagtggtagactacaacttgtaaataaattacgccaggaagctctggatctagaactgcagatggaaaagcaaaagcaggaaattgccggaaagcagaaggagattaaggacctgcaaatagccatagatagcctggattccaaagacccaaaacattcccatatgaaggctcaaaagagcggtaaagaacaacagcttgacattatgaacaagcagtaccaacaacttgaaagtcgtttggatgagatactttctagaattgctaaggaaacggaagagattaaggaccttgaagaacagcttactgaaggccagatagcagcaaatgaagccctgaagaaggatttagaaggtgttatcagtgggttgcaagaatacctggggaccattaaaggccaggcaactcaggcccagaatgagtgcaggaagctgcgggatgagaaagagacattgttgcagagattgacagaagtcgagcaggagagagaccagctggaaatagttgccatggatgcagaaaatatgaggaaggagcttgcagagctagaaagtgccctccaagagcagcatgaggtgaatgcatctttgcagcagacccagggagatctcagtgcctatgaagctgagctagaggctcggctaaacctaagggatgctgaagccaaccagctcaaggaagagttggaaaaagtaacaagacttacccagttagaacaatcagcccttcaagcagaacttgagaaggaaaggcaagccctcaagaatgcccttggaaaagcccagttctcagaagaaaaggagcaagagaacagtgagctccatgcaaaacttaaacacttgcaggatgacaataatctgttaaaacagcaacttaaagatttccagaatcaccttaaccatgtggttgatggtttggttcgtccagaagaagtggcagctcgtgtggatgagctaagaagaaaactgaaattaggaactggggaaatgaacatccatagtccttcagatgtcttagggaaaagtcttgctgatttacagaaacaattcagtgaaattcttgcacgctccaagtgggaaagagatgaagcacaagttagagagagaaaactccaagaagaaatggctctgcagcaagagaaactggcaactggacaagaagagttcaggcaggcctgtgagagagccctggaagcaagaatgaattttgataagaggcaacatgaagcaagaatccagcaaatggagaatgaaattcactatttgcaagaaaatctaaaaagtatggaggaaatccaaggccttacagatctccaacttcaggaagctgatgaagagaaggagagaattctggcccaactccgagagttagagaaaaagaagaaacttgaagatgccaaatctcaggagcaagtttttggtttagataaagaactgaagaaactaaagaaagccgtggccacctctgataagctagccacagctgagctcaccattgccaaagaccagctgaagtcccttcatggaactgttatgaaaattaaccaggagcgagcagaggagttgcaggaagcagagaggttcagcagaaaggcagcacaagcagccagagatctcacccgagcagaagctgagatcgaactcctgcagaatctcctcaggcagaagggggagcagtttcgacttgagatggagaaaacaggtgtaggtactggagcaaactcacaggtcctagaaattgagaaactgaatgagacaatggaacgacaaaggacagagattgcaaggctgcagaatgtactagacctcactggaagtgacaacaaaggaggctttgaaaatgttttagaagaaattgctgaacttcgacgtgaagtttcttatcagaatgattacataagcagcatggcagatcctttcaaaagacgaggctattggtactttatgccaccaccaccatcatcaaaagtttccagccatagttcccaggccaccaaggactctggtgttggccttaagtactcagcctcaactcctgttagaaaaccacgccctgggcagcaggatgggaaggaaggcagtcaacctccccctgcctcaggatactgggtttattctcccatcaggagtgggttacataaactgtttccaagtagagatgcagacagtggaggagatagtcaggaagagagtgagctggatgaccaagaagaacccccatttgtgcctcctcctggatacatgatgtatactgtgcttcctgatggttctcctgtaccccagggcatggccctgtatgcaccacctcctcccttgccaaacaatagccgacctctcacccctggcactgttgtttatggcccacctcctgctggggcccccatggtgtatgggcctccaccccccaacttctccatccccttcatccctatgggtgtgctgcattgcaacgtccctgaacaccataacttagagaatgaagtttctagattagaagacataatgcagcatttaaaatcaaagaagcgggaagaaaggtggatgagagcatccaagcggcagtcggagaaagaaatggaagaactgcatcataatattgatgatcttttgcaagagaagaaaagcttagagtgtgaagtagaagaattacatagaactgtccagaaacgtcaacagcaaaaggacttcattgatggaaatgttgagagtcttatgactgaactagaaatagaaaaatcactcaaacatcatgaagatattgtagatgaaattgagtgcattgagaagactcttctgaaacgtcgctcagagctcagggaagctgaccgactcctggcagaggctgagagtgaactttcatgcactaaagaaaagacaaaaaatgctgttgaaaagttcactgatgccaagagaagtttattgcaaactgagtcagatgctgaggaattagaaaggagagctcaggaaactgctgttaacctcgtcaaagctgatcagcagctaagatcgctccaggctgatgcaaaggatttggagcagcacaaaatcaagcaagaagaaatcttgaaagaaataaacaaaattgtagcagcaaaagactcagacttccaatgtttaagcaagaagaaggaaaaactgacagaagagcttcagaaactacagaaagacatagagatggcagaacgcaatgaggatcaccacctgcaggtccttaaagaatctgaggtgcttcttcaggccaaaagagccgagctggaaaagctgaaaagccaggtgacaagtcagcagcaggagatggctgtcttggacaggcagttagggcataaaaaggaggagctgcatctactccaaggaagcatggtccaggcaaaagctgacctccaggaagctctgagactgggagagactgaagtaactgagaagtgcaatcacattagggaagtaaaatctcttctggaagaactgagttttcagaaaggagaactaaatgttcagattagtgaaagaaaaactcaacttacacttataaagcaggaaattgaaaaagaggaagaaaatcttcaggttgttttaaggcagatgtctaaacataaaaccgaactaaagaatattctggacatgttgcaacttgaaaaccatgagctacaaggtttgaagctacaacatgaccaaagggtatctgaattagagaagactcaggtggcagtgctagaggagaaactggagttagagaatttgcagcagatatcccagcagcagaaaggggaaatagagtggcagaagcagctccttgagagggataaacgagaaatagaacgaatgactgctgagtcccgagctttacaatcgtgtgttgagtgtttgagcaaagaaaaggaagatctccaagagaaatgtgacatttgggaaaaaaagttggcacaaaccaaaagggttttagcagcagcagaagaaaatagcaaaatggagcaatcaaacttagaaaagttggaattgaatgtcagaaaactgcagcaggaactagaccaactaaacagagacaagttgtcactgcataacgacatttcagcaatgcaacagcagctccaagaaaaacgagaagcagtaaactcactgcaggaggaactagctaatgtccaagaccatttgaacctagcaaaacaggacctgcttcacaccaccaagcatcaggatgtgttgctcagtgagcagacccgactccagaaggacatcagtgaatgggcaaataggtttgaagactgtcagaaagaagaggagacaaaacaacaacaacttcaagtgcttcagaatgagattgaagaaaacaagctcaaactagtccaacaagaaatgatgtttcagagactccagaaagagagagaaagtgaagaaagcaaattagaaaccagtaaagtgacactgaaggagcaacagcaccagctggaaaaggaattaacagaccagaaaagcaaactggaccaagtgctctcaaaggtgctggcagctgaagagcgtgttaggactctgcaggaagaggagaggtggtgtgagagcctggagaagacactctcccaaactaaacggcagctttcagaaagggagcagcaattggtggagaaatcaggtgagctgttggccctccagaaagaggcagattctatgagggcagacttcagccttctgcggaaccagttcttgacagaaagaaagaaagctgagaagcaggtggccagcctgaaggaagcacttaagatccagcggagccagctggagaaaaaccttcttgagcaaaaacaggagaacagctgcatacaaaaggaaatggcaacaattgaactggtagcccaggacaaccatgagcgggccaggcgcctgatgaaggagctcaaccagatgcagtatgagtacacggagctcaagaaacagatggcaaaccaaaaagatttggagagaagacaaatggaaatcagtgatgcaatgaggacacttaaatctgaggtgaaggatgaaatcagaaccagcttgaagaatcttaatcagtttcttccagaactaccagcagatctagaagctattttggaaagaaacgaaaacctagaaggagaattggaaagcttgaaagagaaccttccatttaccatgaatgagggaccttttgaagaaaaactgaacttttcccaagttcacataatggatgaacactggcgtggagaagcactccgggagaaactgcgtcaccgggaagaccgactcaaggcccaactccgacactgtatgtccaagcaagcagaagtattaattaaaggaaagcggcagacagagggcactttacacagtttgaggagacaagtagatgctttaggggaattggtcaccagcacctctgcagattcagcgtcatcacccagtctgtctcagctggagtcttccctcacagaggactctcaacttggacaaaatcaggaaaagaatgcctcagccagatgaggaatactgtcttgtgtaaatatattcaaggaaaacacctccactacctcactgacttcataattggaatgtcacatggtttttttaatcaagatgcagtgaactgagattctgaaactccactgtagtttactttgcctgtaccattaatgccaatgtttttataaatcacttgtacatagtacatatgggaatagttgcatatgggaatttaaaccaacatgtggctgagcctttttttttttaatcttcgtaacatgtttaaaaaaaaacagtgattttaactgcatatttgaacctacaaactggtaaatcttattaacaaaaagaatgtacttaaggccctctttatttatagtgtcgagttatttttgaattttgcttaaaatctatttttcatatgaaaataaaagataacaatcaacttgggtctgtcctctgactttacacttcacaggtcattctatggaaaagccgtcaaatttttaccttattccaagtaagtaatctttcaggtggttttcttttacctggaggctgaagtacattatacttatcaatgaagatttcatcatttggaaatacatcaattataaaactattatgcttcagatgcctttccttagccaacatattctttggtggaaaatcaggaaaactttgtaccttggagaatgtgacccagtgataaattcaaattgtgttgcctttcagattttgaactaccataattaacagctcaactccatgatgtatacatttctttaaaaactagaatagcaactgctctcacagtctggcataattattcccaagggggaaatatgtaataagaagttttaaaatattctcgggaactcttttctagatcactactagacagcttttgagtcacaacaggtatgttaccctgttactaata

SEQ ID NO: 5476 - protein, 2325 aa, Homo sapiens; identical to SEQ ID NO: 724

SEQ ID NO: 5477 - DNA, 8192 bp, Homo sapiens
ggcacaacacaacaaaatggctgccgcgccgctgggcccctgaggaaagagcccgaacttctcccgctctacctcagcctgcgggactgctcggctcggcttctaggcgagacaggggctccctgtgtttcccaggctgcagtgcagtggccagtcacaaggttgatcatagcacattgtagcctggagctcctgggatcaagcaatcctcctgcctcatcctctggagtaactgggactgcaagtatacataccgtgcctgacgaaatatcacaatatttggttttgatgaacacctggctttattcttgcaatgaagaaaggttctcaacaaaaaatattctccaaagcaaagataccatcatcatctcactctcctatcccatcatctatgtccaatatgagatctaggtcactttcacctttgattggatcagagactctaccttttcattctggaggacagtggtgtgagcaagttgagattgcagatgaaaacaatatgcttttggactatcaagaccataaaggagctgattcacatgcaggagttagatatattacagaggccctcattaaaaaacttactaaacaggataatttggctttgataaaatctctgaacctttcactttctaaagacggtggcaagaaatttaagtatattgagaatttggaaaaatgtgttaaacttgaagtactgaatctcagctataatctaatagggaagattgaaaagttggacaagctgttaaaattacgtgaactcaacttatcatataacaaaatcagcaaaattgaaggcatagaaaatatgtgtaatctgcaaaagcttaaccttgcaggaaatgaaattgagcatattccagtatggttagggaagaagttaaaatctttgcgagtcctcaatttgaaaggcaacaagatatcatcgctccaagatataagcaagttgaaaccgcttcaagatttgatttctctgatcctagttgaaaatccagttgtgacccttcctcattacctccagtttaccattttccacctccgttcattggaaagtttggaaggtcagccagtaaccactcaggatagacaggaggcttttgagagattcagtttagaagaggtagaaagactggaaagagacctagaaaaaaagatgatagaaactgaagagcttaagagcaaacaaacaaggttccttgaggaaattaaaaatcaagataaattgaataaatcattaaaagaggaggccatgttacagaaacagagctgtgaggaactcaagagtgacttaaacacaaaaaatgaattgctaaaacagaagaccatagaattaacacgagcatgtcagaagcaatatgagctggaacaggaattggccttttataaaattgatgctaaatttgagccactaaattattatccatcagagtatgctgaaattgataaagccccagatgaaagcccttacattggcaaatccagatacaagagaaatatgtttgccacagagagttatattattgacagtgctcaggcagtacagatcaagaagatggagccagatgaacaacttagaaatgatcacatgaacttgagaggccacacaccactggacacgcaactggaagacaaagaaaaaaaaataagtgcagcacaaactcgactatcagaactgcatgatgaaatagaaaaggcagaacaacaaattttgagagctactgaagaatttaaacaactggaagaagctatacaactaaaaaagatttcagaagcagggaaagaccttctttacaagcagttgagtggtagactacaacttgtaaataaattacgccaggaagctctggatctagaactgcagatggaaaagcaaaagcaggaaattgccggaaagcagaaggagattaaggacctgcaaatagccatagatagcctggattccaaagacccaaaacattcccatatgaaggctcaaaagagcggtaaagaacaacagcttgacattatgaacaagcagtaccaacaacttgaaagtcgtttggatgagatactttctagaattgctaaggaaacggaagagattaaggaccttgaagaacagcttactgaaggccagatagcagcaaatgaagccctgaagaaggatttagaaggtgttatcagtgggttgcaagaatacctggggaccattaaaggccaggcaactcaggcccagaatgagtgcaggaagctgcgggatgagaaagagacattgttgcagagattgacagaagtcgagcaggagagagaccagctggaaatagttgccatggatgcagaaaatatgaggaaggagcttgcagagctagaaagtgccctccaagagcagcatgaggtgaatgcatctttgcagcagacccagggagatctcagtgcctatgaagctgagctagaggctcggctaaacctaagggatgctgaagccaaccagctcaaggaagagttggaaaaagtaacaagacttacccagttagaacaatcagcccttcaagcagaacttgagaaggaaaggcaagccctcaagaatgcccttggaaaagcccagttctcagaagaaaaggagcaagagaacagtgagctccatgcaaaacttaaacacttgcaggatgacaataatctgttaaaacagcaacttaaagatttccagaatcaccttaaccatgtggttgatggtttggttcgtccagaagaagtggcagctcgtgtggatgagctaagaagaaaactgaaattaggaactggggaaatgaacatccatagtccttcagatgtcttagggaaaagtcttgctgatttacagaaacaattcagtgaaattcttgcacgctccaagtgggaaagagatgaagcacaagttagagagagaaaactccaagaagaaatggctctgcagcaagagaaactggcaactggacaagaagagttcaggcaggcctgtgagagagccctggaagcaagaatgaattttgataagaggcaacatgaagcaagaatccagcaaatggagaatgaaattcactatttgcaagaaaatctaaaaagtatggaggaaatccaaggccttacagatctccaacttcaggaagctgatgaagagaaggagagaattctggcccaactccgagagttagagaaaaagaagaaacttgaagatgccaaatctcaggagcaagtttttggtttagataaagaactgaagaaactaaagaaagccgtggccacctctgataagctagccacagctgagctcaccattgccaaagaccagctgaagtcccttcatggaactgttatgaaaattaaccaggagcgagcagaggagttgcaggaagcagagaggttcagcagaaaggcagcacaagcagccagagatctcacccgagcagaagctgagatcgaactcctgcagaatctcctcaggcagaagggggagcagtttcgacttgagatggagaaaacaggtgtaggtactggagcaaactcacaggtcctagaaattgagaaactgaatgagacaatggaacgacaaaggacagagattgcaaggctgcagaatgtactagacctcactggaagtgacaacaaaggaggctttgaaaatgttttagaagaaattgctgaacttcgacgtgaagtttcttatcagaatgattacataagcagcatggcagatcctttcaaaagacgaggctattggtactttatgccaccaccaccatcatcaaaagtttccagccatagttcccaggccaccaaggactctggtgttggccttaagtactcagcctcaactcctgttagaaaaccacgccctgggcagcaggatgggaaggaaggcagtcaacctccccctgcctcaggatactgggtttattctcccatcaggagtgggttacataaactgtttccaagtagagatgcagacagtggaggagatagtcaggaagagagtgagctggatgaccaagaagaacccccatttgtgcctcctcctggatacatgatgtatactgtgcttcctgatggttctcctgtaccccagggcatggccctgtatgcaccacctcctcccttgccaaacaatagccgacctctcacccctggcactgttgtttatggcccacctcctgctggggcccccatggtgtatgggcctccaccccccaacttctccatccccttcatccctatgggtgtgctgcattgcaacgtccctgaacaccataacttagagaatgaagtttctagattagaagacataatgcagcatttaaaatcaaagaagcgggaagaaaggtggatgagagcatccaagcggcagtcggagaaagaaatggaagaactgcatcataatattgatgatcttttgcaagagaagaaaagcttagagtgtgaagtagaagaattacatagaactgtccagaaacgtcaacagcaaaaggacttcattgatggaaatgttgagagtcttatgactgaactagaaatagaaaaatcactcaaacatcatgaagatattgtagatgaaattgagtgcattgagaagactcttctgaaacgtcgctcagagctcagggaagctgaccgactcctggcagaggctgagagtgaactttcatgcactaaagaaaagacaaaaaatgctgttgaaaagttcactgatgccaagagaagtttattgcaaactgagtcagatgctgaggaattagaaaggagagctcaggaaactgctgttaacctcgtcaaagctgatcagcagctaagatcgctccaggctgatgcaaaggatttggagcagcacaaaatcaagcaagaagaaatcttgaaagaaataaacaaaattgtagcagcaaaagactcagacttccaatgtttaagcaagaagaaggaaaaactgacagaagagcttcagaaactacagaaagacatagagatggcagaacgcaatgaggatcaccacctgcaggtccttaaagaatctgaggtgcttcttcaggccaaaagagccgagctggaaaagctgaaaagccaggtgacaagtcagcagcaggagatggctgtcttggacaggcagttagggcataaaaaggaggagctgcatctactccaaggaagcatggtccaggcaaaagctgacctccaggaagctctgagactgggagagactgaagtaactgagaagtgcaatcacattagggaagtaaaatctcttctggaagaactgagttttcagaaaggagaactaaatgttcagattagtgaaagaaaaactcaacttacacttataaagcaggaaattgaaaaagaggaagaaaatcttcaggttgttttaaggcagatgtctaaacataaaaccgaactaaagaatattctggacatgttgcaacttgaaaaccatgagctacaaggtttgaagctacaacatgaccaaagggtatctgaattagagaagactcaggtggcagtgctagaggagaaactggagttagagaatttgcagcagatatcccagcagcagaaaggggaaatagagtggcagaagcagctccttgagagggataaacgagaaatagaacgaatgactgctgagtcccgagctttacaatcgtgtgttgagtgtttgagcaaagaaaaggaagatctccaagagaaatgtgacatttgggaaaaaaagttggcacaaaccaaaagggttttagcagcagcagaagaaaatagcaaaatggagcaatcaaacttagaaaagttggaattgaatgtcagaaaactgcagcaggaactagaccaactaaacagagacaagttgtcactgcataacgacatttcagcaatgcaacagcagctccaagaaaaacgagaagcagtaaactcactgcaggaggaactagctaatgtccaagaccatttgaacctagcaaaacaggacctgcttcacaccaccaagcatcaggatgtgttgctcagtgagcagacccgactccagaaggacatcagtgaatgggcaaataggtttgaagactgtcagaaagaagaggagacaaaacaacaacaacttcaagtgcttcagaatgagattgaagaaaacaagctcaaactagtccaacaagaaatgatgtttcagagactccagaaagagagagaaagtgaagaaagcaaattagaaaccagtaaagtgacactgaaggagcaacagcaccagctggaaaaggaattaacagaccagaaaagcaaactggaccaagtgctctcaaaggtgctggcagctgaagagcgtgttaggactctgcaggaagaggagaggtggtgtgagagcctggagaagacactctcccaaactaaacggcagctttcagaaagggagcagcaattggtggagaaatcaggtgagctgttggccctccagaaagaggcagattctatgagggcagacttcagccttctgcggaaccagttcttgacagaaagaaagaaagctgagaagcaggtggccagcctgaaggaagcacttaagatccagcggagccagctggagaaaaaccttcttgagcaaaaacaggagaacagctgcatacaaaaggaaatggcaacaattgaactggtagcccaggacaaccatgagcgggccaggcgcctgatgaaggagctcaaccagatgcagtatgagtacacggagctcaagaaacagatggcaaaccaaaaagatttggagagaagacaaatggaaatcagtgatgcaatgaggacacttaaatctgaggtgaaggatgaaatcagaaccagcttgaagaatcttaatcagtttcttccagaactaccagcagatctagaagctattttggaaagaaacgaaaacctagaaggagaattggaaagcttgaaagagaaccttccatttaccatgaatgagggaccttttgaagaaaaactgaacttttcccaagttcacataatggatgaacactggcgtggagaagcactccgggagaaactgcgtcaccgggaagaccgactcaaggcccaactccgacactgtatgtccaagcaagcagaagtattaattaaaggaaagcggcagacagagggcactttacacagtttgaggagacaagtagatgctttaggggaattggtcaccagcacctctgcagattcagcgtcatcacccagtctgtctcagctggagtcttccctcacagaggactctcaacttggacaaaatcaggaaaagaatgcctcagccagatgaggaatactgtcttgtgtaaatatattcaaggaaaacacctccactacctcactgacttcataattggaatgtcacatggtttttttaatcaagatgcagtgaactgagattctgaaactccactgtagtttactttgcctgtaccattaatgccaatgtttttataaatcacttgtacatagtacatatgggaatagttgcatatgggaatttaaaccaacatgtggctgagcctttttttttttaatcttcgtaacatgtttaaaaaaaaacagtgattttaactgcatatttgaacctacaaactggtaaatcttattaacaaaaagaatgtacttaaggccctctttatttatagtgtcgagttatttttgaattttgcttaaaatctatttttcatatgaaaataaaagataacaatcaacttgggtctgtcctctgactttacacttcacaggtcattctatggaaaagccgtcaaatttttaccttattccaagtaagtaatctttcaggtggttttcttttacctggaggctgaagtacattatacttatcaatgaagatttcatcatttggaaatacatcaattataaaactattatgcttcagatgcctttccttagccaacatattctttggtggaaaatcaggaaaactttgtaccttggagaatgtgacccagtgataaattcaaattgtgttgcctttcagattttgaactaccataattaacagctcaactccatgatgtatacatttctttaaaaactagaatagcaactgctctcacagtctggcataattattcccaagggggaaatatgtaataagaagttttaaaatattctcgggaactcttttctagatcactactagacagcttttgagtcacaacagg

SEQ ID NO: 5478 - protein, 2325 aa, Homo sapiens; identical to SEQ ID NO: 724

SEQ ID NO: 5479 - DNA, 568 bp, Homo sapiens
gaggctctgcgaagttacagaggctcggaggcgcttgcaaaaatgtggctgtcagagagggaagtgcacatgaatttgaagacagcattagaaagcgttccgcccacagtttctctgttctcaacggctcagttttaacaggataaattttaagttaagtcccatatgaaggctcaaaagagcggtaaagaacaacagcttgacattatgaacaagcagtaccaacaacttgaaagtcgtttggatgagatactttctagaattgctaaggaaacggaagagattaaggaccttgaagaacagcttactgaaggccagatagcagcaaatgaagccctgaagaaggatttagaaggtgttatcagtgggttgcaagaatacctggggaccattaaaggccaggcaactcaggcccagaatgagtgcaggaagctgcgggatgagaaagagacattgttgcagagattgacagaagtcgagcaggagagagaccagctggaaatagttgccatggatgcagaaaatatgaggaaggtatgatttttttcctgcctattttccgtagctt

SEQ ID NO: 5480 - protein, 124 aa, Homo sapiens
MKAQKSGKEQQLDIMNKQYQQLESRLDEILSRIAKETEEIKDLEEQLTEGQIAANEALKKDLEGVISGLQEYLGTIKGQATQAQNECRKLRDEKETLLQRLTEVEQERDQLEIVAMDAENMRKV

SEQ ID NO: 5481 - DNA, 3042 bp, Homo sapiens
gaggctctgcgaagttacagaggctcggaggcgcttgcaaaaatgtggctgtcagagagggaagtgcacatgaatttgaagacagcattagaaagcgttccgcccacagtttctctgttctcaacggctcagttttaacaggataaattttaagttaagtcccatatgaaggctcaaaagagcggtaaagaacaacagcttgacattatgaacaagcagtaccaacaacttgaaagtcgtttggatgagatactttctagaattgctaaggaaacggaagagattaaggaccttgaagaacagcttactgaaggccagatagcagcaaatgaagccctgaagaaggatttagaaggtgttatcagtgggttgcaagaatacctggggaccattaaaggccaggcaactcaggcccagaatgagtgcaggaagctgcgggatgagaaagagacattgttgcagagattgacagaagtcgagcaggagagagaccagctggaaatagttgccatggatgcagaaaatatgaggaaggagcttgcagagctagaaagtgccctccaagagcagcatgaggtgaatgcatctttgcagcagacccagggagatctcagtgcctatgaagctgagctagaggctcggctaaacctaagggatgctgaagccaaccagctcaaggaagagttggaaaaagtaacaagacttacccagttagaacaatcagcccttcaagcagaacttgagaaggaaaggcaagccctcaagaatgcccttggaaaagcccagttctcagaagaaaaggagcaagagaacagtgagctccatgcaaaacttaaacacttgcaggatgacaataatctgttaaaacagcaacttaaagatttccagaatcaccttaaccatgtggttgatggtttggttcgtccagaagaagtggcagctcgtgtggatgagctaagaagaaaactgaaattaggaactggggaaatgaacatccatagtccttcagatgtcttagggaaaagtcttgctgatttacagaaacaattcagtgaaattcttgcacgctccaagtgggaaagagatgaagcacaagttagagagagaaaactccaagaagaaatggctctgcagcaagagaaactggcaactggacaagaagagttcaggcaggcctgtgagagagccctggaagcaagaatgaattttgataagaggcaacatgaagcaagaatccagcaaatggagaatgaaattcactatttgcaagaaaatctaaaaagtatggaggaaatccaaggccttacagatctccaacttcaggaagctgatgaagagaaggagagaattctggcccaactccgagagttagagaaaaagaagaaacttgaagatgccaaatctcaggagcaagtttttggtttagataaagaactgaagaaactaaagaaagccgtggccacctctgataagctagccacagctgagctcaccattgccaaagaccagctgaagtcccttcatggaactgttatgaaaattaaccaggagcgagcagaggagttgcaggaagcagagaggttcagcagaaaggcagcacaagcagccagagatctcacccgagcagaagctgagatcgaactcctgcagaatctcctcaggcagaagggggagcagtttcgacttgagatggagaaaacaggtgtaggtactggagcaaactcacaggtcctagaaattgagaaactgaatgagacaatggaacgacaaaggacagagattgcaaggctgcagaatgtactagacctcactggaagtgacaacaaaggaggctttgaaaatgttttagaagaaattgctgaacttcgacgtgaagtttcttatcagaatgattacataagcagcatggcagatcctttcaaaagacgaggctattggtactttatgccaccaccaccatcatcaaaagtttccagccatagttcccaggccaccaaggactctggtgttggccttaagtactcagcctcaactcctgttagaaaaccacgccctgggcagcaggatgggaaggaaggcagtcaacctccccctgcctcaggatactgggtttattctcccatcaggagtgggttacataaactgtttccaagtagagatgcagacagtggaggagatagtcaggaagagagtgagctggatgaccaagaagaacccccatttgtgcctcctcctggatacatgatgtatactgtgcttcctgatggttctcctgtaccccagggcatggccctgtatgcaccacctcctcccttgccaaacaatagccgacctctcacccctggcactgttgtttatggcccacctcctgctggggcccccatggtgtatgggcctccaccccccaacttctccatccccttcatccctatgggtgtgctgcattgcaacgtccctgaacaccataacttagagaatgaagtttctagattagaagacataatgcagcatttaaaatcaaagaagcgggaagaaaggtggatgagagcatccaagcggcagtcggagaaagaaatggaagaactgcatcataatattgatgatcttttgcaagagaagaaaagcttagagtgtgaagtagaagaattacatagaactgtccagaaacgtcaacagcaaaaggacttcattgatggaaatgttgagagtcttatgactgaactagaaatagaaaaatcactcaaacatcatgaagatattgtagatgaaattgagtgcattgagaagactcttctgaaacgtcgctcagagctcagggaagctgaccgactcctggcagaggctgagagtgaactttcatgcactaaagaaaagacaaaaaatgctgttgaaaagttcactgatgccaagagaagtttattgcaaactgagtcagatgctgaggaattagaaaggagagctcaggaaactgctgttaacctcgtcaaagctgatcagcagctaagatcgctccaggctgatgcaaaggatttggagcagcac

SEQ ID NO: 5482 - protein, 958 aa, Homo sapiens
MKAQKSGKEQQLDIMNKQYQQLESRLDEILSRIAKETEEIKDLEEQLTEGQIAANEALKKDLEGVISGLQEYLGTIKGQATQAQNECRKLRDEKETLLQRLTEVEQERDQLEIVAMDAENMRKELAELESALQEQHEVNASLQQTQGDLSAYEAELEARLNLRDAEANQLKEELEKVTRLTQLEQSALQAELEKERQALKNALGKAQFSEEKEQENSELHAKLKHLQDDNNLLKQQLKDFQNHLNHVVDGLVRPEEVAARVDELRRKLKLGTGEMNIHSPSDVLGKSLADLQKQFSEILARSKWERDEAQVRERKLQEEMALQQEKLATGQEEFRQACERALEARMNFDKRQHEARIQQMENEIHYLQENLKSMEEIQGLTDLQLQEADEEKERILAQLRELEKKKKLEDAKSQEQVFGLDKELKKLKKAVATSDKLATAELTIAKDQLKSLHGTVMKINQERAEELQEAERFSRKAAQAARDLTRAEAEIELLQNLLRQKGEQFRLEMEKTGVGTGANSQVLEIEKLNETMERQRTEIARLQNVLDLTGSDNKGGFENVLEEIAELRREVSYQNDYISSMADPFKRRGYWYFMPPPPSSKVSSHSSQATKDSGVGLKYSASTPVRKPRPGQQDGKEGSQPPPASGYWVYSPIRSGLHKLFPSRDADSGGDSQEESELDDQEEPPFVPPPGYMMYTVLPDGSPVPQGMALYAPPPPLPNNSRPLTPGTVVYGPPPAGAPMVYGPPPPNFSIPFIPMGVLHCNVPEHHNLENEVSRLEDIMQHLKSKKREERWMRASKRQSEKEMEELHHNIDDLLQEKKSLECEVEELHRTVQKRQQQKDFIDGNVESLMTELEIEKSLKHHEDIVDEIECIEKTLLKRRSELREADRLLAEAESELSCTKEKTKNAVEKFTDAKRSLLQTESDAEELERRAQETAVNLVKADQQLRSLQADAKDLEQ

SEQ ID NO: 5483 - DNA, 1034 bp, Homo sapiens
aggatgacaataatctgttaaaacagcaacttaaagatttccagaatcaccttaaccatgtggttgatggtttggttcgtccagaagaagtggcagctcgtgtggatgagctaagaagaaaactgaaattaggaactggggaaatgaaatgaattttgataagaggcaacatgaagcaagaatccagcaaatggagaatgaaattcactatttgcaagaaaatctaaaaagtatggaggaaatccaaggccttacagatctccaacttcaggaagctgatgaagagaaggagagaattctggcccaactccgagagttagagaaaaagaagaaacttgaagatgccaaatctcaggagcaagtttttggtttagataaagaactgaagaaactaaagaaagccgtggccacctctgataagctagccacagctgagctcaccattgccaaagaccagctgaagtcccttcatggaactgttatgaaaattaaccaggagcgagcagaggtgagttcacatgtacagaacaggtttccatcaatgatgctgctgtcaaaaaacatggcaacttgtattattgatcttgctatagacattggttattttataaaccactgtaaagttgtctgtttttcttaagacctaaagattatattccccccatcacaacccccaataatttattttgtgctgccatggatactgcgttctactgagccctgaaaggaatcatcaaataaacatgctatccctacctttaagtgtaaggatgcttagggaggtagctgtcaatatctacctggacaagggttcctgaaggattgttatataatccctctgaatctcaaatttttcatctcgtgcagtcatgtgaaaatgttacttcatagtatgactccttactgagctaatgtctgttactgtgctttataggatgcaaatgctaatgagattaagatagcagatcataggagacaaaaatctaatgatgagagcccagagagacataatcatggaagacggtagtaaaagt

SEQ ID NO: 5484 - protein, 163 aa, Homo sapiens [sequence omitted]

SEQ ID NO: 5485 - DNA, 3879 bp, Homo sapiens
cacttttatacttcccttcgtttgcatgtgttacttcttcagcctaggtctttccccttccgttcgttcttcaaaacccaggcaaaacacctcttcctctgagcagccttctcagaacttttctcccatgtggccagaggaaggagagacttctgtctatctcttctgctagaccccgaactctttggaggcagaggttatccacaagaggcttggcaaatgtttctcagtcatagttggactgtttgaaaaattaaaggttctatttgtctgtcagtttcatccgtgacatttaactttttataccaaagtcttagaatctaccatcattttttgggccattgataccactttaaccacagttaatttcagcttttggcaggaaagagaggaaacatcctgtgatgtttcagcactgcatttttttccccatctcattcaggagaatgaagtttctagattagaagacataatgcagcatttaaaatcaaagaagcgggaagaaaggtggatgagagcatccaagcggcagtcggagaaagaaatggaagaactgcatcataatattgatgatcttttgcaagagaagaaaagcttagagtgtgaagtagaagaattacatagaactgtccagaaacgtcaacagcaaaaggacttcattgatggaaatgttgagagtcttatgactgaactagaaatagaaaaatcactcaaacatcatgaagatattgtagatgaaattgagtgcattgagaagactcttctgaaacgtcgctcagagctcagggaagctgaccgactcctggcagaggctgagagtgaactttcatgcactaaagaaaagacaaaaaatgctgttgaaaagttcactgatgccaagagaagtttattgcaaactgagtcagatgctgaggaattagaaaggagagctcaggaaactgctgttaacctcgtcaaagctgatcagcagctaagatcgctccaggctgatgcaaaggatttggagcagcacaaaatcaagcaagaagaaatcttgaaagaaataaacaaaattgtagcagcaaaagactcagacttccaatgtttaagcaagaagaaggaaaaactgacagaagagcttcagaaactacagaaagacatagagatggcagaacgcaatgaggatcaccacctgcaggtccttaaagaatctgaggtgcttcttcaggccaaaagagccgagctggaaaagctgaaaagccaggtgacaagtcagcagcaggagatggctgtcttggacaggcagttagggcataaaaaggaggagctgcatctactccaaggaagcatggtccaggcaaaagctgacctccaggaagctctgagactgggagagactgaagtaactgagaagtgcaatcacattagggaagtaaaatctcttctggaagaactgagttttcagaaaggagaactaaatgttcagattagtgaaagaaaaactcaacttacacttataaagcaggaaattgaaaaagaggaagaaaatcttcaggttgttttaaggcagatgtctaaacataaaaccgaactaaagaatattctggacatgttgcaacttgaaaaccatgagctacaaggtttgaagctacaacatgaccaaagggtatctgaattagagaagactcaggtggcagtgctagaggagaaactggagttagagaatttgcagcagatatcccagcagcagaaaggggaaatagagtggcagaagcagctccttgagagggataaacgagaaatagaacgaatgactgctgagtcccgagctttacaatcgtgtgttgagtgtttgagcaaagaaaaggaagatctccaagagaaatgtgacatttgggaaaaaaagttggcacaaaccaaaagggttttagcagcagcagaagaaaatagcaaaatggagcaatcaaacttagaaaagttggaattgaatgtcagaaaactgcagcaggaactagaccaactaaacagagacaagttgtcactgcataacgacatttcagcaatgcaacagcagctccaagaaaaacgagaagcagtaaactcactgcaggaggaactagctaatgtccaagaccatttgaacctagcaaaacaggacctgcttcacaccaccaagcatcaggatgtgttgctcagtgagcagacccgactccagaaggacatcagtgaatgggcaaataggtttgaagactgtcagaaagaagaggagacaaaacaacaacaacttcaagtgcttcagaatgagattgaagaaaacaagctcaaactagtccaacaagaaatgatgtttcagagactccagaaagagagagaaagtgaagaaagcaaattagaaaccagtaaagtgacactgaaggagcaacagcaccagctggaaaaggaattaacagaccagaaaagcaaactggaccaagtgctctcaaaggtgctggcagctgaagagcgtgttaggactctgcaggaagaggagaggtggtgtgagagcctggagaagacactctcccaaactaaacggcagctttcagaaagggagcagcaattggtggagaaatcaggtgagctgttggccctccagaaagaggcagattctatgagggcagacttcagccttctgcggaaccagttcttgacagaaagaaagaaagctgagaagcaggtggccagcctgaaggaagcacttaagatccagcggagccagctggagaaaaaccttcttgagcaaaaacaggagaacagctgcatacaaaaggaaatggcaacaattgaactggtagcccaggacaaccatgagcgggccaggcgcctgatgaaggagctcaaccagatgcagtatgagtacacggagctcaagaaacagatggcaaaccaaaaagatttggagagaagacaaatggaaatcagtgatgcaatgaggacacttaaatctgaggtgaaggatgaaatcagaaccagcttgaagaatcttaatcagtttcttccagaactaccagcagatctagaagctattttggaaagaaacgaaaacctagaaggagaattggaaagcttgaaagagaaccttccatttaccatgaatgagggaccttttgaagaaaaactgaacttttcccaagttcacataatggatgaacactggcgtggagaagcactccgggagaaactgcgtcaccgggaagaccgactcaaggcccaactccgacactgtatgtccaagcaagcagaagtattaattaaaggaaagcggcagacagagggcactttacacagtttgaggagacaagtagatgctttaggggaattggtcaccagcacctctgcagattcagcgtcatcacccagtctgtctcagctggagtcttccctcacagaggactctcaacttggacaaaatcaggaaaagaatgcctcagccagatgaggaatactgtcttgtgtaaatatattcaaggaaaacacctccactacctcactgacttcataattggaatgtcacatggtttttttaatcaagatgcagtgaactgagattctgaaactccactgtagtttactttgcctgtaccattaatgccaatgtttttataaatcacttgtacatagtacatatgggaatagttgcatatgggaatttaaaccaacatgtggctgagcctttttttttttaatcttcgtaacatgtttaaaaaaaaacagtgattttaactgcatatttgaacctacaaactggtaaatcttattaacaaaaagaatgtacttaaggccctctttatttatagtgtcgagttatttttgaattttgcttaaaatctatttttcatatgaaaataaaagataacaatc

SEQ ID NO: 5486 - protein, 994 aa, Homo sapiens
MQHLKSKKREERWMRASKRQSEKEMEELHHNIDDLLQEKKSLECEVEELHRTVQKRQQQKDFIDGNVESLMTELEIEKSLKHHEDIVDEIECIEKTLLKRRSELREADRLLAEAESELSCTKEKTKNAVEKFTDAKRSLLQTESDAEELERRAQETAVNLVKADQQLRSLQADAKDLEQHKIKQEEILKEINKIVAAKDSDFQCLSKKKEKLTEELQKLQKDIEMAERNEDHHLQVLKESEVLLQAKRAELEKLKSQVTSQQQEMAVLDRQLGHKKEELHLLQGSMVQAKADLQEALRLGETEVTEKCNHIREVKSLLEELSFQKGELNVQISERKTQLTLIKQEIEKEEENLQVVLRQMSKHKTELKNILDMLQLENHELQGLKLQHDQRVSELEKTQVAVLEEKLELENLQQISQQQKGEIEWQKQLLERDKREIERMTAESRALQSCVECLSKEKEDLQEKCDIWEKKLAQTKRVLAAAEENSKMEQSNLEKLELNVRKLQQELDQLNRDKLSLHNDISAMQQQLQEKREAVNSLQEELANVQDHLNLAKQDLLHTTKHQDVLLSEQTRLQKDISEWANRFEDCQKEEETKQQQLQVLQNEIEENKLKLVQQEMMFQRLQKERESEESKLETSKVTLKEQQHQLEKELTDQKSKLDQVLSKVLAAEERVRTLQEEERWCESLEKTLSQTKRQLSEREQQLVEKSGELLALQKEADSMRADFSLLRNQFLTERKKAEKQVASLKEALKIQRSQLEKNLLEQKQENSCIQKEMATIELVAQDNHERARRLMKELNQMQYEYTELKKQMANQKDLERRQMEISDAMRTLKSEVKDEIRTSLKNLNQFLPELPADLEAILERNENLEGELESLKENLPFTMNEGPFEEKLNFSQVHIMDEHWRGEALREKLRHREDRLKAQLRHCMSKQAEVLIKGKRQTEGTLHSLRRQVDALGELVTSTSADSASSPSLSQLESSLTEDSQLGQNQEKNASAR

SEQ ID NO: 5487 - DNA, 2419 bp, Homo sapiens
tagaaaggagagctcaggaaactgctgttaacctcgtcaaagctgatcagcagctaagatcgctccaggctgatgcaaaggatttggagcagcacaaaatcaagcaagaagaaatcttgaaagaaataaacaaaattgtagcagcaaaagactcagacttccaatgtttaagcaagaagaaggaaaaactgacagaagagcttcagaaactacagaaagacatagagatggcagttagggcataaaaaggaggagctgcatctactccaaggaagcatggtccaggcaaaagctgacctccaggaagctctgagactgggagagactgaagtaactgagaagtgcaatcacattagggaagtaaaatctcttctggaagaactgagttttcagaaaggagaactaaatgttcagattagtgaaagaaaaactcaacttacacttataaagcaggaaattgaaaaagaggaagaaaatcttcaggttgttttaaggcagatgtctaaacataaaaccgggttttagcagcagcagaagaaaatagcaaaatggagcaatcaaacttagaaaagttggaattgaatgtcagaaaactgcagcaggaactagaccaactaaacagagacaagttgtcactgcataacgacatttcagcaatgcaacagcagctccaagaaaaacgagaagcagtaaactcactgcaggaggaactagctaatgtccaagaccatttgaacctagcaaaacaggacctgcttcacaccaccaagcatcaggatgtgttgctcagtgagcagacccgactccagaaggacatcagtgaatgggcaaataggtttgaagactgtcagaaagaagaggagacaaaacaacaacaacttcaagtgcttcagaatgagattgaagaaaacaagctcaaactagtccaacaagaaatgatgtttcagagactccagaaagagagagaaagtgaaaaaagcaaactggaccaagtgctctcaaaggtgctggcagctgaagagcgtgttaggactctgcaggaagaggagaggtggtgtgagagcctggagaagacactctcccaaactaaacggcagctttcagaaagggagcagcaattggtggagaaatcaggtgagctgttggccctccagaaagaggcagattctatgagggcagacttcagccttctgcggaaccagttcttgacagaaagaaagaaagctgagaagcaggtggccagcctgaaggaagcacttaagatccagcggagccagctggagaaaaaccttcttgagcaaaaacaggagaacagctgcatacaaaaggaaatggcaacaattgaactggtagcccaggacaaccatgagcgggccaggcgcctgatgaaggagctcaaccagatgcagtatgagtacacggagctcaagaaacagatggcaaaccaaaaagatttggagagaagacaaatggaaatcagtgatgcaatgaggacacttaaatctgaggtgaaggatgaaatcagaaccagcttgaagaatcttaatcagtttcttccagaactaccagcagatctagaagctattttggaaagaaacgaaaacctagaaggagaattggaaagcttgaaagagaaccttccatttaccatgaatgagggaccttttgaagaaaaactgaacttttcccaagttcacataatggatgaacactggcgtggagaagcactccgggagaaactgcgtcaccgggaagaccgactcaaggcccaactccgacactgtatgtccaagcaagcagaagtattaattaaaggaaagcggcagacagagggcactttacacagtttgaggagacaagtagatgctttaggggaattggtcaccagcacctctgcagattcagcgtcatcacccagtctgtctcagctggagtcttccctcacagaggactctcaacttggacaaaatcaggaaaagaatgcctcagccagatgaggaatactgtcttgtgtaaatatattcaaggaaaacacctccactacctcactgacttcataattggaatgtcacatggtttttttaatcaagatgcagtgaactgagattctgaaactccactgtagtttactttgcctgtaccattaatgccaatgtttttataaatcacttgtacatagtacatatgggaatagttgcatatgggaatttaaaccaacatgtggctgagcctttttttttttaatcttcgtaacatgtttaaaaaaaaacagtgattttaactgcatatttgaacctacaaactggtaaatcttattaacaaaaagaatgtacttaaggccctctttatttatagtgtcgagttatttttgaattttgcttaaaatctatttttcatatgaaaataaaagataacaatc

SEQ ID NO: 5488 - protein, 482 aa, Homo sapiens
MEQSNLEKLELNVRKLQQELDQLNRDKLSLHNDISAMQQQLQEKREAVNSLQEELANVQDHLNLAKQDLLHTTKHQDVLLSEQTRLQKDISEWANRFEDCQKEEETKQQQLQVLQNEIEENKLKLVQQEMMFQRLQKERESEKSKLDQVLSKVLAAEERVRTLQEEERWCESLEKTLSQTKRQLSEREQQLVEKSGELLALQKEADSMRADFSLLRNQFLTERKKAEKQVASLKEALKIQRSQLEKNLLEQKQENSCIQKEMATIELVAQDNHERARRLMKELNQMQYEYTELKKQMANQKDLERRQMEISDAMRTLKSEVKDEIRTSLKNLNQFLPELPADLEAILERNENLEGELESLKENLPFTMNEGPFEEKLNFSQVHIMDEHWRGEALREKLRHREDRLKAQLRHCMSKQAEVLIKGKRQTEGTLHSLRRQVDALGELVTSTSADSASSPSLSQLESSLTEDSQLGQNQEKNASAR

SEQ ID NO: 5489 - DNA, 2919 bp, Homo sapiens
tagaaaggagagctcaggaaactgctgttaacctcgtcaaagctgatcagcagctaagatcgctccaggctgatgcaaaggatttggagcagcacaaaatcaagcaagaagaaatcttgaaagaaataaacaaaattgtagcagcaaaagactcagacttccaatgtttaagcaagaagaaggaaaaactgacagaagagcttcagaaactacagaaagacatagagatggcagttagggcataaaaaggaggagctgcatctactccaaggaagcatggtccaggcaaaagctgacctccaggaagctctgagactgggagagactgaagtaactgagaagtgcaatcacattagggaagtaaaatctcttctggaagaactgagttttcagaaaggagaactaaatgttcagattagtgaaagaaaaactcaacttacacttataaagcaggaaattgaaaaagaggaagaaaatcttcaggttgttttaaggcagatgtctaaacataaaaccgggttttagcagcagcagaagaaaatagcaaaatggagcaatcaaacttagaaaagttggaattgaatgtcagaaaactgcagcaggaactagaccaactaaacagagacaagttgtcactgcataacgacatttcagcaatgcaacagcagctccaagaaaaacgagaagcagtaaactcactgcaggaggaactagctaatgtccaagaccatttgaacctagcaaaacaggacctgcttcacaccaccaagcatcaggatgtgttgctcagtgagcagacccgactccagaaggacatcagtgaatgggcaaataggtttgaagactgtcagaaagaagaggagacaaaacaacaacaacttcaagtgcttcagaatgagattgaagaaaacaagctcaaactagtccaacaagaaatgatgtttcagagactccagaaagagagagaaagtgaaaaaagcaaactggaccaagtgctctcaaaggtgctggcagctgaagagcgtgttaggactctgcaggaagaggagaggtggtgtgagagcctggagaagacactctcccaaactaaacggcagctttcagaaagggagcagcaattggtggagaaatcaggtgagctgttggccctccagaaagaggcagattctatgagggcagacttcagccttctgcggaaccagttcttgacagaaagaaagaaagctgagaagcaggtggccagcctgaaggaagcacttaagatccagcggagccagctggagaaaaaccttcttgagcaaaaacaggagaacagctgcatacaaaaggaaatggcaacaattgaactggtagcccaggacaaccatgagcgggccaggcgcctgatgaaggagctcaaccagatgcagtatgagtacacggagctcaagaaacagatggcaaaccaaaaagatttggagagaagacaaatggaaatcagtgatgcaatgaggacacttaaatctgaggtgaaggatgaaatcagaaccagcttgaagaatcttaatcagtttcttccagaactaccagcagatctagaagctattttggaaagaaacgaaaacctagaaggagaattggaaagcttgaaagagaaccttccatttaccatgaatgagggaccttttgaagaaaaactgaacttttcccaagttcacataatggatgaacactggcgtggagaagcactccgggagaaactgcgtcaccgggaagaccgactcaaggcccaactccgacactgtatgtccaagcaagcagaagtattaattaaaggaaagcggcagacagagggcactttacacagtttgaggagacaagtagatgctttaggggaattggtcaccagcacctctgcagattcagcgtcatcacccagtctgtctcagctggagtcttccctcacagaggactctcaacttggacaaaatcaggaaaagaatgcctcagccagatgaggaatactgtcttgtgtaaatatattcaaggaaaacacctccactacctcactgacttcataattggaatgtcacatggtttttttaatcaagatgcagtgaactgagattctgaaactccactgtagtttactttgcctgtaccattaatgccaatgtttttataaatcacttgtacatagtacatatgggaatagttgcatatgggaatttaaaccaacatgtggctgagcctttttttttttaatcttcgtaacatgtttaaaaaaaaacagtgattttaactgcatatttgaacctacaaactggtaaatcttattaacaaaaagaatgtacttaaggccctctttatttatagtgtcgagttatttttgaattttgcttaaaatctatttttcatatgaaaataaaagataacaatcaacttgggtctgtcctctgactttacacttcacaggtcattctatggaaaagccgtcaaatttttaccttattccaagtaagtaatctttcaggtggttttcttttacctggaggctgaagtacattatacttatcaatgaagatttcatcatttggaaatacatcaattataaaactattatgcttcagatgcctttccttagccaacatattctttggtggaaaatcaggaaaactttgtaccttggagaatgtgacccagtgataaattcaaattgtgttgcctttcagattttgaactaccataattaacagctcaactccatgatgtatacatttctttaaaaactagaatagcaactgctctcacagtctggcataattattcccaagggggaaatatgtaataagaagttttaaaatattctcgggaactcttttctagatcactactagacagcttttgagtcacaacaggtatgttaccctgttactaata

SEQ ID NO: 5490 - protein, 482 aa, Homo sapiens; identical to SEQ ID NO: 5488

SEQ ID NO: 5491 - DNA, 346 bp, Homo sapiens
gagagcctggagaagacactctcccaaactaaacggcagctttcagaaagggagcagcaattggtggagaaatcaggtgagctgttggccctccagaaagaggcagattctatgagggcagacttcagccttctgcggaaccagttcttgacagaaagaaagaaagctgagaagcaggtggccagcctgaaggaagcacttaagatccagcggagccagctggagaaaaaccttcttgtgagtacctgctgccgtggcagtttgtgaggaaatgataaatttaaaattttaaactgcaacaccacttcaacacagagaaaataaattacccatcaacccagtcctg

SEQ ID NO: 5492 - protein, 51 aa, Homo sapiens
MRADFSLLRNQFLTERKKAEKQVASLKEALKIQRSQLEKNLLVSTCCRGSL

SEQ ID NO: 5493 - DNA, 4375 bp, Homo sapiens
ctgtgtatgatattacaaatatttgggtttgtttacttatcttagagcttacttggctagtgcaaatgagcctatgagtttttaaactcttgcttgggcagttagaattccagaataatttagctgcctgatagataagagaacaaagttaggacgaactttttcactgatatctggggacttgaattcttgtcaaatgtcttcaaagtcaattttatgctgttatagttagcttgctctttaaattattaaggaaaggtgaattgtatgccagcttataatagtgtgacttggtttttaatgaaattaaaatttaaagacaagcaaaagtgtcttccattaaatgtgtcatgtttaggcattttgatacaactttgtgctttgtgattgaaagtctgtatgatttcaaagtaatttgagttttgactccacattggcatttccatcaatttactgtgttgttccttgcttgcttattggtctgtttacggtatgcttttaggagtaaacaatttactcctgacctgtaattatcaaagttgttggatattgagttgtttatttaaaaatattaggtttggctagatttttgaaaagtatgcagttgtatttcacaactactgttctgagtaactggtcaaagcaaaattattattttaggatatgttgattaaatatgtattttaaatatttaagttttttttctataattatatggcagtcacaaatttaaacttttatttttgcagaagaagtacatataaccacttaagcagctggttgacagatgcaaggaatctcaccaatccaaatactgtaataattctcataggaaataaagcagatttggaggcacagagagatgttacatatgaagaagccaaacagtttgctgaagaaaatggcttattgttcctcgaagcgagtgcaaaaacgggagagaatgtagaagatgccttccttgaggctgccaagaaaatctatcagaacattcaggatggaagcttggatctgaatgctgctgagtctggtgtacaacacaaaccttcagccccgcagggaggccggctaaccagtgaaccccaaccccagagagaaggctgtggctgctagtgacctctttgctgtggcccctcatttgacctttcacctctgtctgttggaagcagtactttttactgcctcattgtcttctgtacatcttactgggtttaattaaaaaaaaagaaaaaactctgttgtaaaaacagtttaacacaatactaaactgctaaacaactagatgtaatcaggttatcaaaggcaagtagagtaataaatctctcctgcatggtaaatctagactttttttcccccttgtcctcgtgataagtatgtcaccaatatatgatttaaaccgagcactgatgctggacttcatgatttttaccctccctttggcaaggctttgtctcactgtacggtttaatttggtgatatcttaagcctttcttcccatccttaactgttcaagtatgtctgttgtaaccaataagtttattgctgtgaaattacttctgatggtagagaaggggttctataactgcttttgttttgttttggataaatttcctgttgtgtgggtggcatttttcttaacgagatttgcttctgtcttagcctcacacagggaaaatatccatttatcttctctctcgtgcttaattaatagctttatctttttttataccattttatccttttctctttaacagaaagtaaatatgtataaaatttgaaggaatcgaactaacaatacattctgtgtatattattttaatgaagaaaataaattgattactggcattggaacagtataaaataccagtttgtacagtatgacctatatgtgaccatgttactcccttccatttcacacaaagaaatagacacaactgcagttcacaagtagtactggctccaccccttggtgctggcagtgtttggggacattatgctggaaagagctcctagcatcagaggattaacactagcagattctgttccatctttgcactgttgcttacctgctgattttcttaactgttcttgtgcaatcgacaatgtgctaacctgcttttctctttttgtaaacgtttttgcattacaggctgcattcttgccttactgtatagaaaaagaaaaaaggctgggtttactattgcacattttaagcttttatacctttatcttcttggaatggtcagattctgaactggacagtcagaaccacaggtctgctgttaagggattttaaattgtgcatttttaaccctacagtgaaataacttaagatatccctgtgttcacagtgtgaggggctgttttatgtcatgttggcataaattgttttgtaaaagggaaagtgtttctaaaggtgtttcagcgcttgtgctgatacaaagtaagttattactttgcaccaggtggtttggccactgaattaatactgtatagcaagagaaacaatcttatttttttggacaacatgttttattaagttcttcatttctgttgattttttttattgcatttatgattcagtggctgggaattgagaatttatttgaaatagaataggtaacacctcagcgtactatagaaaatgcactcagctcaactgctgtgtttaaaatacacattttaaatccctctttacagacactaacataaaagtacatctttctgggttgtaaacatgtggtagtaccagagtattgtatagtcaatgttaaataaaagccaaaactggaatgtgcagaaagtaggctttggttaatttgtggattcatttttatttttgtctttgtttaactttttaaaaaataagatttctggagtagattggtatattctgttaaagacttacagtgatccattttgcttacactgttgcatcacaagggactcacccagggaccatgacctgctggtgtgtgtgtatatttacaaaaacaaaacaaacaaaccacccattgggatataaggtagcaatcacaaactaaagactgcggcttgttgaggtgcaataccctgactcccaaagttagttacagtgggttttattgtttttgtgactgaaggatttattcagactgctgtactcttcatttgatgtaacaaaatgctattaatctaaatatttgtaaataaagtacctgtatctagattaaattaaaattggttgcattattttctgaactataatagggtttttcttcaggtgaacaatttgacgtgtcatcagtttttattgcagcactgtccatattcattgtataaagagaggtctacgtatgtagcatataaaaccacatcactaagtaatagacccacagctttattcttgtgtttacattacccttgaaatgttttcagtcaacccttttcagtgtaagatcagcacatttggtggctgatgctgttctcctttgactgtaccgggagccagattctatcatatgcatgtgtaatcccctgtaatacactcaggtgctcacaaatagagcagattgtcatattgtaacatgcgtgtgccagacaccgggcagtacactttggaaagaatgtgaaatccttttaatttttaatccatagcttactgcttgtgcagtcacctgcctcttgaggttgctcattgcccttggacctgtgaggaggccttcagattagtaattggtgcttagtactatttatgcttaaatagatcttccagtacaatgttgaagtcttttttatggataataacgtgtttgatggagtaacttattatttttttttggttggtggtttacacgttaatagaggtagtacaatttctttggaaaggtgtcttttgaagccagctgttaagcttcatacattacctcccttctcaaattcggtaagacagtagttttggggaacttttttgcccatgtgtcttttaagtgtgattttaaaaaaatgagtggttcagttcattcccctaaacagaagaaaagaccaaataattaccttccattcctcttcatgtgggaatatagagagggttcatgtggcattttagagaaaagataatttatcctcattcaacacaggcccagaaaattgtgtcccagaaggatgtcagtaattgtgactaggccaggccttttagcattttgctaagacttgaaacaaaaaatgtaaatacaaaagaaatcaagttttgttttgaaagatgccttctagaacttactgtgtattaataaattgtcactttcattgtctttattgtaactccattgatcccgtatcttaacggttcacgtctagccaaataactgttttggaataaaaaccttggtggtgaggg

SEQ ID NO: 5494 - protein, 132 aa, Homo sapiens [sequence omitted]

SEQ ID NO: 5495 - DNA, 4342 bp, Homo sapiens
gagcgcccgtggggcgggcctcagcggcggcgcgacaagtccagaggtgagggctgaggaaggggcgtggctagcgggctggcctcagccaccctcttccgggctccgccagctgcgcgcgcatcttctcccccttcttttgtggtccggcccattgcgagggtgacaggaaaccctgtgcagggagcgccgccatcttggaccagcccgaggaagatactgagggagcacaggagcagtcaccgctgccactgctactgccgctactgctgccggcgcgtctgcacctctcggcctgccagtgtacctgccggcgcctcggtcgaccgcccccgccccctctcccgctgcgtccgcactcctgttcctggtcctgacgcccccctcccgcccggaaagctgcccagccaccagcaaccccccagtgccaccatggcaactgcaccatacaactactcttacatctttaaatatattattattggggacatgggagtaggaaaatcttgcttgcttcatcaatttacagaaaaaaaatttatggctgattgtcctcacacaattggtgttgaatttggtacaagaataatcgaagttagtggccaaaaaataaaactgcagatttgggatacggcaggacaggagcgatttagggctgttacacggagctactacagaggagctgcgggagctcttatggtctatgatatcactagaagaagtacatataaccacttaagcagctggttgacagatgcaaggaatctcaccaatccaaatactgtaataattctcataggaaataaagcagatttggaggcacagagagatgttacatatgaagaagccaaacagtttgctgaagaaaatggcttattgttcctcgaagcgagtgcaaaaacgggagagaatgtagaagatgccttccttgaggctgccaagaaaatctatcagaacattcaggatggaagcttggatctgaatgctgctgagtctggtgtacaacacaaaccttcagccccgcagggaggccggctaaccagtgaaccccaaccccagagagaaggctgtggctgctagtgacctctttgctgtggcccctcatttgacctttcacctctgtctgttggaagcagtactttttactgcctcattgtcttctgtacatcttactgggtttaattaaaaaaaaagaaaaaactctgttgtaaaaacagtttaacacaatactaaactgctaaacaactagatgtaatcaggttatcaaaggcaagtagagtaataaatctctcctgcatggtaaatctagactttttttcccccttgtcctcgtgataagtatgtcaccaatatatgatttaaaccgagcactgatgctggacttcatgatttttaccctccctttggcaaggctttgtctcactgtacggtttaatttggtgatatcttaagcctttcttcccatccttaactgttcaagtatgtctgttgtaaccaataagtttattgctgtgaaattacttctgatggtagagaaggggttctataactgcttttgttttgttttggataaatttcctgttgtgtgggtggcatttttcttaacgagatttgcttctgtcttagcctcacacagggaaaatatccatttatcttctctctcgtgcttaattaatagctttatctttttttataccattttatccttttctctttaacagaaagtaaatatgtataaaatttgaaggaatcgaactaacaatacattctgtgtatattattttaatgaagaaaataaattgattactggcattggaacagtataaaataccagtttgtacagtatgacctatatgtgaccatgttactcccttccatttcacacaaagaaatagacacaactgcagttcacaagtagtactggctccaccccttggtgctggcagtgtttggggacattatgctggaaagagctcctagcatcagaggattaacactagcagattctgttccatctttgcactgttgcttacctgctgattttcttaactgttcttgtgcaatcgacaatgtgctaacctgcttttctctttttgtaaacgtttttgcattacaggctgcattcttgccttactgtatagaaaaagaaaaaaggctgggtttactattgcacattttaagcttttatacctttatcttcttggaatggtcagattctgaactggacagtcagaaccacaggtctgctgttaagggattttaaattgtgcatttttaaccctacagtgaaataacttaagatatccctgtgttcacagtgtgaggggctgttttatgtcatgttggcataaattgttttgtaaaagggaaagtgtttctaaaggtgtttcagcgcttgtgctgatacaaagtaagttattactttgcaccaggtggtttggccactgaattaatactgtatagcaagagaaacaatcttatttttttggacaacatgttttattaagttcttcatttctgttgattttttttattgcatttatgattcagtggctgggaattgagaatttatttgaaatagaataggtaacacctcagcgtactatagaaaatgcactcagctcaactgctgtgtttaaaatacacattttaaatccctctttacagacactaacataaaagtacatctttctgggttgtaaacatgtggtagtaccagagtattgtatagtcaatgttaaataaaagccaaaactggaatgtgcagaaagtaggctttggttaatttgtggattcatttttatttttgtctttgtttaactttttaaaaaataagatttctggagtagattggtatattctgttaaagacttacagtgatccattttgcttacactgttgcatcacaagggactcacccagggaccatgacctgctggtgtgtgtgtatatttacaaaaacaaaacaaacaaaccacccattgggatataaggtagcaatcacaaactaaagactgcggcttgttgaggtgcaataccctgactcccaaagttagttacagtgggttttattgtttttgtgactgaaggatttattcagactgctgtactcttcatttgatgtaacaaaatgctattaatctaaatatttgtaaataaagtacctgtatctagattaaattaaaattggttgcattattttctgaactataatagggtttttcttcaggtgaacaatttgacgtgtcatcagtttttattgcagcactgtccatattcattgtataaagagaggtctacgtatgtagcatataaaaccacatcactaagtaatagacccacagctttattcttgtgtttacattacccttgaaatgttttcagtcaacccttttcagtgtaagatcagcacatttggtggctgatgctgttctcctttgactgtaccgggagccagattctatcatatgcatgtgtaatcccctgtaatacactcaggtgctcacaaatagagcagattgtcatattgtaacatgcgtgtgccagacaccgggcagtacactttggaaagaatgtgaaatccttttaatttttaatccatagcttactgcttgtgcagtcacctgcctcttgaggttgctcattgcccttggacctgtgaggaggccttcagattagtaattggtgcttagtactatttatgcttaaatagatcttccagtacaatgttgaagtcttttttatggataataacgtgtttgatggagtaacttattatttttttttggttggtggtttacacgttaatagaggtagtacaatttctttggaaaggtgtcttttgaagccagctgttaagcttcatacattacctcccttctcaaattcggtaagacagtagttttggggaacttttttgcccatgtgtcttttaagtgtgattttaaaaaaatgagtggttcagttcattcccctaaacagaagaaaagaccaaataattaccttccattcctcttcatgtgggaatatagagagggttcatgtggcattttagagaaaagataatttatcctcattcaacacaggcccagaaaattgtgtcccagaaggatgtcagtaattgtgactaggccaggccttttagcattttgctaagacttgaaacaaaaaatgtaaatacaaaagaaatcaagttttgttttgaaagatgccttctagaacttactgtgtattaataaattgtcactttcattgtctttattgtaactccattgatcccgtatcttaacggttcacgtctagccaaataactgttttggaataaaaaccttggtggtgaggg

SEQ ID NO: 5496 - protein, 215 aa, Homo sapiens; identical to SEQ ID NO: 726

SEQ ID NO: 5497 - DNA, 4283 bp, Homo sapiens
gagcgcccgtggggcgggcctcagcggcggcgcgacaagtccagaggtgagggctgaggaaggggcgtggctagcgggctggcctcagccaccctcttccgggctccgccagctgcgcgcgcatcttctcccccttcttttgtggtccggcccattgcgagggtgacaggaaaccctgtgcagggagcgccgccatcttggaccagcccgaggaagatactgagggagcacaggagcagtcaccgctgccactgctactgccgctactgctgccggcgcgtctgcacctctcggcctgccagtgtacctgccggcgcctcggtcgaccgcccccgccccctctcccgctgcgtccgcactcctgttcctggtcctgacgcccccctcccgcccggaaagctgcccagccaccagcaaccccccaggggacatgggagtaggaaaatcttgcttgcttcatcaatttacagaaaaaaaatttatggctgattgtcctcacacaattggtgttgaatttggtacaagaataatcgaagttagtggccaaaaaataaaactgcagatttgggatacggcaggacaggagcgatttagggctgttacacggagctactacagaggagctgcgggagctcttatggtctatgatatcactagaagaagtacatataaccacttaagcagctggttgacagatgcaaggaatctcaccaatccaaatactgtaataattctcataggaaataaagcagatttggaggcacagagagatgttacatatgaagaagccaaacagtttgctgaagaaaatggcttattgttcctcgaagcgagtgcaaaaacgggagagaatgtagaagatgccttccttgaggctgccaagaaaatctatcagaacattcaggatggaagcttggatctgaatgctgctgagtctggtgtacaacacaaaccttcagccccgcagggaggccggctaaccagtgaaccccaaccccagagagaaggctgtggctgctagtgacctctttgctgtggcccctcatttgacctttcacctctgtctgttggaagcagtactttttactgcctcattgtcttctgtacatcttactgggtttaattaaaaaaaaagaaaaaactctgttgtaaaaacagtttaacacaatactaaactgctaaacaactagatgtaatcaggttatcaaaggcaagtagagtaataaatctctcctgcatggtaaatctagactttttttcccccttgtcctcgtgataagtatgtcaccaatatatgatttaaaccgagcactgatgctggacttcatgatttttaccctccctttggcaaggctttgtctcactgtacggtttaatttggtgatatcttaagcctttcttcccatccttaactgttcaagtatgtctgttgtaaccaataagtttattgctgtgaaattacttctgatggtagagaaggggttctataactgcttttgttttgttttggataaatttcctgttgtgtgggtggcatttttcttaacgagatttgcttctgtcttagcctcacacagggaaaatatccatttatcttctctctcgtgcttaattaatagctttatctttttttataccattttatccttttctctttaacagaaagtaaatatgtataaaatttgaaggaatcgaactaacaatacattctgtgtatattattttaatgaagaaaataaattgattactggcattggaacagtataaaataccagtttgtacagtatgacctatatgtgaccatgttactcccttccatttcacacaaagaaatagacacaactgcagttcacaagtagtactggctccaccccttggtgctggcagtgtttggggacattatgctggaaagagctcctagcatcagaggattaacactagcagattctgttccatctttgcactgttgcttacctgctgattttcttaactgttcttgtgcaatcgacaatgtgctaacctgcttttctctttttgtaaacgtttttgcattacaggctgcattcttgccttactgtatagaaaaagaaaaaaggctgggtttactattgcacattttaagcttttatacctttatcttcttggaatggtcagattctgaactggacagtcagaaccacaggtctgctgttaagggattttaaattgtgcatttttaaccctacagtgaaataacttaagatatccctgtgttcacagtgtgaggggctgttttatgtcatgttggcataaattgttttgtaaaagggaaagtgtttctaaaggtgtttcagcgcttgtgctgatacaaagtaagttattactttgcaccaggtggtttggccactgaattaatactgtatagcaagagaaacaatcttatttttttggacaacatgttttattaagttcttcatttctgttgattttttttattgcatttatgattcagtggctgggaattgagaatttatttgaaatagaataggtaacacctcagcgtactatagaaaatgcactcagctcaactgctgtgtttaaaatacacattttaaatccctctttacagacactaacataaaagtacatctttctgggttgtaaacatgtggtagtaccagagtattgtatagtcaatgttaaataaaagccaaaactggaatgtgcagaaagtaggctttggttaatttgtggattcatttttatttttgtctttgtttaactttttaaaaaataagatttctggagtagattggtatattctgttaaagacttacagtgatccattttgcttacactgttgcatcacaagggactcacccagggaccatgacctgctggtgtgtgtgtatatttacaaaaacaaaacaaacaaaccacccattgggatataaggtagcaatcacaaactaaagactgcggcttgttgaggtgcaataccctgactcccaaagttagttacagtgggttttattgtttttgtgactgaaggatttattcagactgctgtactcttcatttgatgtaacaaaatgctattaatctaaatatttgtaaataaagtacctgtatctagattaaattaaaattggttgcattattttctgaactataatagggtttttcttcaggtgaacaatttgacgtgtcatcagtttttattgcagcactgtccatattcattgtataaagagaggtctacgtatgtagcatataaaaccacatcactaagtaatagacccacagctttattcttgtgtttacattacccttgaaatgttttcagtcaacccttttcagtgtaagatcagcacatttggtggctgatgctgttctcctttgactgtaccgggagccagattctatcatatgcatgtgtaatcccctgtaatacactcaggtgctcacaaatagagcagattgtcatattgtaacatgcgtgtgccagacaccgggcagtacactttggaaagaatgtgaaatccttttaatttttaatccatagcttactgcttgtgcagtcacctgcctcttgaggttgctcattgcccttggacctgtgaggaggccttcagattagtaattggtgcttagtactatttatgcttaaatagatcttccagtacaatgttgaagtcttttttatggataataacgtgtttgatggagtaacttattatttttttttggttggtggtttacacgttaatagaggtagtacaatttctttggaaaggtgtcttttgaagccagctgttaagcttcatacattacctcccttctcaaattcggtaagacagtagttttggggaacttttttgcccatgtgtcttttaagtgtgattttaaaaaaatgagtggttcagttcattcccctaaacagaagaaaagaccaaataattaccttccattcctcttcatgtgggaatatagagagggttcatgtggcattttagagaaaagataatttatcctcattcaacacaggcccagaaaattgtgtcccagaaggatgtcagtaattgtgactaggccaggccttttagcattttgctaagacttgaaacaaaaaatgtaaatacaaaagaaatcaagttttgttttgaaagatgccttctagaacttactgtgtattaataaattgtcactttcattgtctttattgtaactccattgatcccgtatcttaacggttcacgtctagccaaataactgttttggaataaaaaccttggtggtgaggg

SEQ ID NO: 5498 - protein, 196 aa, Homo sapiens
MGVGKSCLLHQFTEKKFMADCPHTIGVEFGTRIIEVSGQKIKLQIWDTAGQERFRAVTRSYYRGAAGALMVYDITRRSTYNHLSSWLTDARNLTNPNTVIILIGNKADLEAQRDVTYEEAKQFAEENGLLFLEASAKTGENVEDAFLEAAKKIYQNIQDGSLDLNAAESGVQHKPSAPQGGRLTSEPQPQREGCGC

SEQ ID NO: 5499 - DNA, 4076 bp, Homo sapiens
acatgcgcccctctcaagtgctggcagaccactgtgcatgcagacaacgcacccaaagggaagaatcaggggaacagtaacgcaaccctgccagcatgccaatgtagaaaacttgaaagaatgaacacaaaaatgtttacaaaggatatcatggcagagtgccaccatggcaactgcaccatacaactactcttacatctttaaatatattattattggggacatgggagtaggaaaatcttgcttgcttcatcaatttacagaaaaaaaatttatggctgattgtcctcacacaattggtgttgaatttggtacaagaataatcgaagttagtggccaaaaaataaaactgcagatttgggatacggcaggacaggagcgatttagggctgttacacggagctactacagaggagctgcgggagctcttatggtctatgatatcactagaagaagtacatataaccacttaagcagctggttgacagatgcaaggaatctcaccaatccaaatactgtaataattctcataggaaataaagcagatttggaggcacagagagatgttacatatgaagaagccaaacagtttgctgaagaaaatggcttattgttcctcgaagcgagtgcaaaaacgggagagaatgtagaagatgccttccttgaggctgccaagaaaatctatcagaacattcaggatggaagcttggatctgaatgctgctgagtctggtgtacaacacaaaccttcagccccgcagggaggccggctaaccagtgaaccccaaccccagagagaaggctgtggctgctagtgacctctttgctgtggcccctcatttgacctttcacctctgtctgttggaagcagtactttttactgcctcattgtcttctgtacatcttactgggtttaattaaaaaaaaagaaaaaactctgttgtaaaaacagtttaacacaatactaaactgctaaacaactagatgtaatcaggttatcaaaggcaagtagagtaataaatctctcctgcatggtaaatctagactttttttcccccttgtcctcgtgataagtatgtcaccaatatatgatttaaaccgagcactgatgctggacttcatgatttttaccctccctttggcaaggctttgtctcactgtacggtttaatttggtgatatcttaagcctttcttcccatccttaactgttcaagtatgtctgttgtaaccaataagtttattgctgtgaaattacttctgatggtagagaaggggttctataactgcttttgttttgttttggataaatttcctgttgtgtgggtggcatttttcttaacgagatttgcttctgtcttagcctcacacagggaaaatatccatttatcttctctctcgtgcttaattaatagctttatctttttttataccattttatccttttctctttaacagaaagtaaatatgtataaaatttgaaggaatcgaactaacaatacattctgtgtatattattttaatgaagaaaataaattgattactggcattggaacagtataaaataccagtttgtacagtatgacctatatgtgaccatgttactcccttccatttcacacaaagaaatagacacaactgcagttcacaagtagtactggctccaccccttggtgctggcagtgtttggggacattatgctggaaagagctcctagcatcagaggattaacactagcagattctgttccatctttgcactgttgcttacctgctgattttcttaactgttcttgtgcaatcgacaatgtgctaacctgcttttctctttttgtaaacgtttttgcattacaggctgcattcttgccttactgtatagaaaaagaaaaaaggctgggtttactattgcacattttaagcttttatacctttatcttcttggaatggtcagattctgaactggacagtcagaaccacaggtctgctgttaagggattttaaattgtgcatttttaaccctacagtgaaataacttaagatatccctgtgttcacagtgtgaggggctgttttatgtcatgttggcataaattgttttgtaaaagggaaagtgtttctaaaggtgtttcagcgcttgtgctgatacaaagtaagttattactttgcaccaggtggtttggccactgaattaatactgtatagcaagagaaacaatcttatttttttggacaacatgttttattaagttcttcatttctgttgattttttttattgcatttatgattcagtggctgggaattgagaatttatttgaaatagaataggtaacacctcagcgtactatagaaaatgcactcagctcaactgctgtgtttaaaatacacattttaaatccctctttacagacactaacataaaagtacatctttctgggttgtaaacatgtggtagtaccagagtattgtatagtcaatgttaaataaaagccaaaactggaatgtgcagaaagtaggctttggttaatttgtggattcatttttatttttgtctttgtttaactttttaaaaaataagatttctggagtagattggtatattctgttaaagacttacagtgatccattttgcttacactgttgcatcacaagggactcacccagggaccatgacctgctggtgtgtgtgtatatttacaaaaacaaaacaaacaaaccacccattgggatataaggtagcaatcacaaactaaagactgcggcttgttgaggtgcaataccctgactcccaaagttagttacagtgggttttattgtttttgtgactgaaggatttattcagactgctgtactcttcatttgatgtaacaaaatgctattaatctaaatatttgtaaataaagtacctgtatctagattaaattaaaattggttgcattattttctgaactataatagggtttttcttcaggtgaacaatttgacgtgtcatcagtttttattgcagcactgtccatattcattgtataaagagaggtctacgtatgtagcatataaaaccacatcactaagtaatagacccacagctttattcttgtgtttacattacccttgaaatgttttcagtcaacccttttcagtgtaagatcagcacatttggtggctgatgctgttctcctttgactgtaccgggagccagattctatcatatgcatgtgtaatcccctgtaatacactcaggtgctcacaaatagagcagattgtcatattgtaacatgcgtgtgccagacaccgggcagtacactttggaaagaatgtgaaatccttttaatttttaatccatagcttactgcttgtgcagtcacctgcctcttgaggttgctcattgcccttggacctgtgaggaggccttcagattagtaattggtgcttagtactatttatgcttaaatagatcttccagtacaatgttgaagtcttttttatggataataacgtgtttgatggagtaacttattatttttttttggttggtggtttacacgttaatagaggtagtacaatttctttggaaaggtgtcttttgaagccagctgttaagcttcatacattacctcccttctcaaattcggtaagacagtagttttggggaacttttttgcccatgtgtcttttaagtgtgattttaaaaaaatgagtggttcagttcattcccctaaacagaagaaaagaccaaataattaccttccattcctcttcatgtgggaatatagagagggttcatgtggcattttagagaaaagataatttatcctcattcaacacaggcccagaaaattgtgtcccagaaggatgtcagtaattgtgactaggccaggccttttagcattttgctaagacttgaaacaaaaaatgtaaatacaaaagaaatcaagttttgttttgaaagatgccttctagaacttactgtgtattaataaattgtcactttcattgtctttattgtaactccattgatcccgtatcttaacggttcacgtctagccaaataactgttttggaataaaaaccttggtggtgaggg

SEQ ID NO: 5500 - protein, 215 aa, Homo sapiens; identical to SEQ ID NO: 726

SEQ ID NO: 5501 - DNA, 3238 bp, Homo sapiens
ctgtgtatgatattacaaatatttgggtttgtttacttatcttagagcttacttggctagtgcaaatgagcctatgagtttttaaactcttgcttgggcagttagaattccagaataatttagctgcctgatagataagagaacaaagttaggacgaactttttcactgatatctggggacttgaattcttgtcaaatgtcttcaaagtcaattttatgctgttatagttagcttgctctttaaattattaaggaaaggtgaattgtatgccagcttataatagtgtgacttggtttttaatgaaattaaaatttaaagacaagcaaaagtgtcttccattaaatgtgtcatgtttaggcattttgatacaactttgtgctttgtgattgaaagtctgtatgatttcaaagtaatttgagttttgactccacattggcatttccatcaatttactgtgttgttccttgcttgcttattggtctgtttacggtatgcttttaggagtaaacaatttactcctgacctgtaattatcaaagttgttggatattgagttgtttatttaaaaatattaggtttggctagatttttgaaaagtatgcagttgtatttcacaactactgttctgagtaactggtcaaagcaaaattattattttaggatatgttgattaaatatgtattttaaatatttaagttttttttctataattatatggcagtcacaaatttaaacttttatttttgcagaagaagtacatataaccacttaagcagctggttgacagatgcaaggaatctcaccaatccaaatactgtaataattctcataggaaataaagcagatttggaggcacagagagatgttacatatgaagaagccaaacagtttgctgaagaaaatggcttattgttcctcgaagcgagtgcaaaaacgggagagaatgtagaagatgccttccttgaggctgccaagaaaatctatcagaacattcaggatggaagcttggatctgaatgctgctgagtctggtgtacaacacaaaccttcagccccgcagggaggccggctaaccagtgaaccccaaccccagagagaaggctgtggctgctagtgacctctttgctgtggcccctcatttgacctttcacctctgtctgttggaagcagtactttttactgcctcattgtcttctgtacatcttactgggtttaattaaaaaaaaagaaaaaactctgttgtaaaaacagtttaacacaatactaaactgctaaacaactagatgtaatcaggttatcaaaggcaagtagagtaataaatctctcctgcatggtaaatctagactttttttcccccttgtcctcgtgataagtatgtcaccaatatatgatttaaaccgagcactgatgctggacttcatgatttttaccctccctttggcaaggctttgtctcactgtacggtttaatttggtgatatcttaagcctttcttcccatccttaactgttcaagtatgtctgttgtaaccaataagtttattgctgtgaaattacttctgatggtagagaaggggttctataactgcttttgttttgttttggataaatttcctgttgtgtgggtggcatttttcttaacgagatttgcttctgtcttagcctcacacagggaaaatatccatttatcttctctctcgtgcttaattaatagctttatctttttttataccattttatccttttctctttaacagaaagtaaatatgtataaaatttgaaggaatcgaactaacaatacattctgtgtatattattttaatgaagaaaataaattgattactggcattggaacagtataaaataccagtttgtacagtatgacctatatgtgaccatgttactcccttccatttcacacaaagaaatagacacaactgcagttcacaagtagtactggctccaccccttggtgctggcagtgtttggggacattatgctggaaagagctcctagcatcagaggattaacactagcagattctgttccatctttgcactgttgcttacctgctgattttcttaactgttcttgtgcaatcgacaatgtgctaacctgcttttctctttttgtaaacgtttttgcattacaggctgcattcttgccttactgtatagaaaaagaaaaaaggctgggtttactattgcacattttaagcttttatacctttatcttcttggaatggtcagattctgaactggacagtcagaaccacaggtctgctgttaagggattttaaattgtgcatttttaaccctacagtgaaataacttaagatatccctgtgttcacagtgtgaggggctgttttatgtcatgttggcataaattgttttgtaaaagggaaagtgtttctaaaggtgtttcagcgcttgtgctgatacaaagtaagttattactttgcaccaggtggtttggccactgaattaatactgtatagcaagagaaacaatcttatttttttggacaacatgttttattaagttcttcatttctgttgattttttttattgcatttatgattcagtggctgggaattgagaatttatttgaaatagaataggtaacacctcagcgtactatagaaaatgcactcagctcaactgctgtgtttaaaatacacattttaaatccctctttacagacactaacataaaagtacatctttctgggttgtaaacatgtggtagtaccagagtattgtatagtcaatgttaaataaaagccaaaactggaatgtgcagaaagtaggctttggttaatttgtggattcatttttatttttgtctttgtttaactttttaaaaaataagatttctggagtagattggtatattctgttaaagacttacagtgatccattttgcttacactgttgcatcacaagggactcacccagggaccatgacctgctggtgtgtgtgtatatttacaaaaacaaaacaaacaaaccacccattgggatataaggtagcaatcacaaactaaagactgcggcttgttgaggtgcaataccctgactcccaaagttagttacagtgggttttattgtttttgtgactgaaggatttattcagactgctgtactcttcatttgatgtaacaaaatgctattaatctaaatatttgtaaataaagtacctgtatctagattaaattaaaattggttgcattattttctg

SEQ ID NO: 5502 - protein, 132 aa, Homo sapiens [sequence omitted]

SEQ ID NO: 5503 - DNA, 3205 bp, Homo sapiens
gagcgcccgtggggcgggcctcagcggcggcgcgacaagtccagaggtgagggctgaggaaggggcgtggctagcgggctggcctcagccaccctcttccgggctccgccagctgcgcgcgcatcttctcccccttcttttgtggtccggcccattgcgagggtgacaggaaaccctgtgcagggagcgccgccatcttggaccagcccgaggaagatactgagggagcacaggagcagtcaccgctgccactgctactgccgctactgctgccggcgcgtctgcacctctcggcctgccagtgtacctgccggcgcctcggtcgaccgcccccgccccctctcccgctgcgtccgcactcctgttcctggtcctgacgcccccctcccgcccggaaagctgcccagccaccagcaaccccccagtgccaccatggcaactgcaccatacaactactcttacatctttaaatatattattattggggacatgggagtaggaaaatcttgcttgcttcatcaatttacagaaaaaaaatttatggctgattgtcctcacacaattggtgttgaatttggtacaagaataatcgaagttagtggccaaaaaataaaactgcagatttgggatacggcaggacaggagcgatttagggctgttacacggagctactacagaggagctgcgggagctcttatggtctatgatatcactagaagaagtacatataaccacttaagcagctggttgacagatgcaaggaatctcaccaatccaaatactgtaataattctcataggaaataaagcagatttggaggcacagagagatgttacatatgaagaagccaaacagtttgctgaagaaaatggcttattgttcctcgaagcgagtgcaaaaacgggagagaatgtagaagatgccttccttgaggctgccaagaaaatctatcagaacattcaggatggaagcttggatctgaatgctgctgagtctggtgtacaacacaaaccttcagccccgcagggaggccggctaaccagtgaaccccaaccccagagagaaggctgtggctgctagtgacctctttgctgtggcccctcatttgacctttcacctctgtctgttggaagcagtactttttactgcctcattgtcttctgtacatcttactgggtttaattaaaaaaaaagaaaaaactctgttgtaaaaacagtttaacacaatactaaactgctaaacaactagatgtaatcaggttatcaaaggcaagtagagtaataaatctctcctgcatggtaaatctagactttttttcccccttgtcctcgtgataagtatgtcaccaatatatgatttaaaccgagcactgatgctggacttcatgatttttaccctccctttggcaaggctttgtctcactgtacggtttaatttggtgatatcttaagcctttcttcccatccttaactgttcaagtatgtctgttgtaaccaataagtttattgctgtgaaattacttctgatggtagagaaggggttctataactgcttttgttttgttttggataaatttcctgttgtgtgggtggcatttttcttaacgagatttgcttctgtcttagcctcacacagggaaaatatccatttatcttctctctcgtgcttaattaatagctttatctttttttataccattttatccttttctctttaacagaaagtaaatatgtataaaatttgaaggaatcgaactaacaatacattctgtgtatattattttaatgaagaaaataaattgattactggcattggaacagtataaaataccagtttgtacagtatgacctatatgtgaccatgttactcccttccatttcacacaaagaaatagacacaactgcagttcacaagtagtactggctccaccccttggtgctggcagtgtttggggacattatgctggaaagagctcctagcatcagaggattaacactagcagattctgttccatctttgcactgttgcttacctgctgattttcttaactgttcttgtgcaatcgacaatgtgctaacctgcttttctctttttgtaaacgtttttgcattacaggctgcattcttgccttactgtatagaaaaagaaaaaaggctgggtttactattgcacattttaagcttttatacctttatcttcttggaatggtcagattctgaactggacagtcagaaccacaggtctgctgttaagggattttaaattgtgcatttttaaccctacagtgaaataacttaagatatccctgtgttcacagtgtgaggggctgttttatgtcatgttggcataaattgttttgtaaaagggaaagtgtttctaaaggtgtttcagcgcttgtgctgatacaaagtaagttattactttgcaccaggtggtttggccactgaattaatactgtatagcaagagaaacaatcttatttttttggacaacatgttttattaagttcttcatttctgttgattttttttattgcatttatgattcagtggctgggaattgagaatttatttgaaatagaataggtaacacctcagcgtactatagaaaatgcactcagctcaactgctgtgtttaaaatacacattttaaatccctctttacagacactaacataaaagtacatctttctgggttgtaaacatgtggtagtaccagagtattgtatagtcaatgttaaataaaagccaaaactggaatgtgcagaaagtaggctttggttaatttgtggattcatttttatttttgtctttgtttaactttttaaaaaataagatttctggagtagattggtatattctgttaaagacttacagtgatccattttgcttacactgttgcatcacaagggactcacccagggaccatgacctgctggtgtgtgtgtatatttacaaaaacaaaacaaacaaaccacccattgggatataaggtagcaatcacaaactaaagactgcggcttgttgaggtgcaataccctgactcccaaagttagttacagtgggttttattgtttttgtgactgaaggatttattcagactgctgtactcttcatttgatgtaacaaaatgctattaatctaaatatttgtaaataaagtacctgtatctagattaaattaaaattggttgcattattttctg

SEQ ID NO: 5504 - protein, 215 aa, Homo sapiens; identical to SEQ ID NO: 726

SEQ ID NO: 5505 - DNA, 3146 bp, Homo sapiens
gagcgcccgtggggcgggcctcagcggcggcgcgacaagtccagaggtgagggctgaggaaggggcgtggctagcgggctggcctcagccaccctcttccgggctccgccagctgcgcgcgcatcttctcccccttcttttgtggtccggcccattgcgagggtgacaggaaaccctgtgcagggagcgccgccatcttggaccagcccgaggaagatactgagggagcacaggagcagtcaccgctgccactgctactgccgctactgctgccggcgcgtctgcacctctcggcctgccagtgtacctgccggcgcctcggtcgaccgcccccgccccctctcccgctgcgtccgcactcctgttcctggtcctgacgcccccctcccgcccggaaagctgcccagccaccagcaaccccccaggggacatgggagtaggaaaatcttgcttgcttcatcaatttacagaaaaaaaatttatggctgattgtcctcacacaattggtgttgaatttggtacaagaataatcgaagttagtggccaaaaaataaaactgcagatttgggatacggcaggacaggagcgatttagggctgttacacggagctactacagaggagctgcgggagctcttatggtctatgatatcactagaagaagtacatataaccacttaagcagctggttgacagatgcaaggaatctcaccaatccaaatactgtaataattctcataggaaataaagcagatttggaggcacagagagatgttacatatgaagaagccaaacagtttgctgaagaaaatggcttattgttcctcgaagcgagtgcaaaaacgggagagaatgtagaagatgccttccttgaggctgccaagaaaatctatcagaacattcaggatggaagcttggatctgaatgctgctgagtctggtgtacaacacaaaccttcagccccgcagggaggccggctaaccagtgaaccccaaccccagagagaaggctgtggctgctagtgacctctttgctgtggcccctcatttgacctttcacctctgtctgttggaagcagtactttttactgcctcattgtcttctgtacatcttactgggtttaattaaaaaaaaagaaaaaactctgttgtaaaaacagtttaacacaatactaaactgctaaacaactagatgtaatcaggttatcaaaggcaagtagagtaataaatctctcctgcatggtaaatctagactttttttcccccttgtcctcgtgataagtatgtcaccaatatatgatttaaaccgagcactgatgctggacttcatgatttttaccctccctttggcaaggctttgtctcactgtacggtttaatttggtgatatcttaagcctttcttcccatccttaactgttcaagtatgtctgttgtaaccaataagtttattgctgtgaaattacttctgatggtagagaaggggttctataactgcttttgttttgttttggataaatttcctgttgtgtgggtggcatttttcttaacgagatttgcttctgtcttagcctcacacagggaaaatatccatttatcttctctctcgtgcttaattaatagctttatctttttttataccattttatccttttctctttaacagaaagtaaatatgtataaaatttgaaggaatcgaactaacaatacattctgtgtatattattttaatgaagaaaataaattgattactggcattggaacagtataaaataccagtttgtacagtatgacctatatgtgaccatgttactcccttccatttcacacaaagaaatagacacaactgcagttcacaagtagtactggctccaccccttggtgctggcagtgtttggggacattatgctggaaagagctcctagcatcagaggattaacactagcagattctgttccatctttgcactgttgcttacctgctgattttcttaactgttcttgtgcaatcgacaatgtgctaacctgcttttctctttttgtaaacgtttttgcattacaggctgcattcttgccttactgtatagaaaaagaaaaaaggctgggtttactattgcacattttaagcttttatacctttatcttcttggaatggtcagattctgaactggacagtcagaaccacaggtctgctgttaagggattttaaattgtgcatttttaaccctacagtgaaataacttaagatatccctgtgttcacagtgtgaggggctgttttatgtcatgttggcataaattgttttgtaaaagggaaagtgtttctaaaggtgtttcagcgcttgtgctgatacaaagtaagttattactttgcaccaggtggtttggccactgaattaatactgtatagcaagagaaacaatcttatttttttggacaacatgttttattaagttcttcatttctgttgattttttttattgcatttatgattcagtggctgggaattgagaatttatttgaaatagaataggtaacacctcagcgtactatagaaaatgcactcagctcaactgctgtgtttaaaatacacattttaaatccctctttacagacactaacataaaagtacatctttctgggttgtaaacatgtggtagtaccagagtattgtatagtcaatgttaaataaaagccaaaactggaatgtgcagaaagtaggctttggttaatttgtggattcatttttatttttgtctttgtttaactttttaaaaaataagatttctggagtagattggtatattctgttaaagacttacagtgatccattttgcttacactgttgcatcacaagggactcacccagggaccatgacctgctggtgtgtgtgtatatttacaaaaacaaaacaaacaaaccacccattgggatataaggtagcaatcacaaactaaagactgcggcttgttgaggtgcaataccctgactcccaaagttagttacagtgggttttattgtttttgtgactgaaggatttattcagactgctgtactcttcatttgatgtaacaaaatgctattaatctaaatatttgtaaataaagtacctgtatctagattaaattaaaattggttgcattattttctg

SEQ ID NO: 5506 - protein, 196 aa, Homo sapiens; identical to SEQ ID NO: 5498

SEQ ID NO: 5507 - DNA, 2939 bp, Homo sapiens
acatgcgcccctctcaagtgctggcagaccactgtgcatgcagacaacgcacccaaagggaagaatcaggggaacagtaacgcaaccctgccagcatgccaatgtagaaaacttgaaagaatgaacacaaaaatgtttacaaaggatatcatggcagagtgccaccatggcaactgcaccatacaactactcttacatctttaaatatattattattggggacatgggagtaggaaaatcttgcttgcttcatcaatttacagaaaaaaaatttatggctgattgtcctcacacaattggtgttgaatttggtacaagaataatcgaagttagtggccaaaaaataaaactgcagatttgggatacggcaggacaggagcgatttagggctgttacacggagctactacagaggagctgcgggagctcttatggtctatgatatcactagaagaagtacatataaccacttaagcagctggttgacagatgcaaggaatctcaccaatccaaatactgtaataattctcataggaaataaagcagatttggaggcacagagagatgttacatatgaagaagccaaacagtttgctgaagaaaatggcttattgttcctcgaagcgagtgcaaaaacgggagagaatgtagaagatgccttccttgaggctgccaagaaaatctatcagaacattcaggatggaagcttggatctgaatgctgctgagtctggtgtacaacacaaaccttcagccccgcagggaggccggctaaccagtgaaccccaaccccagagagaaggctgtggctgctagtgacctctttgctgtggcccctcatttgacctttcacctctgtctgttggaagcagtactttttactgcctcattgtcttctgtacatcttactgggtttaattaaaaaaaaagaaaaaactctgttgtaaaaacagtttaacacaatactaaactgctaaacaactagatgtaatcaggttatcaaaggcaagtagagtaataaatctctcctgcatggtaaatctagactttttttcccccttgtcctcgtgataagtatgtcaccaatatatgatttaaaccgagcactgatgctggacttcatgatttttaccctccctttggcaaggctttgtctcactgtacggtttaatttggtgatatcttaagcctttcttcccatccttaactgttcaagtatgtctgttgtaaccaataagtttattgctgtgaaattacttctgatggtagagaaggggttctataactgcttttgttttgttttggataaatttcctgttgtgtgggtggcatttttcttaacgagatttgcttctgtcttagcctcacacagggaaaatatccatttatcttctctctcgtgcttaattaatagctttatctttttttataccattttatccttttctctttaacagaaagtaaatatgtataaaatttgaaggaatcgaactaacaatacattctgtgtatattattttaatgaagaaaataaattgattactggcattggaacagtataaaataccagtttgtacagtatgacctatatgtgaccatgttactcccttccatttcacacaaagaaatagacacaactgcagttcacaagtagtactggctccaccccttggtgctggcagtgtttggggacattatgctggaaagagctcctagcatcagaggattaacactagcagattctgttccatctttgcactgttgcttacctgctgattttcttaactgttcttgtgcaatcgacaatgtgctaacctgcttttctctttttgtaaacgtttttgcattacaggctgcattcttgccttactgtatagaaaaagaaaaaaggctgggtttactattgcacattttaagcttttatacctttatcttcttggaatggtcagattctgaactggacagtcagaaccacaggtctgctgttaagggattttaaattgtgcatttttaaccctacagtgaaataacttaagatatccctgtgttcacagtgtgaggggctgttttatgtcatgttggcataaattgttttgtaaaagggaaagtgtttctaaaggtgtttcagcgcttgtgctgatacaaagtaagttattactttgcaccaggtggtttggccactgaattaatactgtatagcaagagaaacaatcttatttttttggacaacatgttttattaagttcttcatttctgttgattttttttattgcatttatgattcagtggctgggaattgagaatttatttgaaatagaataggtaacacctcagcgtactatagaaaatgcactcagctcaactgctgtgtttaaaatacacattttaaatccctctttacagacactaacataaaagtacatctttctgggttgtaaacatgtggtagtaccagagtattgtatagtcaatgttaaataaaagccaaaactggaatgtgcagaaagtaggctttggttaatttgtggattcatttttatttttgtctttgtttaactttttaaaaaataagatttctggagtagattggtatattctgttaaagacttacagtgatccattttgcttacactgttgcatcacaagggactcacccagggaccatgacctgctggtgtgtgtgtatatttacaaaaacaaaacaaacaaaccacccattgggatataaggtagcaatcacaaactaaagactgcggcttgttgaggtgcaataccctgactcccaaagttagttacagtgggttttattgtttttgtgactgaaggatttattcagactgctgtactcttcatttgatgtaacaaaatgctattaatctaaatatttgtaaataaagtacctgtatctagattaaattaaaattggttgcattattttctg

SEQ ID NO: 5508 - protein, 215 aa, Homo sapiens; identical to SEQ ID NO: 726

SEQ ID NO: 5509 - DNA, 2767 bp, Homo sapiens
gagcgcccgtggggcgggcctcagcggcggcgcgacaagtccagaggtgagggctgaggaaggggcgtggctagcgggctggcctcagccaccctcttccgggctccgccagctgcgcgcgcatcttctcccccttcttttgtggtccggcccattgcgagggtgacaggaaaccctgtgcagggagcgccgccatcttggaccagcccgaggaagatactgagggagcacaggagcagtcaccgctgccactgctactgccgctactgctgccggcgcgtctgcacctctcggcctgccagtgtacctgccggcgcctcggtcgaccgcccccgccccctctcccgctgcgtccgcactcctgttcctggtcctgacgcccccctcccgcccggaaagctgcccagccaccagcaaccccccagtgccaccatggcaactgcaccatacaactactcttacatctttaaatatattattattggggacatgggagtaggaaaatcttgcttgcttcatcaatttacagaaaaaaaatttatggctgattgtcctcacacaattggtgttgaatttggtacaagaataatcgaagttagtggccaaaaaataaaactgcagatttgggatacggcaggacaggagcgatttagggctgttacacggagctactacagaggagctgcgggagctcttatggtctatgatatcactagaagaagtacatataaccacttaagcagctggttgacagatgcaaggaatctcaccaatccaaatactgtaataattctcataggaaataaagcagatttggaggcacagagagatgttacatatgaagaagccaaacagtttgctgaagaaaatggcttattgttcctcgaagcgagtgcaaaaacgggagagaatgtagaagatgccttccttgaggctgccaagaaaatctatcagaacattcaggatggaagcttggatctgaatgctgctgagtctggtgtacaacacaaaccttcagccccgcagggaggccggctaaccagtgaaccccaaccccagagagaaggctgtggctgctagtgacctctttgctgtggcccctcatttgacctttcacctctgtctgttggaagcagtactttttactgcctcattgtcttctgtacatcttactgggtttaattaaaaaaaaagaaaaaactctgttgtaaaaacagtttaacacaatactaaactgctaaacaactagatgtaatcaggttatcaaaggcaagtagagtaataaatctctcctgcatggtaaatctagactttttttcccccttgtcctcgtgataagtatgtcaccaatatatgatttaaaccgagcactgatgctggacttcatgatttttaccctccctttggcaaggctttgtctcactgtacggtttaatttggtgatatcttaagcctttcttcccatccttaactgttcaagtatgtctgttgtaaccaataagtttattgctgtgaaattacttctgatggtagagaaggggttctataactgcttttgttttgttttggataaatttcctgttgtgtgggtggcatttttcttaacgagatttgcttctgtcttagcctcacacagggaaaatatccatttatcttctctctcgtgcttaattaatagctttatctttttttataccattttatccttttctctttaacagaaagtaaatatgtataaaatttgaaggaatcgaactaacaatacattctgtgtatattattttaatgaagaaaataaattgattactggcattggaacagtataaaataccagtttgtacagtatgacctatatgtgaccatgttactcccttccatttcacacaaagaaatagacacaactgcagttcacaagtagtactggctccaccccttggtgctggcagtgtttggggacattatgctggaaagagctcctagcatcagaggattaacactagcagattctgttccatctttgcactgttgcttacctgctgattttcttaactgttcttgtgcaatcgacaatgtgctaacctgcttttctctttttgtaaacgtttttgcattacaggctgcattcttgccttactgtatagaaaaagaaaaaaggctgggtttactattgcacattttaagcttttatacctttatcttcttggaatggtcagattctgaactggacagtcagaaccacaggtctgctgttaagggattttaaattgtgcatttttaaccctacagtgaaataacttaagatatccctgtgttcacagtgtgaggggctgttttatgtcatgttggcataaattgttttgtaaaagggaaagtgtttctaaaggtgtttcagcgcttgtgctgatacaaagtaagttattactttgcaccaggtggtttggccactgaattaatactgtatagcaagagaaacaatcttatttttttggacaacatgttttattaagttcttcatttctgttgattttttttattgcatttatgattcagtggctgggaattgagaatttatttgaaatagaataggtaacacctcagcgtactatagaaaatgcactcagctcaactgctgtgtttaaaatacacattttaaatccctctttacagacactaacataaaagtacatctttctgggttgtaaacatgtggtagtaccagagtattgtatagtcaatgttaaataaaagccaaaactggaatgtgcag

SEQ ID NO: 5510 - protein, 215 aa, Homo sapiens; identical to SEQ ID NO: 726

SEQ ID NO: 5511 - DNA, 2708 bp, Homo sapiens
gagcgcccgtggggcgggcctcagcggcggcgcgacaagtccagaggtgagggctgaggaaggggcgtggctagcgggctggcctcagccaccctcttccgggctccgccagctgcgcgcgcatcttctcccccttcttttgtggtccggcccattgcgagggtgacaggaaaccctgtgcagggagcgccgccatcttggaccagcccgaggaagatactgagggagcacaggagcagtcaccgctgccactgctactgccgctactgctgccggcgcgtctgcacctctcggcctgccagtgtacctgccggcgcctcggtcgaccgcccccgccccctctcccgctgcgtccgcactcctgttcctggtcctgacgcccccctcccgcccggaaagctgcccagccaccagcaaccccccaggggacatgggagtaggaaaatcttgcttgcttcatcaatttacagaaaaaaaatttatggctgattgtcctcacacaattggtgttgaatttggtacaagaataatcgaagttagtggccaaaaaataaaactgcagatttgggatacggcaggacaggagcgatttagggctgttacacggagctactacagaggagctgcgggagctcttatggtctatgatatcactagaagaagtacatataaccacttaagcagctggttgacagatgcaaggaatctcaccaatccaaatactgtaataattctcataggaaataaagcagatttggaggcacagagagatgttacatatgaagaagccaaacagtttgctgaagaaaatggcttattgttcctcgaagcgagtgcaaaaacgggagagaatgtagaagatgccttccttgaggctgccaagaaaatctatcagaacattcaggatggaagcttggatctgaatgctgctgagtctggtgtacaacacaaaccttcagccccgcagggaggccggctaaccagtgaaccccaaccccagagagaaggctgtggctgctagtgacctctttgctgtggcccctcatttgacctttcacctctgtctgttggaagcagtactttttactgcctcattgtcttctgtacatcttactgggtttaattaaaaaaaaagaaaaaactctgttgtaaaaacagtttaacacaatactaaactgctaaacaactagatgtaatcaggttatcaaaggcaagtagagtaataaatctctcctgcatggtaaatctagactttttttcccccttgtcctcgtgataagtatgtcaccaatatatgatttaaaccgagcactgatgctggacttcatgatttttaccctccctttggcaaggctttgtctcactgtacggtttaatttggtgatatcttaagcctttcttcccatccttaactgttcaagtatgtctgttgtaaccaataagtttattgctgtgaaattacttctgatggtagagaaggggttctataactgcttttgttttgttttggataaatttcctgttgtgtgggtggcatttttcttaacgagatttgcttctgtcttagcctcacacagggaaaatatccatttatcttctctctcgtgcttaattaatagctttatctttttttataccattttatccttttctctttaacagaaagtaaatatgtataaaatttgaaggaatcgaactaacaatacattctgtgtatattattttaatgaagaaaataaattgattactggcattggaacagtataaaataccagtttgtacagtatgacctatatgtgaccatgttactcccttccatttcacacaaagaaatagacacaactgcagttcacaagtagtactggctccaccccttggtgctggcagtgtttggggacattatgctggaaagagctcctagcatcagaggattaacactagcagattctgttccatctttgcactgttgcttacctgctgattttcttaactgttcttgtgcaatcgacaatgtgctaacctgcttttctctttttgtaaacgtttttgcattacaggctgcattcttgccttactgtatagaaaaagaaaaaaggctgggtttactattgcacattttaagcttttatacctttatcttcttggaatggtcagattctgaactggacagtcagaaccacaggtctgctgttaagggattttaaattgtgcatttttaaccctacagtgaaataacttaagatatccctgtgttcacagtgtgaggggctgttttatgtcatgttggcataaattgttttgtaaaagggaaagtgtttctaaaggtgtttcagcgcttgtgctgatacaaagtaagttattactttgcaccaggtggtttggccactgaattaatactgtatagcaagagaaacaatcttatttttttggacaacatgttttattaagttcttcatttctgttgattttttttattgcatttatgattcagtggctgggaattgagaatttatttgaaatagaataggtaacacctcagcgtactatagaaaatgcactcagctcaactgctgtgtttaaaatacacattttaaatccctctttacagacactaacataaaagtacatctttctgggttgtaaacatgtggtagtaccagagtattgtatagtcaatgttaaataaaagccaaaactggaatgtgcag

SEQ ID NO: 5512 - protein, 196 aa, Homo sapiens; identical to SEQ ID NO: 5498

SEQ ID NO: 5513 - DNA, 2501 bp, Homo sapiens
acatgcgcccctctcaagtgctggcagaccactgtgcatgcagacaacgcacccaaagggaagaatcaggggaacagtaacgcaaccctgccagcatgccaatgtagaaaacttgaaagaatgaacacaaaaatgtttacaaaggatatcatggcagagtgccaccatggcaactgcaccatacaactactcttacatctttaaatatattattattggggacatgggagtaggaaaatcttgcttgcttcatcaatttacagaaaaaaaatttatggctgattgtcctcacacaattggtgttgaatttggtacaagaataatcgaagttagtggccaaaaaataaaactgcagatttgggatacggcaggacaggagcgatttagggctgttacacggagctactacagaggagctgcgggagctcttatggtctatgatatcactagaagaagtacatataaccacttaagcagctggttgacagatgcaaggaatctcaccaatccaaatactgtaataattctcataggaaataaagcagatttggaggcacagagagatgttacatatgaagaagccaaacagtttgctgaagaaaatggcttattgttcctcgaagcgagtgcaaaaacgggagagaatgtagaagatgccttccttgaggctgccaagaaaatctatcagaacattcaggatggaagcttggatctgaatgctgctgagtctggtgtacaacacaaaccttcagccccgcagggaggccggctaaccagtgaaccccaaccccagagagaaggctgtggctgctagtgacctctttgctgtggcccctcatttgacctttcacctctgtctgttggaagcagtactttttactgcctcattgtcttctgtacatcttactgggtttaattaaaaaaaaagaaaaaactctgttgtaaaaacagtttaacacaatactaaactgctaaacaactagatgtaatcaggttatcaaaggcaagtagagtaataaatctctcctgcatggtaaatctagactttttttcccccttgtcctcgtgataagtatgtcaccaatatatgatttaaaccgagcactgatgctggacttcatgatttttaccctccctttggcaaggctttgtctcactgtacggtttaatttggtgatatcttaagcctttcttcccatccttaactgttcaagtatgtctgttgtaaccaataagtttattgctgtgaaattacttctgatggtagagaaggggttctataactgcttttgttttgttttggataaatttcctgttgtgtgggtggcatttttcttaacgagatttgcttctgtcttagcctcacacagggaaaatatccatttatcttctctctcgtgcttaattaatagctttatctttttttataccattttatccttttctctttaacagaaagtaaatatgtataaaatttgaaggaatcgaactaacaatacattctgtgtatattattttaatgaagaaaataaattgattactggcattggaacagtataaaataccagtttgtacagtatgacctatatgtgaccatgttactcccttccatttcacacaaagaaatagacacaactgcagttcacaagtagtactggctccaccccttggtgctggcagtgtttggggacattatgctggaaagagctcctagcatcagaggattaacactagcagattctgttccatctttgcactgttgcttacctgctgattttcttaactgttcttgtgcaatcgacaatgtgctaacctgcttttctctttttgtaaacgtttttgcattacaggctgcattcttgccttactgtatagaaaaagaaaaaaggctgggtttactattgcacattttaagcttttatacctttatcttcttggaatggtcagattctgaactggacagtcagaaccacaggtctgctgttaagggattttaaattgtgcatttttaaccctacagtgaaataacttaagatatccctgtgttcacagtgtgaggggctgttttatgtcatgttggcataaattgttttgtaaaagggaaagtgtttctaaaggtgtttcagcgcttgtgctgatacaaagtaagttattactttgcaccaggtggtttggccactgaattaatactgtatagcaagagaaacaatcttatttttttggacaacatgttttattaagttcttcatttctgttgattttttttattgcatttatgattcagtggctgggaattgagaatttatttgaaatagaataggtaacacctcagcgtactatagaaaatgcactcagctcaactgctgtgtttaaaatacacattttaaatccctctttacagacactaacataaaagtacatctttctgggttgtaaacatgtggtagtaccagagtattgtatagtcaatgttaaataaaagccaaaactggaatgtgcag

SEQ ID NO: 5514 - protein, 215 aa, Homo sapiens; identical to SEQ ID NO: 726

SEQ ID NO: 5515 - DNA, 2800 bp, Homo sapiens
ctgtgtatgatattacaaatatttgggtttgtttacttatcttagagcttacttggctagtgcaaatgagcctatgagtttttaaactcttgcttgggcagttagaattccagaataatttagctgcctgatagataagagaacaaagttaggacgaactttttcactgatatctggggacttgaattcttgtcaaatgtcttcaaagtcaattttatgctgttatagttagcttgctctttaaattattaaggaaaggtgaattgtatgccagcttataatagtgtgacttggtttttaatgaaattaaaatttaaagacaagcaaaagtgtcttccattaaatgtgtcatgtttaggcattttgatacaactttgtgctttgtgattgaaagtctgtatgatttcaaagtaatttgagttttgactccacattggcatttccatcaatttactgtgttgttccttgcttgcttattggtctgtttacggtatgcttttaggagtaaacaatttactcctgacctgtaattatcaaagttgttggatattgagttgtttatttaaaaatattaggtttggctagatttttgaaaagtatgcagttgtatttcacaactactgttctgagtaactggtcaaagcaaaattattattttaggatatgttgattaaatatgtattttaaatatttaagttttttttctataattatatggcagtcacaaatttaaacttttatttttgcagaagaagtacatataaccacttaagcagctggttgacagatgcaaggaatctcaccaatccaaatactgtaataattctcataggaaataaagcagatttggaggcacagagagatgttacatatgaagaagccaaacagtttgctgaagaaaatggcttattgttcctcgaagcgagtgcaaaaacgggagagaatgtagaagatgccttccttgaggctgccaagaaaatctatcagaacattcaggatggaagcttggatctgaatgctgctgagtctggtgtacaacacaaaccttcagccccgcagggaggccggctaaccagtgaaccccaaccccagagagaaggctgtggctgctagtgacctctttgctgtggcccctcatttgacctttcacctctgtctgttggaagcagtactttttactgcctcattgtcttctgtacatcttactgggtttaattaaaaaaaaagaaaaaactctgttgtaaaaacagtttaacacaatactaaactgctaaacaactagatgtaatcaggttatcaaaggcaagtagagtaataaatctctcctgcatggtaaatctagactttttttcccccttgtcctcgtgataagtatgtcaccaatatatgatttaaaccgagcactgatgctggacttcatgatttttaccctccctttggcaaggctttgtctcactgtacggtttaatttggtgatatcttaagcctttcttcccatccttaactgttcaagtatgtctgttgtaaccaataagtttattgctgtgaaattacttctgatggtagagaaggggttctataactgcttttgttttgttttggataaatttcctgttgtgtgggtggcatttttcttaacgagatttgcttctgtcttagcctcacacagggaaaatatccatttatcttctctctcgtgcttaattaatagctttatctttttttataccattttatccttttctctttaacagaaagtaaatatgtataaaatttgaaggaatcgaactaacaatacattctgtgtatattattttaatgaagaaaataaattgattactggcattggaacagtataaaataccagtttgtacagtatgacctatatgtgaccatgttactcccttccatttcacacaaagaaatagacacaactgcagttcacaagtagtactggctccaccccttggtgctggcagtgtttggggacattatgctggaaagagctcctagcatcagaggattaacactagcagattctgttccatctttgcactgttgcttacctgctgattttcttaactgttcttgtgcaatcgacaatgtgctaacctgcttttctctttttgtaaacgtttttgcattacaggctgcattcttgccttactgtatagaaaaagaaaaaaggctgggtttactattgcacattttaagcttttatacctttatcttcttggaatggtcagattctgaactggacagtcagaaccacaggtctgctgttaagggattttaaattgtgcatttttaaccctacagtgaaataacttaagatatccctgtgttcacagtgtgaggggctgttttatgtcatgttggcataaattgttttgtaaaagggaaagtgtttctaaaggtgtttcagcgcttgtgctgatacaaagtaagttattactttgcaccaggtggtttggccactgaattaatactgtatagcaagagaaacaatcttatttttttggacaacatgttttattaagttcttcatttctgttgattttttttattgcatttatgattcagtggctgggaattgagaatttatttgaaatagaataggtaacacctcagcgtactatagaaaatgcactcagctcaactgctgtgtttaaaatacacattttaaatccctctttacagacactaacataaaagtacatctttctgggttgtaaacatgtggtagtaccagagtattgtatagtcaatgttaaataaaagccaaaactggaatgtgcag

SEQ ID NO: 5516 - protein, 132 aa, Homo sapiens [sequence omitted]

SEQ ID NO: 5517 - DNA, 1244 bp, Homo sapiens
ccgcggcgctcaccgccgacccacgggctagccacggcctgacggggcctggccccggggcgccgcccgcctgcggcccagtctccaccgtccccacacacgcccctctgaagaacccggcgcgaggaggctggagtgcaatggcacgatatcagctcactgaagcctccacctcctgggctcaagcactcctcccacctcagccccccaggtagctgagactacaggaatggataaagcacggagaggaaccaagaatgtgctcagaaaaaaatccttcctcactgaaaccaggactaaggaaaggagattcccttctaccatccatggactcaggctgacggagcacgctgcctgtctgtgtctctccgtttctctctctggaacgttgtcagatgtcacggcggagggaaaagagacctggaatgacttgccgaatttttagcccataaccaggcactgtgtaaaccgctttacctcattcagtctttgcaattataccacaaggtcacactgtttagaaggagaaagaagagctcgctgtgaaaaacgctccacaatgctgcagagccttgtgaaggtggaagagtactctcatcagcaaacggcattccttccatggaaaatgtcattgggaggaaagcagggacaaactacaaggcattcgatgctcaacaaatacttgtgctgataacttctctttctgaagccagctccaggagaggtctgtaatcagaagagcccctgaaccctgaagcctcctgggctgcccagcccaggcatctcctctgtgagttttgcgacacccttctagtcatttaacgagcctcattggctttctctgtgaatacgatggaagatggccacctcaaaatggcagccttggccttcagagatcattggtcctcacagacccagttaattaaccatgattgtcatgtctcaacttccagctccaaattctaatagtccagcttttttctgccgtccactcctcatgctgtcaactgtgttgtgggggaaggttacagtacaaacctgggtgcaagtgagggccatccccttgggtgggaagaggcgttctcagaggagagagcaggtacccccagattgtctaatgcctggcctgtgtgtggccttcatttctccccagcctcactctgggaaggaggtggtcttctggcaaaagaagatatcaaagttcttccatcagaggagatccttatcagcaagacattcactct

SEQ ID NO: 5518 - protein, 71 aa, Homo sapiens
MDKARRGTKNVLRKKSFLTETRTKERRFPSTIHGLRLTEHAACLCLSVSLSGTLSDVTAEGKETWNDLPNF

SEQ ID NO: 5519 - DNA, 3464 bp, Homo sapiens
accgccgacccacgggctagccacggcctgacggggcctggccccggggcgccgcccgcctgcggcccagtctccaccgtccccacacacgcccctctgaagaacccggcgcgaggaggctggagtgcaatggcacgatatcagctcactgaagcctccacctcctgggctcaagcactcctcccacctcagccccccaggtagctgagactacaggaatggataaagcacggagaggaaccaagaatgtgctcagaaaaaaatccttcctcactgaaaccaggactaaggaaaggagattcccttctaccatccatggactcaggctgacggagcacgctgcctgtctgtgtctctccgtttctctctctggaacgttgtcagatgtcacggcggagggaaaagagacctggaatgacttgccgaatttttagcccataaccaggcactgtgtaaaccgctttacctcattcagtctttgcaattataccacaaggtcacactgtttagaaggagaaagaagagctcgctgtgaaaaacgctccacaatgctgcagagccttgtgaaggtggaagagtactctcatcagcaaacggcattccttccatggaaaatgtcattgggaggaaagcaggttcaagtgattctcctgcctcagcctcctgagtagctgggattacagggacaaactacaaggcattcgatgctcaacaaatacttgtgctgataacttctctttctgaagccagctccaggagaggtctgtaatcagaagagcccctgaaccctgaagcctcctgggctgcccagcccaggcatctcctctcctcactctgggaaggaggtggtcttctggcaaaagaagatatcaaagttcttccatcagaggagatccttatcagcaagacattcactctgaggtagtgctcatagctctctttgtccagtgcttcggccttggtcccagcgccttcccacggagcagcactcttcaccctgcacagccttgttagcccaacagcatggtggtggaacaccccgagttcctcaaggcagggaaggagcctggcctgcagatctggcgtgtggagaagttcgatctggtgcccgtgcccaccaacctttatggagacttcttcacgggcgacgcctacgtcatcctgaagacagtgcagctgaggaacggaaatctgcagtatgacctccactactggctgggcaatgagtgcagccaggatgagagcggggcggccgccatctttaccgtgcagctggatgactacctgaacggccgggccgtgcagcaccgtgaggtccagggcttcgagtcggccaccttcctaggctacttcaagtctggcctgaagtacaagaaaggaggtgtggcatcaggattcaagcacgtggtacccaacgaggtggtggtgcagagactcttccaggtcaaagggcggcgtgtggtccgtgccaccgaggtacctgtgtcctgggagagcttcaacaatggcgactgcttcatcctggacctgggcaacaacatccaccagtggtgtggttccaacagcaatcggtatgaaagactgaaggccacacaggtgtccaagggcatccgggacaacgagcggagtggccgggcccgagtgcacgtgtctgaggagggcactgagcccgaggcgatgctccaggtgctgggccccaagccggctctgcctgcaggtaccgaggacaccgccaaggaggatgcggccaaccgcaagctggccaagctctacaaggtctccaatggtgcagggaccatgtccgtctccctcgtggctgatgagaaccccttcgcccagggggccctgaagtcagaggactgcttcatcctggaccacggcaaagatgggaaaatctttgtctggaaaggcaagcaggcaaacacggaggagaggaaggctgccctcaaaacagcctctgacttcatcaccaagatggactaccccaagcagactcaggtctcggtccttcctgagggcggtgagaccccactgttcaagcagttcttcaagaactggcgggacccagaccagacagatggcctgggcttgtcctacctttccagccatatcgccaacgtggagcgggtgcccttcgacgccgccaccctgcacacctccactgccatggccgcccagcacggcatggatgacgatggcacaggccagaaacagatctggagaatcgaaggttccaacaaggtgcccgtggaccctgccacatatggacagttctatggaggcgacagctacatcattctgtacaactaccgccatggtggccgccaggggcagataatctataactggcagggtgcccagtctacccaggatgaggtcgctgcatctgccatcctgactgctcagctggatgaggagctgggaggtacccctgtccagagccgtgtggtccaaggcaaggagcccgcccacctcatgagcctgtttggtgggaagcccatgatcatctacaagggcggcacctcccgcgagggcgggcagacagcccctgccagcacccgcctcttccaggtccgcgccaacagcgctggagccacccgggctgttgaggtattgcctaaggctggtgcactgaactccaacgatgcctttgttctgaaaaccccctcagccgcctacctgtgggtgggtacaggagccagcgaggcagagaagacgggggcccaggagctgctcagggtgctgcgggcccaacctgtgcaggtggcagaaggcagcgagccagatggcttctgggaggccctgggcgggaaggctgcctaccgcacatccccacggctgaaggacaagaagatggatgcccatcctcctcgcctctttgcctgctccaacaagattggacgttttgtgatcgaagaggttcctggtgagctcatgcaggaagacctggcaacggatgacgtcatgcttctggacacctgggaccaggtctttgtctgggttggaaaggattctcaagaagaagaaaagacagaagccttgacttctgctaagcggtacatcgagacggacccagccaatcgggatcggcggacgcccatcaccgtggtgaagcaaggctttgagcctccctcctttgtgggctggttccttggctgggatgatgattactggtctgtggaccccttggacagggccatggctgagctggctgcctgaggaggggcagggcccacccatgtcaccggtcagtgccttttggaactgtccttccctcaaagaggccttagagcgagcagagcagctctgctatgagtgtgtgtgtgtgtgtgtgttgtttcttttttttttttttacagtatccaaaaatagccctgcaaaaattcagagtccttgcaaaattgtctaaaatgtcagtgtttgggaaattaaatccaataaaaacattttgaagtgtgtactct

SEQ ID NO: 5520 - protein, 731 aa, Homo sapiens; identical to SEQ ID NO: 730

SEQ ID NO: 5521 - DNA, 553 bp, Homo sapiens
caggctggagtgcaatggcacgatatcagctcactgaagcctccacctcctgggctcaagcactcctcccacctcagccccccaggtagctgagactacaggaatggataaagcacggagaggaaccaagaatgtgctcagaaaaaaatccttcctcactgaaaccaggactaaggaaaggagattcccttctaccatccatggactcaggctgacggagcacgctgcctgtctgtgtctctccgtttctctctctggaacgttgtcagatgtcacggcggagggaaaagagacctggaatgacttgccgaatttttagcccataaccaggcactgtgtaaaccgctttacctcattcagtctttgcaattataccacaaggtcacactgtttagaaggagaaagaagagctcgctgtgaaaaacgctccacaatgctgcagagccttgtgaaggtggaagagtactctcatcagcaaacggcattccttccatggaaaatgtcattgggaggaaagcagggacaaactacaaggcattcgatgctcaacaaa

SEQ ID NO: 5522 - protein, 71 aa, Homo sapiens; identical to SEQ ID NO: 5518

SEQ ID NO: 5523 - DNA, 2700 bp, Homo sapiens
ccccacccgcctgcccggccgccccgccccgagggcggctcccgcccgcgccctgcccaccccggccgcgcgcaccacaacgcccccgccccgccgcccggaaccagctgagcgcagctggacccagcagccgctgtctccagtgccgcagcagcaggtagtgctcatagctctctttgtccagtgcttcggccttggtcccagcgccttcccacggagcagcactcttcaccctgcacagccttgttagcccaacagcatggtggtggaacaccccgagttcctcaaggcagggaaggagcctggcctgcagatctggcgtgtggagaagttcgatctggtgcccgtgcccaccaacctttatggagacttcttcacgggcgacgcctacgtcatcctgaagacagtgcagctgaggaacggaaatctgcagtatgacctccactactggctgggcaatgagtgcagccaggatgagagcggggcggccgccatctttaccgtgcagctggatgactacctgaacggccgggccgtgcagcaccgtgaggtccagggcttcgagtcggccaccttcctaggctacttcaagtctggcctgaagtacaagaaaggaggtgtggcatcaggattcaagcacgtggtacccaacgaggtggtggtgcagagactcttccaggtcaaagggcggcgtgtggtccgtgccaccgaggtacctgtgtcctgggagagcttcaacaatggcgactgcttcatcctggacctgggcaacaacatccaccagtggtgtggttccaacagcaatcggtatgaaagactgaaggccacacaggtgtccaagggcatccgggacaacgagcggagtggccgggcccgagtgcacgtgtctgaggagggcactgagcccgaggcgatgctccaggtgctgggccccaagccggctctgcctgcaggtaccgaggacaccgccaaggaggatgcggccaaccgcaagctggccaagctctacaaggtctccaatggtgcagggaccatgtccgtctccctcgtggctgatgagaaccccttcgcccagggggccctgaagtcagaggactgcttcatcctggaccacggcaaagatgggaaaatctttgtctggaaaggcaagcaggcaaacacggaggagaggaaggctgccctcaaaacagcctctgacttcatcaccaagatggactaccccaagcagactcaggtctcggtccttcctgagggcggtgagaccccactgttcaagcagttcttcaagaactggcgggacccagaccagacagatggcctgggcttgtcctacctttccagccatatcgccaacgtggagcgggtgcccttcgacgccgccaccctgcacacctccactgccatggccgcccagcacggcatggatgacgatggcacaggccagaaacagatctggagaatcgaaggttccaacaaggtgcccgtggaccctgccacatatggacagttctatggaggcgacagctacatcattctgtacaactaccgccatggtggccgccaggggcagataatctataactggcagggtgcccagtctacccaggatgaggtcgctgcatctgccatcctgactgctcagctggatgaggagctgggaggtacccctgtccagagccgtgtggtccaaggcaaggagcccgcccacctcatgagcctgtttggtgggaagcccatgatcatctacaagggcggcacctcccgcgagggcgggcagacagcccctgccagcacccgcctcttccaggtccgcgccaacagcgctggagccacccgggctgttgaggtattgcctaaggctggtgcactgaactccaacgatgcctttgttctgaaaaccccctcagccgcctacctgtgggtgggtacaggagccagcgaggcagagaagacgggggcccaggagctgctcagggtgctgcgggcccaacctgtgcaggtggcagaaggcagcgagccagatggcttctgggaggccctgggcgggaaggctgcctaccgcacatccccacggctgaaggacaagaagatggatgcccatcctcctcgcctctttgcctgctccaacaagattggacgttttgtgatcgaagaggttcctggtgagctcatgcaggaagacctggcaacggatgacgtcatgcttctggacacctgggaccaggtctttgtctgggttggaaaggattctcaagaagaagaaaagacagaagccttgacttctgctaagcggtacatcgagacggacccagccaatcgggatcggcggacgcccatcaccgtggtgaagcaaggctttgagcctccctcctttgtgggctggttccttggctgggatgatgattactggtctgtggaccccttggacagggccatggctgagctggctgcctgaggaggggcagggcccacccatgtcaccggtcagtgccttttggaactgtccttccctcaaagaggccttagagcgagcagagcagctctgctatgagtgtgtgtgtgtgtgtgtgttgtttcttttttttttttttacagtatccaaaaatagccctgcaaaaattcagagtccttgcaaaattgtctaaaatgtcagtgtttgggaaattaaatccaataaaaacattttgaagtgtgtactct

SEQ ID NO: 5524 - protein, 731 aa, Homo sapiens; identical to SEQ ID NO: 730

SEQ ID NO: 5525 - DNA, 354 bp, Homo sapiens
accagctgagcgcagctggacccagcagccgctgtctccagtgccgcagcagcaggtagtgctcatagctctctttgtccagtgcttcggccttggtcccagcgccttcccacggagcagcactcttcaccctgcacagccttgttagcccaacagcatggtggtggaacaccccgagttcctcaaggcagggaaggagcctggcctgcagatctggcgtgtggagaagttcgatctggtgcccgtgcccaccaacctttatggagacttcttcacgggcgacgcctacgtcatcctgaagacagtgcagctgaggaacggaaatctgcagtatgacctccactactggctggg

SEQ ID NO: 5526 - protein, 64 aa, Homo sapiens
MVVEHPEFLKAGKEPGLQIWRVEKFDLVPVPTNLYGDFFTGDAYVILKTVQLRNGNLQYDLHYW

SEQ ID NO: 5527 - DNA, 540 bp, Homo sapiens
ccagtgccgcagcagcaggtagtgctcatagctctctttgtccagtgcttcggccttggtcccagcgccttcccacggagcagcactcttcaccctgcacagccttgttaggtaggtagagcaatacagacacctgtcgtcctcttaaaccccgccctggctgcccagggaagcctggaggggacttcagtggtggaagcagccgctgtagccacagtggattcagtgggagtccctgaggtcttcctaataaggctcagagtgcgtctctgctcctttcctgtccttgagagggaggtcaggcgagagtgatcttgtagggaggaggccgggactgggctcggtgcccggatgcctggctcccaccctggctgtgctggttgcttgctatgtgactttaggagagttgctttccctctcaaggccttggttgctattctgtagaagagcagagtccccataaagaggaggtgcaggaattcttcccagaggctttggagaggtgagaaaaatgggggtccatttgccaagtctctggac

SEQ ID NO: 5528 - protein, 30 aa, Homo sapiens
MPGSHPGCAGCLLCDFRRVAFPLKALVAIL

SEQ ID NO: 5529 - DNA, 848 bp, Homo sapiens
agagccaagacccggccctcaagtcctcctattagggcagcactagggctacctctttgtcagcagaacctttggatagccgctgatggggtgagtcagctttctgggcccggcagaccttttgggaatccctggcttttggggcacaacatcctggggaccaccaaaaagccctttcacctgagctttgggaaagaggaacagctccggctgtgggtggctcatgtcaccatctggaagccagctgggccacagcagacgcgctgtaagctccttggaggcaaggattctgtctgcttcacctctaaagcttcagcatggcatgtgccctgcaaatggcagtgccagtggacatatgctagatgagtggatgaaggaccatcccacatcagctcatcgtggagtatgcagctcagtcctcccgcctctcagggacaacttggatcttcaccgttcttcgccactaagaattccagtcatctacattcagagggaagctgagcaaactggctcctgcccacactggaaaatttctctgcctaaaccagcttccctaagccgaggggagagtccaagatcccgaagatggcagggccgtgcaggctcctgggattaagacacaaacaagccctgttctcaggctgacagtaaatggttcagacagtcctgatgacttgtgcattgtgactgacacgggacacagccacggaagtggagtcacggtacccaaaaccagagaggtcagaggccagacacttatctgggctgcaggacctggtgcccacctctgtgggtctttctcaaagactatggcagaaacttcctggttccaagggacagaccaaagc

SEQ ID NO: 5530 - protein, 130 aa, Homo sapiens
MSPSGSQLGHSRRAVSSLEARILSASPLKLQHGMCPANGSASGHMLDEWMKDHPTSAHRGVCSSVLPPLRDNLDLHRSSPLRIPVIYIQREAEQTGSCPHWKISLPKPASLSRGESPRSRRWQGRAGSWD

SEQ ID NO: 5531 - DNA, 351 bp, Homo sapiens
tccagtgcttcggccttggtcccagcgccttcccacggagcagcactcttcaccctgcacagccttgttagacggagtcttgctgtggtgcccaggctggagtgcagtggcacgatctcagctcactgcaacctcctcctcccagcccaacagcatggtggtggaacaccccgagttcctcaaggcagggaaggagcctggcctgcagatctggcgtgtggagaagttcgatctggtgcccgtgcccaccaacctttatggagacttcttcacgggcgacgcctacgtcatcctgaagacagtgcagctgaggaacggaaatctgcagtatgacctccactactggctggg

SEQ ID NO: 5532 - protein, 64 aa, Homo sapiens; identical to SEQ ID NO: 5526

SEQ ID NO: 5533 - DNA, 2094 bp, Homo sapiens
ggaaaagttccggcaagccctgtggacaggtttgcgaatctggactcagcttctgcaatccagacctcagtttcctcatctctaaaagggggagaatggtacctagagcatggagcagtgaggaagcccaggatgtgacgcacaggagctcgccaaaaagagataatgagctgcccagtggtgatgaggttgaggggacataggtgacaggaaaatcggcccatgtccaagaacccttcaggccctgggactcaaggatgctaaaagacacacagcaaaaagcaaacaagtttgtgcatctggccagggtcccctcctgcctgcctagggatcagattcatccttcactgggatctaccaggaatgctggaagcttccccaggccaaccaccttcccgatggggacaatgaatgatgcagcacatcagatgatggtgccacatccctcctgctgctggcttcaaacaaagcccttctgtgtccccaagcctcccataccaactatggccaagatttcctccttgctgggctctggcaggaagtgtgagcccattgtctggatgtggaaaatcggggtcaaagtgcctttcttgaaggctagttgagacgattaaatgagaccataaatgtgagggatccgtggaccatgccccgcaaaggcactctgcagggagaactccctgagaaagacaaaagggggcaggtgcggggaagagggaaaagacaatgggatccaggagtgcctgcggagtctctgtgggctggagataccaaaaatgaccaacagggtgaggacaagtgaccttccaacctaaggaatatgaggcaatgtacagggatgaatctggacagagcccaaatccctaccaccagggaacttgagccagtggcaccttctgcggcacttcaatttcctcctctgtaaaatgaggtgaagatgccaacctggtggggtgtctggtaggactgaaggagccctggcactgtgtttggcacacagcaggtgctcagtaagcataacatccaaagatgacctacagcatgtgtccagaccctatacacacatacagctcactggcccctatacctgccctatacctacctcatacctagccctctacctctgtgtctttgcatacaaagcaagggagacagggagggttccaaacaaggctggtaccagggatggggatgcatctcaggagagggcctcaagccaacacctacagagccagccttgctacccaatcccctccatgagactcctaatgacaccccctcccctcctctctgactttgcctgttctgcctcacccaaaagaacaagggctcttggctgggcatggtggttcatgcctgtaatcccagcactttgggagcccaaggcaggaggatagcttaaacccagtagtttgagaacagcctgggaaacagagtgagaccctgtctctacacaaaattaaaaaattagccaggcgtgatgacatgcaccagtagttctagctactggggaggctgaggtgggaggatcacttgagcctgggaagtcgaggctacagtaagttatgattgtgccactgcactccagcctgggtgacagagtgaaaccctgactcaaaaaagcaaaaaaccaaaaacaaaaaagtgagggctctggatcccagtcctagcacttacaactgagtgatgctgagcaagggacacaacctctctgagcttcagtgtccacagggatagaatggccatattatctcacggactcaccagaacttgatacaagtacaaatcagttagagaaaaagtccaatgggggccaggtgcagtggctcacacctgtaattccagcactttgggagacggaggcaggtggatcacttgaggccaggagttcgagaccagcctggctaacatggtgaaaccccatctctactaaaaatacaaaaaattagccgggcatggtggtgggcatctgtggtcccagctactcaggaggctgagacaggagaatggcttgaacccacgagatggaggttgcggtgagccgagatcgcgccactgcactccagcctgggtgacagagcaagactccaactc

SEQ ID NO: 5534 - protein, 35 aa, Homo sapiens
MVPRAWSSEEAQDVTHRSSPKRDNELPSGDEVEGT

SEQ ID NO: 5535 - DNA, 2669 bp, Homo sapiens
atgggcgggcggctacttaaggtcggcgacccgaggccgcggctgccgactgggtcccctgccgctgtcgccaccatggctccgcaccgccccgcgcccgcgctgctttgcgcgctgtccctggcgctgtgcgcgctgtcgctgcccgtccgcgcggccactgcgtcgcggggggcgtcccaggcgggggcgccccaggggcgggtgcccgaggcgcggcccaacagcatggtggtggaacaccccgagttcctcaaggcagggaaggagcctggcctgcagatctggcgtgtggagaagttcgatctggtgcccgtgcccaccaacctttatggagacttcttcacgggcgacgcctacgtcatcctgaagacagtgcagctgaggaacggaaatctgcagtatgacctccactactggctgggcaatgagtgcagccaggatgagagcggggcggccgccatctttaccgtgcagctggatgactacctgaacggccgggccgtgcagcaccgtgaggtccagggcttcgagtcggccaccttcctaggctacttcaagtctggcctgaagtacaagaaaggaggtgtggcatcaggattcaagcacgtggtacccaacgaggtggtggtgcagagactcttccaggtcaaagggcggcgtgtggtccgtgccaccgaggtacctgtgtcctgggagagcttcaacaatggcgactgcttcatcctggacctgggcaacaacatccaccagtggtgtggttccaacagcaatcggtatgaaagactgaaggccacacaggtgtccaagggcatccgggacaacgagcggagtggccgggcccgagtgcacgtgtctgaggagggcactgagcccgaggcgatgctccaggtgctgggccccaagccggctctgcctgcaggtaccgaggacaccgccaaggaggatgcggccaaccgcaagctggccaagctctacaaggtctccaatggtgcagggaccatgtccgtctccctcgtggctgatgagaaccccttcgcccagggggccctgaagtcagaggactgcttcatcctggaccacggcaaagatgggaaaatctttgtctggaaaggcaagcaggcaaacacggaggagaggaaggctgccctcaaaacagcctctgacttcatcaccaagatggactaccccaagcagactcaggtctcggtccttcctgagggcggtgagaccccactgttcaagcagttcttcaagaactggcgggacccagaccagacagatggcctgggcttgtcctacctttccagccatatcgccaacgtggagcgggtgcccttcgacgccgccaccctgcacacctccactgccatggccgcccagcacggcatggatgacgatggcacaggccagaaacagatctggagaatcgaaggttccaacaaggtgcccgtggaccctgccacatatggacagttctatggaggcgacagctacatcattctgtacaactaccgccatggtggccgccaggggcagataatctataactggcagggtgcccagtctacccaggatgaggtcgctgcatctgccatcctgactgctcagctggatgaggagctgggaggtacccctgtccagagccgtgtggtccaaggcaaggagcccgcccacctcatgagcctgtttggtgggaagcccatgatcatctacaagggcggcacctcccgcgagggcgggcagacagcccctgccagcacccgcctcttccaggtccgcgccaacagcgctggagccacccgggctgttgaggtattgcctaaggctggtgcactgaactccaacgatgcctttgttctgaaaaccccctcagccgcctacctgtgggtgggtacaggagccagcgaggcagagaagacgggggcccaggagctgctcagggtgctgcgggcccaacctgtgcaggtggcagaaggcagcgagccagatggcttctgggaggccctgggcgggaaggctgcctaccgcacatccccacggctgaaggacaagaagatggatgcccatcctcctcgcctctttgcctgctccaacaagattggacgttttgtgatcgaagaggttcctggtgagctcatgcaggaagacctggcaacggatgacgtcatgcttctggacacctgggaccaggtctttgtctgggttggaaaggattctcaagaagaagaaaagacagaagccttgacttctgctaagcggtacatcgagacggacccagccaatcgggatcggcggacgcccatcaccgtggtgaagcaaggctttgagcctccctcctttgtgggctggttccttggctgggatgatgattactggtctgtggaccccttggacagggccatggctgagctggctgcctgaggaggggcagggcccacccatgtcaccggtcagtgccttttggaactgtccttccctcaaagaggccttagagcgagcagagcagctctgctatgagtgtgtgtgtgtgtgtgtgttgtttcttttttttttttttacagtatccaaaaatagccctgcaaaaattcagagtccttgcaaaattgtctaaaatgtcagtgtttgggaaattaaatccaataaaaacattttgaagtgtgtactct

SEQ ID NO: 5536 - protein, 807 aa, Homo sapiens
MGGRLLKVGDPRPRLPTGSPAAVATMAPHRPAPALLCALSLALCALSLPVRAATASRGASQAGAPQGRVPEARPNSMVVEHPEFLKAGKEPGLQIWRVEKFDLVPVPTNLYGDFFTGDAYVILKTVQLRNGNLQYDLHYWLGNECSQDESGAAAIFTVQLDDYLNGRAVQHREVQGFESATFLGYFKSGLKYKKGGVASGFKHVVPNEVVVQRLFQVKGRRVVRATEVPVSWESFNNGDCFILDLGNNIHQWCGSNSNRYERLKATQVSKGIRDNERSGRARVHVSEEGTEPEAMLQVLGPKPALPAGTEDTAKEDAANRKLAKLYKVSNGAGTMSVSLVADENPFAQGALKSEDCFILDHGKDGKIFVWKGKQANTEERKAALKTASDFITKMDYPKQTQVSVLPEGGETPLFKQFFKNWRDPDQTDGLGLSYLSSHIANVERVPFDAATLHTSTAMAAQHGMDDDGTGQKQIWRIEGSNKVPVDPATYGQFYGGDSYIILYNYRHGGRQGQIIYNWQGAQSTQDEVAASAILTAQLDEELGGTPVQSRVVQGKEPAHLMSLFGGKPMIIYKGGTSREGGQTAPASTRLFQVRANSAGATRAVEVLPKAGALNSNDAFVLKTPSAAYLWVGTGASEAEKTGAQELLRVLRAQPVQVAEGSEPDGFWEALGGKAAYRTSPRLKDKKMDAHPPRLFACSNKIGRFVIEEVPGELMQEDLATDDVMLLDTWDQVFVWVGKDSQEEEKTEALTSAKRYIETDPANRDRRTPITVVKQGFEPPSFVGWFLGWDDDYWSVDPLDRAMAELAA

SEQ ID NO: 5537 - DNA, 397 bp, Homo sapiens
acccgaggccgcggctgccgactgggtcccctgccgctgtcgccaccatggctccgcaccgccccgcgcccgcgctgctttgcgcgctgtccctggcgctgtgcgcgctgtcgctgcccgtccgcgcggccactgcgtcgcggggggcgtcccaggcgggggcgccccaggggcgggtgcccgaggcgcggcccaacagcatggtggtggaacaccccgagttcctcaaggcagggaaggagcctggcctgcagatctggcgtgtggagaagttcgatctggtgcccgtgcccaccaacctttatggagacttcttcacgggcgacgcctacgtcatcctgaagacagtgcagctgaggaacggaaatctgcagtatgacctccactactggctggg

SEQ ID NO: 5538 - protein, 115 aa, Homo sapiens
MAPHRPAPALLCALSLALCALSLPVRAATASRGASQAGAPQGRVPEARPNSMVVEHPEFLKAGKEPGLQIWRVEKFDLVPVPTNLYGDFFTGDAYVILKTVQLRNGNLQYDLHYW

SEQ ID NO: 5539 - DNA, 349 bp, Homo sapiens
tagagtacacacttcaaaatgtttttattggatttaatttcccaaacactgacattttagacaattttgcaaggactctgaatttttgcagggctatttttggatactgtaaaaaaaaaaaaaagaaacaacacacacacacacacacactcatagcagagctgctctgctcgctctaaggcctctttgagggaaggacagttccaaaaggcactgaccggtgacatgggtgggccctgcccctcctcaggcagccagacttgaagtagcctaggaaggtggccgactcgaagccctggacctcacggtgctgcacggcccggccgttcaggtagtcatccagctgcac

SEQ ID NO: 5540 - protein, 58 aa, Homo sapiens
EYTLQNVFIGFNFPNTDILDNFARTLNFCRAIFGYCKKKKKKQHTHTHTLIAELLCSL

SEQ ID NO: 5541 - DNA, 4904 bp, Homo sapiens
caatgcactgcagcctgggacagagtgaaaccctgttgaaaggaaggaagagagagagagagcggaaggaaggagagagagagagaaagagagaaaggaaggaaggaaaggaaagagagagggaaagagaatgaaagaaagaaaaaaagaaaggaaagaaaaaagaaagagggaaagaaagaaaagcagttcttggttcaataagatagggaaatactgtataaaacaaaaggcaagcaggtgtattcaccataggatttgacagagcctttattatgcacatgcgcgttgtataacagtcagggagggtgagtgagaagcattccctatgcttatttgaccgtggaactctttccttgcagaatgtcttaggggactagtgtgcctttgggaaacgccggttttgaggaaggaattgttgcagtttttttgatttagaaagtggctacaggggtccttgttagtggagtatgggattcaaaggggtggcagaaagatgcagtgggcagggaatctctcacttcttagctgtgtggccttgggcaaattttattcctttcctaaacctcagtttcctactctgaaacagtctcaaacaagataatgggtatgaaagtcctgagttaactgagaatcactgtgttgctggaaagcccctggtccacaagccagaatttcctttacctcaattctgtccccttcttccatatctgcttccctgggccttctcccctgggctaatgctgtctctttggccccacagaaaggaggtgtggcatcaggattcaagcacgtggtacccaacgaggtggtggtgcagagactcttccaggtcaaagggcggcgtgtggtccgtgccaccgaggtacctgtgtcctgggagagcttcaacaatggcgactgcttcatcctggacctgggcaacgtgagtcctgctttcctctttcccaggagccactgaggtgctcctggtctgatcagggacttgggtacatccacgtgaacaaatgcatagatgcaggtgggcaaaccacagggaccagcattgttcacgtacagatatgtctgtatgcaaagactcccacaaatgtagactcacaccacgggtatagtgcgtacttggactttgattgacatatagacttcctggcaccttctgttcatatgtacgtcttgtgtcctttttcacatgcttataaatatataacagtcatgggcaaacactctgggcttttgcccaccaggtgtgcacatgtgcaccatcatgaatgcccacacatgtatactcgggtatgttgtttaaggtcccacatgtgtatgtcatacatgtagttgcacatgcccatgatctatggcaatgtgtgtgggatgcccttacccaggcccaccttatagatgtgtgacgctttgtacacacttgtctcacaaatccctggagcgcagacctgcaaatggacacggcccttctaccccaaagctcatatgcttatacacctgtgatataatgtccgtgcaaacatgagcacacactgatttagtgtaagctttttattaaagcgtcatgggcacacagaggagtgtgtgaatcctgagtgtacagcttgatggattacacagagcgaacacactcacgtaacactggatcatgaagcagaacctcaccagcccctagaaggccccttttgcccctttcggtgccctcaccccaagggcaaccatcatcctgaactttctcaacagcatagatgagttttgcctgtttctgaactttatagacacggaaccttgttcttttatctctgaccttttgctcaacattacatttctgagatgcatccgtattgttgcatttagttgtaggttgttcattttccttgctgtggaagattcagttgtgtgggtgtaccatgatttatgtatcctttatgttgttgatgggcacttgaggtggcttctggtttggggctattacagacagtgctactctgaacattcttgcacaagtcttttggtggacatacgaacgtacttctgtcaggtattttcctagaaggaggattgctgggtcataaggaaataggtatattcggctttagtggctatggccaaatggttttccaaaatggttgtgccaatttatattcccttcagcaggcaaacatttttgcacacattctagatgtagttgtacctgtgaaaaaattcctgtcctcagacatgcgctcccatctcctggtgtgtgcagatcacacttaattgtacgtaaataatgcacgtgtgcagactgtgccagccttcacctgggcaagtgcagaacagggtgagcctgcacaccacacgccacactccccaagccctgtcgctgggcggggcttataggaaggcggggcactgacttcctgggtctctgtcttccagaacatccaccagtggtgtggttccaacagcaatcggtatgaaagactgaaggccacacaggtgtccaagggcatccgggacaacgagcggagtggccgggcccgagtgcacgtgtctgaggagggcactgagcccgaggcgatgctccaggtgcctgtggggtgcgcaatggggtggccatggggacacgctgctcatgactttcttctgttcagtaggcaatttgaggtgaatttgaggaaaaaaaaaaacttccgctctaccccacctttttatttttaaaatacttttttattttaatttttgagacaggatcttattcattgttgcctgagctggagtgcaggggcgccatcacagctcactgcagccttgacctcctgggctcaagtgatcctcctgcctcagcctcccgagtagctgggaccacaggcgagtgctaccaagccaggctaacttttgaattttttgtaggaatgaggtcttgccatgtcgctcaggctggtctccaacttctggggtcaaaccatcacctgcctcaacctcccaaaatgctgggattacaagcatgagtcaccatgctggccctgcctcacttttgaggctgtttttccatcaaacctgatcactttagggagcaagggagatcagtttcttgcacaactccccgactaccctgagaggtgggactggaacccaaggctgtgctgtgagtgtgagccgcattctccagtggggagggccaggtcctctgcagagctaaggagggcagtctcttagcatccccagagggccagctttgtgctagaataaggtcagaaagagaccactgagccccaatcccctcttttctcttctgactatttctggtagtttttggcccatttagtcacatggtgggattgccagccattgtgcgttgaggacgtatcaatagaggcaagattcactaggaaaaggagaagaccatgagctctgctccatgtcacttggttcctgcttctctgggggcatccaattccagcttttggagagagcagaatggtgattattattatgggaagggacctggacaccaaccatggcttgggagggacagtgggagtgaaaataggctctgaagccacagggatggaggttcagattctggcttagccacctaatagctgtgtgagtaggtgacttcatctttctggacctcagattcctcttctgtaaaatgagagtgataatctgtgcctcctggcctggctgcgaggatgcagtgacatcttttaaaggtaggcggtagaaggtgttcagtagctatagttatcacaattagccggtaggcgaaatatctgaagcgctgtctggaggcagaggagcaggagtgttctcctggagtttctgagtcagggagacaaggtggaagggacctctgatggacagatctggacatgtgagcagatgcaggatgtgtctggaggaggtcagactccatggggagggtcacagtggatgtccttgtgatccttgcctgcctgggagctatctcaggagcctggcccctccctcacagccacccttcctctccatctctctatctcctacaggtgctgggccccaagccggctctgcctgcaggtaccgaggacaccgccaaggaggatgcggccaaccgcaagctggccaagctctacaaggtctccaatggtgcagggaccatgtccgtctccctcgtggctgatgagaaccccttcgcccagggggccctgaagtcagaggactgcttcatcctggaccacggcaaagatgggaaaatctttgtctggaaaggtactggagacagggaaagggtcccaactggcctgtaggatcttggatgggatgttctgcagctcccaggaactcagctcccggggagtgtggagtgtgcctggtgcaatggaaatcagaagtcttgggctgaggccttggttttgcatttgacatactgtgtgatcttgggcactttacttaccctttctgggcctcagattcctgatctgggctaaaatgggtgtttcccaagtgcattataacgtcagttctctgagaggctaattggcatcctgtagaaattatgtagaaaacatctaactgtatggtcagataaattcatgggcaacagtggattttaaaatgttcgagtttgtttactgtaggacttttaacttgttcatttacaggggggcttttcatgaagatgatctggtttgggaaatgctaagctagaagttcataaactctttcggtactatcttgtgggaattctcttggaaaccattggcccagatgtttcccagaggccctgagatgttctgagaggacccatcaatatcctcccctgattctctaaggctcatcttggggaagaggacagaggagagggaggcagtaggaggacagagagaaagggagacggtggggagaaagagagagagagagacactattatgattatt

SEQ ID NO: 5542 - protein, 124 aa, Homo sapiens
MGRVTVDVLVILACLGAISGAWPLPHSHPSSPSLYLLQVLGPKPALPAGTEDTAKEDAANRKLAKLYKVSNGAGTMSVSLVADENPFAQGALKSEDCFILDHGKDGKIFVWKGTGDRERVPTGL

SEQ ID NO: 5543 - DNA, 3193 bp, Homo sapiens
tctatggcaatgtgtgtgggatgcccttacccaggcccaccttatagatgtgtgacgctttgtacacacttgtctcacaaatccctggagcgcagacctgcaaatggacacggcccttctaccccaaagctcatatgcttatacacctgtgatataatgtccgtgcaaacatgagcacacactgatttagtgtaagctttttattaaagcgtcatgggcacacagaggagtgtgtgaatcctgagtgtacagcttgatggattacacagagcgaacacactcacgtaacactggatcatgaagcagaacctcaccagcccctagaaggccccttttgcccctttcggtgccctcaccccaagggcaaccatcatcctgaactttctcaacagcatagatgagttttgcctgtttctgaactttatagacacggaaccttgttcttttatctctgaccttttgctcaacattacatttctgagatgcatccgtattgttgcatttagttgtaggttgttcattttccttgctgtggaagattcagttgtgtgggtgtaccatgatttatgtatcctttatgttgttgatgggcacttgaggtggcttctggtttggggctattacagacagtgctactctgaacattcttgcacaagtcttttggtggacatacgaacgtacttctgtcaggtattttcctagaaggaggattgctgggtcataaggaaataggtatattcggctttagtggctatggccaaatggttttccaaaatggttgtgccaatttatattcccttcagcaggcaaacatttttgcacacattctagatgtagttgtacctgtgaaaaaattcctgtcctcagacatgcgctcccatctcctggtgtgtgcagatcacacttaattgtacgtaaataatgcacgtgtgcagactgtgccagccttcacctgggcaagtgcagaacagggtgagcctgcacaccacacgccacactccccaagccctgtcgctgggcggggcttataggaaggcggggcactgacttcctgggtctctgtcttccagaacatccaccagtggtgtggttccaacagcaatcggtatgaaagactgaaggccacacaggtgtccaagggcatccgggacaacgagcggagtggccgggcccgagtgcacgtgtctgaggagggcactgagcccgaggcgatgctccaggtgctgggccccaagccggctctgcctgcaggtaccgaggacaccgccaaggaggatgcggccaaccgcaagctggccaagctctacaaggtctccaatggtgcagggaccatgtccgtctccctcgtggctgatgagaaccccttcgcccagggggccctgaagtcagaggactgcttcatcctggaccacggcaaagatgggaaaatctttgtctggaaaggcaagcaggcaaacacggaggagaggaaggctgccctcaaaacagcctctgacttcatcaccaagatggactaccccaagcagactcaggtctcggtccttcctgagggcggtgagaccccactgttcaagcagttcttcaagaactggcgggacccagaccagacagatggcctgggcttgtcctacctttccagccatatcgccaacgtggagcgggtgcccttcgacgccgccaccctgcacacctccactgccatggccgcccagcacggcatggatgacgatggcacaggccagaaacagatctggagaatcgaaggttccaacaaggtgcccgtggaccctgccacatatggacagttctatggaggcgacagctacatcattctgtacaactaccgccatggtggccgccaggggcagataatctataactggcagggtgcccagtctacccaggatgaggtcgctgcatctgccatcctgactgctcagctggatgaggagctgggaggtacccctgtccagagccgtgtggtccaaggcaaggagcccgcccacctcatgagcctgtttggtgggaagcccatgatcatctacaagggcggcacctcccgcgagggcgggcagacagcccctgccagcacccgcctcttccaggtccgcgccaacagcgctggagccacccgggctgttgaggtattgcctaaggctggtgcactgaactccaacgatgcctttgttctgaaaaccccctcagccgcctacctgtgggtgggtacaggagccagcgaggcagagaagacgggggcccaggagctgctcagggtgctgcgggcccaacctgtgcaggtggcagaaggcagcgagccagatggcttctgggaggccctgggcgggaaggctgcctaccgcacatccccacggctgaaggacaagaagatggatgcccatcctcctcgcctctttgcctgctccaacaagattggacgttttgtgatcgaagaggttcctggtgagctcatgcaggaagacctggcaacggatgacgtcatgcttctggacacctgggaccaggtctttgtctgggttggaaaggattctcaagaagaagaaaagacagaagccttgacttctggtgaggacccgagtgcctgggggcggggggaggggtccgttgcttgtggggtgctgggagtggctcctgtacaggtctgggaatgagcatctttccaggggactgatggacaagatagggtggggacttcctcctctgtgggccagcccctcataaatcctgcctgggatagtgaagaacacatcagttccttcagaaaccctgaggcttctcaaagaaggctctcctctgttccaggagaaggaagggacagatgagaagtcacttcaagttcccagaatactcagaagctgaacttgtcaaggtttagatgtggcaaagcaggccaggcatggtgactcatgcatgtaatcccagcattttgggaggccaaggcaggaggatcacttgagcccaggagtttgaaagcagcccgggcaacatagtgaaacctcatctctagaaaaaatacaaaaaaattagccaggcgtgttggtgtacacccgtggtcccagctactcaggaggttgaggtcagaggattgcttgagcccaggagttcacggctgctgtgagccatgatcgcaccactatactgtagcctgggtgacagaatgagatggtgtctcaaa

SEQ ID NO: 5544 - protein, 485 aa, Homo sapiens
MLQVLGPKPALPAGTEDTAKEDAANRKLAKLYKVSNGAGTMSVSLVADENPFAQGALKSEDCFILDHGKDGKIFVWKGKQANTEERKAALKTASDFITKMDYPKQTQVSVLPEGGETPLFKQFFKNWRDPDQTDGLGLSYLSSHIANVERVPFDAATLHTSTAMAAQHGMDDDGTGQKQIWRIEGSNKVPVDPATYGQFYGGDSYIILYNYRHGGRQGQIIYNWQGAQSTQDEVAASAILTAQLDEELGGTPVQSRVVQGKEPAHLMSLFGGKPMIIYKGGTSREGGQTAPASTRLFQVRANSAGATRAVEVLPKAGALNSNDAFVLKTPSAAYLWVGTGASEAEKTGAQELLRVLRAQPVQVAEGSEPDGFWEALGGKAAYRTSPRLKDKKMDAHPPRLFACSNKIGRFVIEEVPGELMQEDLATDDVMLLDTWDQVFVWVGKDSQEEEKTEALTSGEDPSAWGRGEGSVACGVLGVAPVQVWE

SEQ ID NO: 5545 - DNA, 497 bp, Homo sapiens
tagagtacacacttcaaaatgtttttattggatttaatttcccaaacactgacattttagacaattttgcaaggactctgaatttttgcagggctatttttggatactgtaaaaaaaaaaaaaagaaacaacacacacacacacacacactcatagcagagctgctctgctcgctctaaggcctctttgagggaaggacagttccaaaaggcactgaccggtgacatgggtgggccctgcccctcctcaggcagccagctcagccatggccctgtccaaggggtccacagaccagtaatcatcatcccagccaaggaaccagcccacaaaggagggaggctcaaagccttgcttcaccacggtgatgggcgtccgccgatcccgattggctgggtccgtctcgatgtaccgagaatgatgtagctgtcgcctccatagaactgtccatatgtggcagggtccacgggcaccttgttggaaccttcgattctccagat

SEQ ID NO: 5546 - protein, 65 aa, Homo sapiens
MGGPCPSSGSQLSHGPVQGVHRPVIIIPAKEPAHKGGRLKALLHHGDGRPPIPIGWVRLDVPRMM

SEQ ID NO: 5547 - DNA, 1359 bp, Homo sapiens
gaatgtccaccagcaatccctgtgcttctatttaagggaacatttgcaaacacaggctctcctggttcttggaccaggctgaggatcaggaaggcatgtcgtcatggagatggagagcagcccagcagcagtgccctggggacctcagacaatagcactgtctccacccttcctggaattctggtgtccctgcctgtgtgttgtcgggtcacattccatgccacacacagacacaagcatgatggcttcgtctggagggatgggcccagtgcgacatagaaggactgaagcctgcccccaaggtccctgacttgctctcctgtctccctgccagagccgtgtggtccaaggcaaggagcccgcccacctcatgagcctgtttggtgggaagcccatgatcatctacaagggcggcacctcccgcgagggcgggcagacagcccctgccagcacccgcctcttccaggtccgcgccaacagcgctggagccacccgggctgttgaggtattgcctaaggctggtgcactgaactccaacgatgcctttgttctgaaaaccccctcagccgcctacctgtgggtgggtacaggagccagcgaggcagagaagacgggggcccaggagctgctcagggtgctgcgggcccaacctgtgcaggtggcagaaggcagcgagccagatggcttctgggaggccctgggcgggaaggctgcctaccgcacatccccacggctgaaggacaagaagatggatgcccatcctcctcgcctctttgcctgctccaacaagattggacgttttgtgatcgaagaggttcctggtgagctcatgcaggaagacctggcaacggatgacgtcatgcttctggacacctgggaccaggtctttgtctgggttggaaaggattctcaagaagaagaaaagacagaagccttgacttctgctaagcggtacatcgagacggacccagccaatcgggatcggcggacgcccatcaccgtggtgaagcaaggctttgagcctccctcctttgtgggctggttccttggctgggatgatgattactggtctgtggaccccttggacagggccatggctgagctggctgcctgaggaggggcagggcccacccatgtcaccggtcagtgccttttggaactgtccttccctcaaagaggccttagagcgagcagagcagctctgctatgagtgtgtgtgtgtgtgtgtgttgtttcttttttttttttttacagtatccaaaaatagccctgcaaaaattcagagtccttgcaaaattgtctaaaatgtcagtgtttgggaaattaaatccaataaaaacattttgaagtgtgtactct

SEQ ID NO: 5548 - protein, 247 aa, Homo sapiens [sequence omitted]

SEQ ID NO: 5549 - DNA, 1238 bp, Homo sapiens
cacaagcatgatggcttcgtctggagggatgggcccagtgcgacatagaaggactgaagcctgcccccaaggtccctgacttgctctcctgtctccctgccagagccgtgtggtccaaggcaaggagcccgcccacctcatgagcctgtttggtgggaagcccatgatcatctacaagggcggcacctcccgcgagggcgggcagacagcccctgccagcacccgcctcttccaggtccgcgccaacagcgctggagccacccgggctgttgaggtaatttccaggtcctggaacacagaagggattggcctccctgaaacctcccagctcaatgaccagatctccaggcacaggaacgggggcaggggatggtgaatgacggggtattgcctaaggctggtgcactgaactccaacgatgcctttgttctgaaaaccccctcagccgcctacctgtgggtgggtacaggagccagcgaggcagagaagacgggggcccaggagctgctcagggtgctgcgggcccaacctgtgcaggtggcagaaggcagcgagccagatggcttctgggaggccctgggcgggaaggctgcctaccgcacatccccacggctgaaggacaagaagatggatgcccatcctcctcgcctctttgcctgctccaacaagattggacgttttgtgatcgaagaggttcctggtgagctcatgcaggaagacctggcaacggatgacgtcatgcttctggacacctgggaccaggtctttgtctgggttggaaaggattctcaagaagaagaaaagacagaagccttgacttctgctaagcggtacatcgagacggacccagccaatcgggatcggcggacgcccatcaccgtggtgaagcaaggctttgagcctccctcctttgtgggctggttccttggctgggatgatgattactggtctgtggaccccttggacagggccatggctgagctggctgcctgaggaggggcagggcccacccatgtcaccggtcagtgccttttggaactgtccttccctcaaagaggccttagagcgagcagagcagctctgctatgagtgtgtgtgtgtgtgtgtgttgtttcttttttttttttttacagtatccaaaaatagccctgcaaaaattcagagtccttgcaaaattgtctaaaatgtcagtgtttgggaaattaaatccaataaaaacattttgaagtgtgtactct

SEQ ID NO: 5550 - protein, 207 aa, Homo sapiens [sequence omitted]

SEQ ID NO: 5551 - DNA, 939 bp, Homo sapiens
tggcgtcccttggcaactggcgtggcctcccctcacagatggcttctgggaggccctgggcgggaaggctgcctaccgcacatccccacggctgaaggacaagaagatggatgcccatcctcctcgcctctttgcctgctccaacaagattggacgttttgtggtgagcccctgcggaggtcacacctctgctttcccctcgggaggcgagttccacaggactggccggcagcaggggcaggagaaacagttctgatggtgtggcacagaggaaggggccccctgccagctgcagccagctgtgccactccctcagggggcagataaaggaaggccacccaggggagggaagacatctcactgatgctctttcgttccttcccagatcgaagaggttcctggtgagctcatgcaggaagacctggcaacggatgacgtcatgcttctggacacctgggaccaggtctttgtctgggttggaaaggattctcaagaagaagaaaagacagaagccttgacttctgctaagcggtacatcgagacggacccagccaatcgggatcggcggacgcccatcaccgtggtgaagcaaggctttgagcctccctcctttgtgggctggttccttggctgggatgatgattactggtctgtggaccccttggacagggccatggctgagctggctgcctgaggaggggcagggcccacccatgtcaccggtcagtgccttttggaactgtccttccctcaaagaggccttagagcgagcagagcagctctgctatgagtgtgtgtgtgtgtgtgtgttgtttcttttttttttttttacagtatccaaaaatagccctgcaaaaattcagagtccttgcaaaattgtctaaaatgtcagtgtttgggaaattaaatccaataaaaacattttgaagtgtgtactct

SEQ ID NO: 5552 - protein, 94 aa, Homo sapiens [sequence omitted]

SEQ ID NO: 5553 - DNA, 797 bp, Homo sapiens
cttgactcaagtgaggtttgaaggcccaggctgctagatcctccaatttttaaagagaagttggaaatctagatttttatgtcataacggtttaaaaagacattgttggctaacacaaggtggtgggtgagcaaacaaaacatgtttgtaggttgccagttttcaacctctgttccaaatccttccagtcttagttcatgggctctgttagaaaggggagggctttgtctggtctgatacctggcccctccccagtcttcctccagccgtgaatttgatcagcactcctcatgtacctttcctgttgcatctcacctccaggtctttgtctgggttggaaaggattctcaagaagaagaaaagacagaagccttgacttctgctaagcggtacatcgagacggacccagccaatcgggatcggcggacgcccatcaccgtggtgaagcaaggctttgagcctccctcctttgtgggctggttccttggctgggatgatgattactggtctgtggaccccttggacagggccatggctgagctggctgcctgaggaggggcagggcccacccatgtcaccggtcagtgccttttggaactgtccttccctcaaagaggccttagagcgagcagagcagctctgctatgagtgtgtgtgtgtgtgtgtgttgtttcttttttttttttttacagtatccaaaaatagccctgcaaaaattcagagtccttgcaaaattgtctaaaatgtcagtgtttgggaaattaaatccaataaaaacattttgaagtgtgtactct

SEQ ID NO: 5554 - protein, 31 aa, Homo sapiens [sequence omitted]

SEQ ID NO: 5555 - DNA, 3050 bp, Homo sapiens
ggcattcccggcggctccgggtttggcaacgaggacgggggagtgcgactgcgtctcgggcagcatggccgagaagcggcacacacgggactccgaagcccagcggctccccgactccttcaaggacagccccagtaagggccttggaccttgcggatggattttggtggcgttctcattcttattcaccgttataactttcccaatctcaatatggatgtgcataaagattataaaagagtatgaaagagccatcatctttagattgggtcgcattttacaaggaggagccaaaggacctggtttgttttttattctgccatgcactgacagcttcatcaaagtggacatgagaactatttcatttgatattcctcctcaggagatcctcacaaaggattcagtgacaattagcgtggatggtgtggtctattaccgcgttcagaatgcaaccctggctgtggcaaatatcaccaacgctgactcagcaacccgtcttttggcacaaactactctgaggaatgttctgggcaccaagaatctttctcagatcctctctgacagagaagaaattgcacacaacatgcagtctactctggatgatgccactgatgcctggggaataaaggtggagcgtgtggaaattaaggatgaatgcatccagggctctgaaagaagcctccatggtcatcactgaatctcctgcagcccttcagctccgatacctgcagacactgaccaccattgctgctgagaaaaactcaacaattgtcttccctctgcccatagatatgctgcaaggaatcataggggcaaaacacagccatctaggctagtgtagagatgagcgctagccttccaagcatgaagtcggggaccaaattagcctttaactcataaagagagggtagggcttttctttttccatatgtcaattgtggtgttcccagaatgtatagcagttataaaaataggtgaaagaattgttagcttgtaaatactgagagattggtgatttatataaggtaatctgttagtcttaaaatagttaaaagtttgtatttttagattattatgtagtaggttagatccctcttgttttgacttccactgactcattctgaaccccctaagcacccaggccagaggcaagaacctgggctgtaactgccacctgacaccgctgactggctaaatgctttgcagaaagtgatgaccttacaccacaaccagcttctccaggtcatatgtgccttacctccagagagtctttttttttttttttctgagatggagtttcactcttgttgcccaggctggagtgcaatagcatgatctcggctcactgcaacctccgcctcctgggttcaagagattctcctgcctcagcctccccagtagctgggattacaggctcatgccaccatgcccagctaatttttgtattattattattgttttttagtagagacggggtttcaccatgttggccaggctagtcacgaactcctaacctcaggtgatccacccacctctgcctcccaaagtgctgggattacaggcatgagctaccacacctggtttggagagtcttaattaaggaaatttccctaatgttcatttattttctaaatccagaccgtgtttcagaataatccttacttgagagtagccattttcttgcctgtacttgtcagaactagaggaaatagccaagactaatgaaaaagattactctaacccttaaaagacttttaaattcactactagagtggtcattttaaaaatacatccatgttttaacttatttgagccttctttatgagtaaatgattcctccttgttctgtctttcaaaccagctaaatatttgtcacaaaagtgcttttttctcactgttgcctattttcatatatcaggttttaaatagttttaattttttaataaaattttctctacgttctatatgcaattgttatatatctatttgaatagctgaaggactaaaatacttttttaagagataacttcaggaaaccattatattttactatctgcatgctgttaactgtggtacactgtgaaatatgttgattacaaacccattcattacatagtataaggaattcacagtatattgactatatagtgtctaatgatcttgggcagatactgtcaaacttacaatatctatatagatgtaggtctttttaaatttacctagtcattcttctatcatgtatattgatgctgaaagaggaactggtcagctcctctggacaacaaattcttagtctataatattaggagacatcttctgttttgcaaatgtctgtgaatctgagcaacctggcattctgcttactggccagaaagctggcgggtgacatttgtaacatttcctctttgagactctgagttcacctagagaagtctaagcataacagctttctttcccagcacgagcctttatagctctctttagctcaaccactctgtccatccagccaatggatgtcccttcccctgtaccccaatttcaagcttattttaggaagccttgaactaccatgtatcctggctcctagctgagtttattagaggtatggagcagtgcaacttaaactcaagttgcacttacattttgaattttaaaatgatggttttatctgttgtgtgaagtggttcacccttgaggaccaggagcctccatatcctgactgaaaaccttttctgagacttagagtaacagtgcttttggttccttgagttctcctgtctccagataccaaatgaccttgacttttctgccttgtgaattcgtagtccaatcagctgaaattaaatcacttgggagggacgcatagaaggagctctaggaacacagtgccagtgcagaagtttctccaggtggcctccctttccaacaatgtacataataaagtgtatgcactttcactaatatttttggggtgagagtctgtttcggcctgtattgaatgtctgtggatttccgttttcagaagtagtacattagatcctccggttctg

SEQ ID NO: 5556 - protein, 210 aa, Homo sapiens
MAEKRHTRDSEAQRLPDSFKDSPSKGLGPCGWILVAFSFLFTVITFPISIWMCIKIIKEYERAIIFRLGRILQGGAKGPGLFFILPCTDSFIKVDMRTISFDIPPQEILTKDSVTISVDGVVYYRVQNATLAVANITNADSATRLLAQTTLRNVLGTKNLSQILSDREEIAHNMQSTLDDATDAWGIKVERVEIKDECIQGSERSLHGHH

SEQ ID NO: 5557 - DNA, 2652 bp, Homo sapiens
agggcattcccggcggctccgggtttggcaacgaggacgggggagtgcgactgcgtctcgggcagcatggccgagaagcggcacacacgggactccgaagcccagcggctccccgactccttcaaggacagccccagtaagggccttggaccttgcggatggattttggtggcgttctcattcttattcaccgttataactttcccaatctcaatatggatgtgcataaaggttattgcagccgaaggagaaatgaatgcatccagggctctgaaagaagcctccatggtcatcactgaatctcctgcagcccttcagctccgatacctgcagacactgaccaccattgctgctgagaaaaactcaacaattgtcttccctctgcccatagatatgctgcaaggaatcataggggcaaaacacagccatctaggctagtgtagagatgagcgctagccttccaagcatgaagtcggggaccaaattagcctttaactcataaagagagggtagggcttttctttttccatatgtcaattgtggtgttcccagaatgtatagcagttataaaaataggtgaaagaattgttagcttgtaaatactgagagattggtgatttatataaggtaatctgttagtcttaaaatagttaaaagtttgtatttttagattattatgtagtaggttagatccctcttgttttgacttccactgactcattctgaaccccctaagcacccaggccagaggcaagaacctgggctgtaactgccacctgacaccgctgactggctaaatgctttgcagaaagtgatgaccttacaccacaaccagcttctccaggtcatatgtgccttacctccagagagtctttttttttttttttctgagatggagtttcactcttgttgcccaggctggagtgcaatagcatgatctcggctcactgcaacctccgcctcctgggttcaagagattctcctgcctcagcctccccagtagctgggattacaggctcatgccaccatgcccagctaatttttgtattattattattgttttttagtagagacggggtttcaccatgttggccaggctagtcacgaactcctaacctcaggtgatccacccacctctgcctcccaaagtgctgggattacaggcatgagctaccacacctggtttggagagtcttaattaaggaaatttccctaatgttcatttattttctaaatccagaccgtgtttcagaataatccttacttgagagtagccattttcttgcctgtacttgtcagaactagaggaaatagccaagactaatgaaaaagattactctaacccttaaaagacttttaaattcactactagagtggtcattttaaaaatacatccatgttttaacttatttgagccttctttatgagtaaatgattcctccttgttctgtctttcaaaccagctaaatatttgtcacaaaagtgcttttttctcactgttgcctattttcatatatcaggttttaaatagttttaattttttaataaaattttctctacgttctatatgcaattgttatatatctatttgaatagctgaaggactaaaatacttttttaagagataacttcaggaaaccattatattttactatctgcatgctgttaactgtggtacactgtgaaatatgttgattacaaacccattcattacatagtataaggaattcacagtatattgactatatagtgtctaatgatcttgggcagatactgtcaaacttacaatatctatatagatgtaggtctttttaaatttacctagtcattcttctatcatgtatattgatgctgaaagaggaactggtcagctcctctggacaacaaattcttagtctataatattaggagacatcttctgttttgcaaatgtctgtgaatctgagcaacctggcattctgcttactggccagaaagctggcgggtgacatttgtaacatttcctctttgagactctgagttcacctagagaagtctaagcataacagctttctttcccagcacgagcctttatagctctctttagctcaaccactctgtccatccagccaatggatgtcccttcccctgtaccccaatttcaagcttattttaggaagccttgaactaccatgtatcctggctcctagctgagtttattagaggtatggagcagtgcaacttaaactcaagttgcacttacattttgaattttaaaatgatggttttatctgttgtgtgaagtggttcacccttgaggaccaggagcctccatatcctgactgaaaaccttttctgagacttagagtaacagtgcttttggttccttgagttctcctgtctccagataccaaatgaccttgacttttctgccttgtgaattcgtagtccaatcagctgaaattaaatcacttgggagggacgcatagaaggagctctaggaacacagtgccagtgcagaagtttctccaggtggcctccctttccaacaatgtacataataaagtgtatgcactttcactaatatttttggggtgagagtctgtttcggcctgtattgaatgtctgtggatttccgttttcagaagtagtacattagatcctccggttctg

SEQ ID NO: 5558 - protein, 123 aa, Homo sapiens; identical to SEQ ID NO: 734

SEQ ID NO: 5559 - DNA, 3162 bp, Homo sapiens
tgcctctggctcctcagggcattcccggcggctccgggtttggcaacgaggacgggggagtgcgactgcgtctcgggcagcatggccgagaagcggcacacacgggactccgaagcccagcggctccccgactccttcaaggacagccccagtaagggccttggaccttgcggatggattttggtggcgttctcattcttattcaccgttataactttcccaatctcaatatggatgtgcataaagattataaaagagtatgaaagagccatcatctttagattgggtcgcattttacaaggaggagccaaaggacctggtttgttttttattctgccatgcactgacagcttcatcaaagtggacatgagaactatttcatttgatattcctcctcaggagatcctcacaaaggattcagtgacaattagcgtggatggtgtggtctattaccgcgttcagaatgcaaccctggctgtggcaaatatcaccaacgctgactcagcaacccgtcttttggcacaaactactctgaggaatgttctgggcaccaagaatctttctcagatcctctctgacagagaagaaattgcacacaacatgcagtctactctggatgatgccactgatgcctggggaataaaggtggagcgtgtggaaattaaggatgtgaaactacctgtgcagctccagagagctatggctgcagaagcagaagcgtcccgcgaggcccgcgccaaggttattgcagccgaaggagaaatgaatgcatccagggctctgaaagaagcctccatggtcatcactgaatctcctgcagcccttcagctccgatacctgcagacactgaccaccattgctgctgagaaaaactcaacaattgtcttccctctgcccatagatatgctgcaaggaatcataggggcaaaacacagccatctaggctagtgtagagatgagcgctagccttccaagcatgaagtcggggaccaaattagcctttaactcataaagagagggtagggcttttctttttccatatgtcaattgtggtgttcccagaatgtatagcagttataaaaataggtgaaagaattgttagcttgtaaatactgagagattggtgatttatataaggtaatctgttagtcttaaaatagttaaaagtttgtatttttagattattatgtagtaggttagatccctcttgttttgacttccactgactcattctgaaccccctaagcacccaggccagaggcaagaacctgggctgtaactgccacctgacaccgctgactggctaaatgctttgcagaaagtgatgaccttacaccacaaccagcttctccaggtcatatgtgccttacctccagagagtctttttttttttttttctgagatggagtttcactcttgttgcccaggctggagtgcaatagcatgatctcggctcactgcaacctccgcctcctgggttcaagagattctcctgcctcagcctccccagtagctgggattacaggctcatgccaccatgcccagctaatttttgtattattattattgttttttagtagagacggggtttcaccatgttggccaggctagtcacgaactcctaacctcaggtgatccacccacctctgcctcccaaagtgctgggattacaggcatgagctaccacacctggtttggagagtcttaattaaggaaatttccctaatgttcatttattttctaaatccagaccgtgtttcagaataatccttacttgagagtagccattttcttgcctgtacttgtcagaactagaggaaatagccaagactaatgaaaaagattactctaacccttaaaagacttttaaattcactactagagtggtcattttaaaaatacatccatgttttaacttatttgagccttctttatgagtaaatgattcctccttgttctgtctttcaaaccagctaaatatttgtcacaaaagtgcttttttctcactgttgcctattttcatatatcaggttttaaatagttttaattttttaataaaattttctctacgttctatatgcaattgttatatatctatttgaatagctgaaggactaaaatacttttttaagagataacttcaggaaaccattatattttactatctgcatgctgttaactgtggtacactgtgaaatatgttgattacaaacccattcattacatagtataaggaattcacagtatattgactatatagtgtctaatgatcttgggcagatactgtcaaacttacaatatctatatagatgtaggtctttttaaatttacctagtcattcttctatcatgtatattgatgctgaaagaggaactggtcagctcctctggacaacaaattcttagtctataatattaggagacatcttctgttttgcaaatgtctgtgaatctgagcaacctggcattctgcttactggccagaaagctggcgggtgacatttgtaacatttcctctttgagactctgagttcacctagagaagtctaagcataacagctttctttcccagcacgagcctttatagctctctttagctcaaccactctgtccatccagccaatggatgtcccttcccctgtaccccaatttcaagcttattttaggaagccttgaactaccatgtatcctggctcctagctgagtttattagaggtatggagcagtgcaacttaaactcaagttgcacttacattttgaattttaaaatgatggttttatctgttgtgtgaagtggttcacccttgaggaccaggagcctccatatcctgactgaaaaccttttctgagacttagagtaacagtgcttttggttccttgagttctcctgtctccagataccaaatgaccttgacttttctgccttgtgaattcgtagtccaatcagctgaaattaaatcacttgggagggacgcatagaaggagctctaggaacacagtgccagtgcagaagtttctccaggtggcctccctttccaacaatgtacataataaagtgtatgcactttcactaatatttttggggtgagagtctgtttcggcctgtattgaatgtctgtggatttccgttttcagaagtagtacattagatcctccggttctg

SEQ ID NO: 5560 - protein, 288 aa, Homo sapiens [sequence omitted]

SEQ ID NO: 5561 - DNA, 2962 bp, Homo sapiens
ggcattcccggcggctccgggtttggcaacgaggacgggggagtgcgactgcgtctcgggcagcatggccgagaagcggcacacacgggactccgaagcccagcggctccccgactccttcaaggacagccccagtaagggccttggaccttgcggatggattttggtggcgttctcattcttattcaccgttataactttcccaatctcaatatggatgtgcataaagattataaaagagtatgaaagagccatcatctttagattgggtcgcattttacaaggaggagccaaaggacctggtttgttttttattctgccatgcactgacagcttcatcaaagtggacatgagaactatttcatttgatattcctcctcaggagatcctcacaaaggattcagtgacaattagcgtggatggtgtggtctattaccgcgttcagaatgcaaccctggctgtggcaaatatcaccaacgctgactcagcaacccgtcttttggcacaaactactctgaggaatgttctgggcaccaagaatctttctcagatcctctctgacagagaagaaattgcacacaacatgcagtctactctggatgatgccactgatgcctggggaataaaggtggagcgtgtggaaattaaggatgaatgcatccagggctctgaaagaagcctccatggtcatcactgaatctcctgcagcccttcagctccgatacctgcagacactgaccaccattgctgctgagaaaaactcaacaattgtcttccctctgcccatagatatgctgcaaggaatcataggggcaaaacacagccatctaggctagtgtagagatgagcgctagccttccaagcatgaagtcggggaccaaattagcctttaactcataaagagagggtagggcttttctttttccatatgtcaattgtggtgttcccagaatgtatagcagttataaaaataggtgaaagaattgttagcttgtaaatactgagagattggtgatttatataaggtaatctgttagtcttaaaatagttaaaagtttgtatttttagattattatgtagtaggttagatccctcttgttttgacttccactgactcattctgaaccccctaagcacccaggccagaggcaagaacctgggctgtaactgccacctgacaccgctgactggctaaatgctttgcagaaagtgatgaccttacaccacaaccagcttctccaggtcatatgtgccttacctccagagagtctttttttttttttttctgagatggagtttcactcttgttgcccaggctggagtgcaatagcatgatctcggctcactgcaacctccgcctcctgggttcaagagattctcctgcctcagcctccccagtagctgggattacaggctcatgccaccatgcccagctaatttttgtattattattattgttttttagtagagacggggtttcaccatgttggccaggctagtcacgaactcctaacctcaggtgatccacccacctctgcctcccaaagtgctgggattacaggcatgagctaccacacctggtttggagagtcttaattaaggaaatttccctaatgttcatttattttctaaatccagaccgtgtttcagaataatccttacttgagagtagccattttcttgcctgtacttgtcagaactagaggaaatagccaagactaatgaaaaagattactctaacccttaaaagacttttaaattcactactagagtggtcattttaaaaatacatccatgttttaacttatttgagccttctttatgagtaaatgattcctccttgttctgtctttcaaaccagctaaatatttgtcacaaaagtgcttttttctcactgttgcctattttcatatatcaggttttaaatagttttaattttttaataaaattttctctacgttctatatgcaattgttatatatctatttgaatagctgaaggactaaaatacttttttaagagataacttcaggaaaccattatattttactatctgcatgctgttaactgtggtacactgtgaaatatgttgattacaaacccattcattacatagtataaggaattcacagtatattgactatatagtgtctaatgatcttgggcagatactgtcaaacttacaatatctatatagatgtaggtctttttaaatttacctagtcattcttctatcatgtatattgatgctgaaagaggaactggtcagctcctctggacaacaaattcttagtctataatattaggagacatcttctgttttgcaaatgtctgtgaatctgagcaacctggcattctgcttactggccagaaagctggcgggtgacatttgtaacatttcctctttgagactctgagttcacctagagaagtctaagcataacagctttctttcccagcacgagcctttatagctctctttagctcaaccactctgtccatccagccaatggatgtcccttcccctgtaccccaatttcaagcttattttaggaagccttgaactaccatgtatcctggctcctagctgagtttattagaggtatggagcagtgcaacttaaactcaagttgcacttacattttgaattttaaaatgatggttttatctgttgtgtgaagtggttcacccttgaggaccaggagcctccatatcctgactgaaaaccttttctgagacttagagtaacagtgcttttggttccttgagttctcctgtctccagataccaaatgaccttgacttttctgccttgtgaattcgtagtccaatcagctgaaattaaatcacttgggagggacgcatagaaggagctctaggaacacagtgccagtgcagaagtttctccaggtggcctccctttccaacaatgtacataataaagtgtatgcactttcactaat

SEQ ID NO: 5562 - protein, 210 aa, Homo sapiens; identical to SEQ ID NO: 5556

SEQ ID NO: 5563 - DNA, 2578 bp, Homo sapiens
gcctctggctcctcagggcattcccggcggctccgggtttggcaacgaggacgggggagtgcgactgcgtctcgggcagcatggccgagaagcggcacacacgggactccgaagcccagcggctccccgactccttcaaggacagccccagtaagggccttggaccttgcggatggattttggtggcgttctcattcttattcaccgttataactttcccaatctcaatatggatgtgcataaaggttattgcagccgaaggagaaatgaatgcatccagggctctgaaagaagcctccatggtcatcactgaatctcctgcagcccttcagctccgatacctgcagacactgaccaccattgctgctgagaaaaactcaacaattgtcttccctctgcccatagatatgctgcaaggaatcataggggcaaaacacagccatctaggctagtgtagagatgagcgctagccttccaagcatgaagtcggggaccaaattagcctttaactcataaagagagggtagggcttttctttttccatatgtcaattgtggtgttcccagaatgtatagcagttataaaaataggtgaaagaattgttagcttgtaaatactgagagattggtgatttatataaggtaatctgttagtcttaaaatagttaaaagtttgtatttttagattattatgtagtaggttagatccctcttgttttgacttccactgactcattctgaaccccctaagcacccaggccagaggcaagaacctgggctgtaactgccacctgacaccgctgactggctaaatgctttgcagaaagtgatgaccttacaccacaaccagcttctccaggtcatatgtgccttacctccagagagtctttttttttttttttctgagatggagtttcactcttgttgcccaggctggagtgcaatagcatgatctcggctcactgcaacctccgcctcctgggttcaagagattctcctgcctcagcctccccagtagctgggattacaggctcatgccaccatgcccagctaatttttgtattattattattgttttttagtagagacggggtttcaccatgttggccaggctagtcacgaactcctaacctcaggtgatccacccacctctgcctcccaaagtgctgggattacaggcatgagctaccacacctggtttggagagtcttaattaaggaaatttccctaatgttcatttattttctaaatccagaccgtgtttcagaataatccttacttgagagtagccattttcttgcctgtacttgtcagaactagaggaaatagccaagactaatgaaaaagattactctaacccttaaaagacttttaaattcactactagagtggtcattttaaaaatacatccatgttttaacttatttgagccttctttatgagtaaatgattcctccttgttctgtctttcaaaccagctaaatatttgtcacaaaagtgcttttttctcactgttgcctattttcatatatcaggttttaaatagttttaattttttaataaaattttctctacgttctatatgcaattgttatatatctatttgaatagctgaaggactaaaatacttttttaagagataacttcaggaaaccattatattttactatctgcatgctgttaactgtggtacactgtgaaatatgttgattacaaacccattcattacatagtataaggaattcacagtatattgactatatagtgtctaatgatcttgggcagatactgtcaaacttacaatatctatatagatgtaggtctttttaaatttacctagtcattcttctatcatgtatattgatgctgaaagaggaactggtcagctcctctggacaacaaattcttagtctataatattaggagacatcttctgttttgcaaatgtctgtgaatctgagcaacctggcattctgcttactggccagaaagctggcgggtgacatttgtaacatttcctctttgagactctgagttcacctagagaagtctaagcataacagctttctttcccagcacgagcctttatagctctctttagctcaaccactctgtccatccagccaatggatgtcccttcccctgtaccccaatttcaagcttattttaggaagccttgaactaccatgtatcctggctcctagctgagtttattagaggtatggagcagtgcaacttaaactcaagttgcacttacattttgaattttaaaatgatggttttatctgttgtgtgaagtggttcacccttgaggaccaggagcctccatatcctgactgaaaaccttttctgagacttagagtaacagtgcttttggttccttgagttctcctgtctccagataccaaatgaccttgacttttctgccttgtgaattcgtagtccaatcagctgaaattaaatcacttgggagggacgcatagaaggagctctaggaacacagtgccagtgcagaagtttctccaggtggcctccctttccaacaatgtacataataaagtgtatgcactttcactaat

SEQ ID NO: 5564 - protein, 123 aa, Homo sapiens; identical to SEQ ID NO: 734

SEQ ID NO: 5565 - DNA, 3074 bp, Homo sapiens
tgcctctggctcctcagggcattcccggcggctccgggtttggcaacgaggacgggggagtgcgactgcgtctcgggcagcatggccgagaagcggcacacacgggactccgaagcccagcggctccccgactccttcaaggacagccccagtaagggccttggaccttgcggatggattttggtggcgttctcattcttattcaccgttataactttcccaatctcaatatggatgtgcataaagattataaaagagtatgaaagagccatcatctttagattgggtcgcattttacaaggaggagccaaaggacctggtttgttttttattctgccatgcactgacagcttcatcaaagtggacatgagaactatttcatttgatattcctcctcaggagatcctcacaaaggattcagtgacaattagcgtggatggtgtggtctattaccgcgttcagaatgcaaccctggctgtggcaaatatcaccaacgctgactcagcaacccgtcttttggcacaaactactctgaggaatgttctgggcaccaagaatctttctcagatcctctctgacagagaagaaattgcacacaacatgcagtctactctggatgatgccactgatgcctggggaataaaggtggagcgtgtggaaattaaggatgtgaaactacctgtgcagctccagagagctatggctgcagaagcagaagcgtcccgcgaggcccgcgccaaggttattgcagccgaaggagaaatgaatgcatccagggctctgaaagaagcctccatggtcatcactgaatctcctgcagcccttcagctccgatacctgcagacactgaccaccattgctgctgagaaaaactcaacaattgtcttccctctgcccatagatatgctgcaaggaatcataggggcaaaacacagccatctaggctagtgtagagatgagcgctagccttccaagcatgaagtcggggaccaaattagcctttaactcataaagagagggtagggcttttctttttccatatgtcaattgtggtgttcccagaatgtatagcagttataaaaataggtgaaagaattgttagcttgtaaatactgagagattggtgatttatataaggtaatctgttagtcttaaaatagttaaaagtttgtatttttagattattatgtagtaggttagatccctcttgttttgacttccactgactcattctgaaccccctaagcacccaggccagaggcaagaacctgggctgtaactgccacctgacaccgctgactggctaaatgctttgcagaaagtgatgaccttacaccacaaccagcttctccaggtcatatgtgccttacctccagagagtctttttttttttttttctgagatggagtttcactcttgttgcccaggctggagtgcaatagcatgatctcggctcactgcaacctccgcctcctgggttcaagagattctcctgcctcagcctccccagtagctgggattacaggctcatgccaccatgcccagctaatttttgtattattattattgttttttagtagagacggggtttcaccatgttggccaggctagtcacgaactcctaacctcaggtgatccacccacctctgcctcccaaagtgctgggattacaggcatgagctaccacacctggtttggagagtcttaattaaggaaatttccctaatgttcatttattttctaaatccagaccgtgtttcagaataatccttacttgagagtagccattttcttgcctgtacttgtcagaactagaggaaatagccaagactaatgaaaaagattactctaacccttaaaagacttttaaattcactactagagtggtcattttaaaaatacatccatgttttaacttatttgagccttctttatgagtaaatgattcctccttgttctgtctttcaaaccagctaaatatttgtcacaaaagtgcttttttctcactgttgcctattttcatatatcaggttttaaatagttttaattttttaataaaattttctctacgttctatatgcaattgttatatatctatttgaatagctgaaggactaaaatacttttttaagagataacttcaggaaaccattatattttactatctgcatgctgttaactgtggtacactgtgaaatatgttgattacaaacccattcattacatagtataaggaattcacagtatattgactatatagtgtctaatgatcttgggcagatactgtcaaacttacaatatctatatagatgtaggtctttttaaatttacctagtcattcttctatcatgtatattgatgctgaaagaggaactggtcagctcctctggacaacaaattcttagtctataatattaggagacatcttctgttttgcaaatgtctgtgaatctgagcaacctggcattctgcttactggccagaaagctggcgggtgacatttgtaacatttcctctttgagactctgagttcacctagagaagtctaagcataacagctttctttcccagcacgagcctttatagctctctttagctcaaccactctgtccatccagccaatggatgtcccttcccctgtaccccaatttcaagcttattttaggaagccttgaactaccatgtatcctggctcctagctgagtttattagaggtatggagcagtgcaacttaaactcaagttgcacttacattttgaattttaaaatgatggttttatctgttgtgtgaagtggttcacccttgaggaccaggagcctccatatcctgactgaaaaccttttctgagacttagagtaacagtgcttttggttccttgagttctcctgtctccagataccaaatgaccttgacttttctgccttgtgaattcgtagtccaatcagctgaaattaaatcacttgggagggacgcatagaaggagctctaggaacacagtgccagtgcagaagtttctccaggtggcctccctttccaacaatgtacataataaagtgtatgcactttcactaat

SEQ ID NO: 5566 - protein, 288 aa, Homo sapiens [sequence omitted]

SEQ ID NO: 5567 - DNA, 940 bp, Homo sapiens
agactaatgaaaaagattactctaacccttaaaagacttttaaattcactactagagtggtcattttaaaaatacatccatgttttaacttatttgagccttctttatgagtaaatgattcctccttgttctgtctttcaaaccagctaaatatttgtcacaaaagtgcttttttctcactgttgcctattttcatatatcaggttttaaatagttttaattttttaataaaattttctctacgttctatatgcaattgttatatatctatttgaatagctgaaggactaaaatacttttttaagagataacttcaggaaaccattatattttactatctgcatgctgttaactgtggtacactgtgaaatatgttgattacaaacccattcattacatagtataaggaattcacagtatattgactatatagtgtctaatgatcttgggcagatactgtcaaacttacaatatctatatagatgtaggtctttttaaatttacctagtcattcttctatcatgtatattgatgctgaaagaggaactggtcagctcctctggacaacaaattcttagtctataatattaggagacatcttctgttttgcaaatgtctgtgaatctgagcaacctggcattctgcttactggccagaaagctggcgggtgacatttgtaacatttcctctttgagactctgagttcacctagagaagtctaagcataacagctttctttcccagcacgagcctttatagctctctttagctcaaccactctgtccatccagccaatggatgtcccttcccctgtaccccaatttcaagttgggagggacgcatagaaggagctctaggaacacagtgccagtgcagaagtttctccaggtggcctccctttccaacaatgtacataataaagtgtatgcactttcactaa

SEQ ID NO: 5568 - protein, 46 aa, Homo sapiens
MSLPLYPNFKLGGTHRRSSRNTVPVQKFLQVASLSNNVHNKVYALS

SEQ ID NO: 5569 - DNA, 1965 bp, Homo sapiens
ggcattcccggcggctccgggtttggcaacgaggacgggggagtgcgactgcgtctcgggcagcatggccgagaagcggcacacacgggactccgaagcccagcggctccccgactccttcaaggacagccccagtaagggccttggaccttgcggatggattttggtggcgttctcattcttattcaccgttataactttcccaatctcaatatggatgtgcataaagattataaaagagtatgaaagagccatcatctttagattgggtcgcattttacaaggaggagccaaaggacctggtttgttttttattctgccatgcactgacagcttcatcaaagtggacatgagaactatttcatttgatattcctcctcaggagatcctcacaaaggattcagtgacaattagcgtggatggtgtggtctattaccgcgttcagaatgcaaccctggctgtggcaaatatcaccaacgctgactcagcaacccgtcttttggcacaaactactctgaggaatgttctgggcaccaagaatctttctcagatcctctctgacagagaagaaattgcacacaacatgcagtctactctggatgatgccactgatgcctggggaataaaggtggagcgtgtggaaattaaggatgaatgcatccagggctctgaaagaagcctccatggtcatcactgaatctcctgcagcccttcagctccgatacctgcagacactgaccaccattgctgctgagaaaaactcaacaattgtcttccctctgcccatagatatgctgcaaggaatcataggggcaaaacacagccatctaggctagtgtagagatgagcgctagccttccaagcatgaagtcggggaccaaattagcctttaactcataaagagagggtagggcttttctttttccatatgtcaattgtggtgttcccagaatgtatagcagttataaaaataggtgaaagaattgttagcttgtaaatactgagagattggtgatttatataaggtaatctgttagtcttaaaatagttaaaagtttgtatttttagattattatgtagtaggttagatccctcttgttttgacttccactgactcattctgaaccccctaagcacccaggccagaggcaagaacctgggctgtaactgccacctgacaccgctgactggctaaatgctttgcagaaagtgatgaccttacaccacaaccagcttctccaggtcatatgtgccttacctccagagagtctttttttttttttttctgagatggagtttcactcttgttgcccaggctggagtgcaatagcatgatctcggctcactgcaacctccgcctcctgggttcaagagattctcctgcctcagcctccccagtagctgggattacaggctcatgccaccatgcccagctaatttttgtattattattattgttttttagtagagacggggtttcaccatgttggccaggctagtcacgaactcctaacctcaggtgatccacccacctctgcctcccaaagtgctgggattacaggcatgagctaccacacctggtttggagagtcttaattaaggaaatttccctaatgttcatttattttctaaatccagaccgtgtttcagaataatccttacttgagagtagccattttcttgcctgtacttgtcagaactagaggaaatagccaagactaatgaaaaagattactctaacccttaaaagacttttaaattcactactagagtggtcattttaaaaatacatccatgttttaacttatttgagccttctttatgagtaaatgattcctccttgttctgtctttcaaaccagctaaatatttgtcacaaaagtgcttttttctcactgttgcctattttcatatatcaggttttaaatagttttaattttttaataaaattttctctacgttctat

SEQ ID NO: 5570 - protein, 210 aa, Homo sapiens; identical to SEQ ID NO: 5556

SEQ ID NO: 5571 - DNA, 1567 bp, Homo sapiens
agggcattcccggcggctccgggtttggcaacgaggacgggggagtgcgactgcgtctcgggcagcatggccgagaagcggcacacacgggactccgaagcccagcggctccccgactccttcaaggacagccccagtaagggccttggaccttgcggatggattttggtggcgttctcattcttattcaccgttataactttcccaatctcaatatggatgtgcataaaggttattgcagccgaaggagaaatgaatgcatccagggctctgaaagaagcctccatggtcatcactgaatctcctgcagcccttcagctccgatacctgcagacactgaccaccattgctgctgagaaaaactcaacaattgtcttccctctgcccatagatatgctgcaaggaatcataggggcaaaacacagccatctaggctagtgtagagatgagcgctagccttccaagcatgaagtcggggaccaaattagcctttaactcataaagagagggtagggcttttctttttccatatgtcaattgtggtgttcccagaatgtatagcagttataaaaataggtgaaagaattgttagcttgtaaatactgagagattggtgatttatataaggtaatctgttagtcttaaaatagttaaaagtttgtatttttagattattatgtagtaggttagatccctcttgttttgacttccactgactcattctgaaccccctaagcacccaggccagaggcaagaacctgggctgtaactgccacctgacaccgctgactggctaaatgctttgcagaaagtgatgaccttacaccacaaccagcttctccaggtcatatgtgccttacctccagagagtctttttttttttttttctgagatggagtttcactcttgttgcccaggctggagtgcaatagcatgatctcggctcactgcaacctccgcctcctgggttcaagagattctcctgcctcagcctccccagtagctgggattacaggctcatgccaccatgcccagctaatttttgtattattattattgttttttagtagagacggggtttcaccatgttggccaggctagtcacgaactcctaacctcaggtgatccacccacctctgcctcccaaagtgctgggattacaggcatgagctaccacacctggtttggagagtcttaattaaggaaatttccctaatgttcatttattttctaaatccagaccgtgtttcagaataatccttacttgagagtagccattttcttgcctgtacttgtcagaactagaggaaatagccaagactaatgaaaaagattactctaacccttaaaagacttttaaattcactactagagtggtcattttaaaaatacatccatgttttaacttatttgagccttctttatgagtaaatgattcctccttgttctgtctttcaaaccagctaaatatttgtcacaaaagtgcttttttctcactgttgcctattttcatatatcaggttttaaatagttttaattttttaataaaattttctctacgttctat

SEQ ID NO: 5572 - protein, 123 aa, Homo sapiens; identical to SEQ ID NO: 734

SEQ ID NO: 5573 - DNA, 2077 bp, Homo sapiens
tgcctctggctcctcagggcattcccggcggctccgggtttggcaacgaggacgggggagtgcgactgcgtctcgggcagcatggccgagaagcggcacacacgggactccgaagcccagcggctccccgactccttcaaggacagccccagtaagggccttggaccttgcggatggattttggtggcgttctcattcttattcaccgttataactttcccaatctcaatatggatgtgcataaagattataaaagagtatgaaagagccatcatctttagattgggtcgcattttacaaggaggagccaaaggacctggtttgttttttattctgccatgcactgacagcttcatcaaagtggacatgagaactatttcatttgatattcctcctcaggagatcctcacaaaggattcagtgacaattagcgtggatggtgtggtctattaccgcgttcagaatgcaaccctggctgtggcaaatatcaccaacgctgactcagcaacccgtcttttggcacaaactactctgaggaatgttctgggcaccaagaatctttctcagatcctctctgacagagaagaaattgcacacaacatgcagtctactctggatgatgccactgatgcctggggaataaaggtggagcgtgtggaaattaaggatgtgaaactacctgtgcagctccagagagctatggctgcagaagcagaagcgtcccgcgaggcccgcgccaaggttattgcagccgaaggagaaatgaatgcatccagggctctgaaagaagcctccatggtcatcactgaatctcctgcagcccttcagctccgatacctgcagacactgaccaccattgctgctgagaaaaactcaacaattgtcttccctctgcccatagatatgctgcaaggaatcataggggcaaaacacagccatctaggctagtgtagagatgagcgctagccttccaagcatgaagtcggggaccaaattagcctttaactcataaagagagggtagggcttttctttttccatatgtcaattgtggtgttcccagaatgtatagcagttataaaaataggtgaaagaattgttagcttgtaaatactgagagattggtgatttatataaggtaatctgttagtcttaaaatagttaaaagtttgtatttttagattattatgtagtaggttagatccctcttgttttgacttccactgactcattctgaaccccctaagcacccaggccagaggcaagaacctgggctgtaactgccacctgacaccgctgactggctaaatgctttgcagaaagtgatgaccttacaccacaaccagcttctccaggtcatatgtgccttacctccagagagtctttttttttttttttctgagatggagtttcactcttgttgcccaggctggagtgcaatagcatgatctcggctcactgcaacctccgcctcctgggttcaagagattctcctgcctcagcctccccagtagctgggattacaggctcatgccaccatgcccagctaatttttgtattattattattgttttttagtagagacggggtttcaccatgttggccaggctagtcacgaactcctaacctcaggtgatccacccacctctgcctcccaaagtgctgggattacaggcatgagctaccacacctggtttggagagtcttaattaaggaaatttccctaatgttcatttattttctaaatccagaccgtgtttcagaataatccttacttgagagtagccattttcttgcctgtacttgtcagaactagaggaaatagccaagactaatgaaaaagattactctaacccttaaaagacttttaaattcactactagagtggtcattttaaaaatacatccatgttttaacttatttgagccttctttatgagtaaatgattcctccttgttctgtctttcaaaccagctaaatatttgtcacaaaagtgcttttttctcactgttgcctattttcatatatcaggttttaaatagttttaattttttaataaaattttctctacgttctat

SEQ ID NO: 5574 - protein, 288 aa, Homo sapiens [sequence omitted]

SEQ ID NO: 5575 - DNA, 497 bp, Homo sapiens
attcccggcggctccgggtttggcaacgaggacgggggagtgcgactgcgtctcgggcagcatggccgagaagcggcacacacgggactccgaagcccagcggctccccgactccttcaaggacagccccagtaagggccttggaccttgcggatggattttggtggcgttctcattcttattcaccgttataactttcccaatctcaatatggatgtgcataaaggaggagccaaaggacctggtttgttttttattctgccatgcactgacagcttcatcaaagtggacatgagaactatttcatttgatattcctcctcaggagatcctcacaaaggattcagtgacaattagcgtggatggtgtggtctattaccgcgttcagaatgcaaccctggctgtggcaaatatcaccaacgctgactcagcaacccgtcttttggcacaaactactctgaggaatgttctgggcaccaagaatctttctcagatcct

SEQ ID NO: 5576 - protein, 113 aa, Homo sapiens
MDFGGVLILIHRYNFPNLNMDVHKGGAKGPGLFFILPCTDSFIKVDMRTISFDIPPQEILTKDSVTISVDGVVYYRVQNATLAVANITNADSATRLLAQTTLRNVLGTKNLSQ

SEQ ID NO: 5577 - DNA, 975 bp, Homo sapiens
ggcggctccgggtttggcaacgaggacgggggagtgcgactgcgtctcgggcagcatggccgagaagcggcacacacgggacccacatctcaccctttgcccactccccttctttcccgactcactctctcgaaggccgcctcctccacccagccctggcctggccccagggtgaaccccctcctcccccaatcccacctcccgaaacttagaccgatttgcagaaggaagaagtctctctggctttcttcttacctctctttctagctccactttctgccccatttttccccctccgctttcctctgcgttttggagaactctccttcccggcttttgttcctcgccaggaaccctgagttctcccaccctcacccccaccctcccttcccagtcttcaaggcaggagctgtaagtggctcagtctcgttcccctgtggaggaactggtactctggggagggggttccaataaagagagatggtggacctctcaggagtcctggtacccactcaggagctcttagtgatccagaggaattacagtgtttctaaagatggaatttcaggcaggatggcagtgaaagcaatttagagggctgggtggtcctttccaggacccctcaaagaacatgacattggagtcatctattctgattatttgtaaagccagctttatccacagcatcttagctataagttccatttcccttgtccagggatccctgtgttcagttccttcccaggagcatcaaaggaattacagaaatctttattcctcactttttgtctactaataacgttgcaggttatcttcccaaatggagagtgtaacagggaggagttgatgagaataatggcaaccacaacaacaaaaattgaaactaaataggtcaggctccgtatcacttttttttttttttttgagacggagtttcgcttttcttgcccaggctggagtgtgatctccgctcac

SEQ ID NO: 5578 - protein, 39 aa, Homo sapiens
MAEKRHTRDPHLTLCPLPFFPDSLSRRPPPPPSPGLAPG

SEQ ID NO: 5579 - DNA, 606 bp, Homo sapiens
tgggaaacgtgccgttggcagcccgccacccctccatcgtgacctcagtctgccaaacagggaaattactccaggatttgaatcatcacaagagattcaccagaggattttatacacttgggctgtggcagcagactaattacatcacagcactagagctgagatactggctgggtggatttcagcaaatttccaagggcacatgacatgtgggcacaaaagccgggatttcacaccaggggataaagtatatcagaaatgaaggctgggacaggaatgttccccaaatgacactgcttaagagaactttgaggagaactgagggcaagatacaagccatggttctatacagataagtctacggaagctgcagaaataacattccagatccccaggaatccacccacccacccctccgactttggccgaacaccatggctggctgccgtgtgaagaatggactgtagggggtgccagagtggctgtgggaaacatcccctagaaatctagaattcaaagcacttactttgagtgatatatccacaagaaagagccttctgtgctaaaagcaaaaaagaaataaaaacatatcatgttacttttaat

SEQ ID NO: 5580 - protein, 67 aa, Homo sapiens
GNVPLAARHPSIVTSVCQTGKLLQDLNHHKRFTRGFYTLGLWQQTNYITALELRYWLGGFQQISKGT

SEQ ID NO: 5581 - DNA, 571 bp, Homo sapiens
ggccggggccctgcaccggaagggagggcggaagccacgggacgtggagcagatggtgaggatagtggggaggtagcagcagaggatgacccgaggcaaaagtgcaagtgaagaaaagtcgccttgccgggcagaggtacgggaccaaggcgcctcctctgggctgaggagttagagggaagaaaatggcgccctgtcatgagggcgcgaggtccgagttgaggggagaagactgagggacacagaagtggccgaagtgagggcgctgaggtcagcctgagctgagagggccggcagatcacgccgcagccgaagtgaacgaactcgagtgagctcttctctttttcaggaaattactccaggatttgaatcatcacaagagattcaccagaggattttatacacttgggctgtggcagcagactaattacatcacagcactaggctaaagaagaaaaatcacatgatcatatcaatagatgcagaaaaagcatctgacaaaaaccagctctcattcatgatcagaactctcagcaaactagtaatagaggggaacttactcaacttgata

SEQ ID NO: 5582 - protein, 35 aa, Homo sapiens
MIISIDAEKASDKNQLSFMIRTLSKLVIEGNLLNL

SEQ ID NO: 5583 - DNA, 417 bp, Homo sapiens
caggatttgaatcatcacaagagattcaccagaggattttatacacttgggctgtggcagcagactaattacatcacagcactagagtcttcaccagctccggaaaagaatatttttaatcactgcagtcgcttaggataacagggttatctttggaaattcctgccctctcgtgtccagtatagagaactacttttgtgttctctaaggctgtgaatgttagcggacaaccaggagcattttagggcctcagcagaaaggagactgaaccagttccatgaaaacattctcctatctaataaatcaaaaaatcatgactggcttccatcagttcaggagtctccacacaaatgttttgacagtggaacaagagacagtcaaggacagttttatcagtgacatctaccttccaatagc

SEQ ID NO: 5584 - protein, 60 aa, Homo sapiens
MLADNQEHFRASAERRLNQFHENILLSNKSKNHDWLPSVQESPHKCFDSGTRDSQGQFYQ

SEQ ID NO: 5585 - DNA, 3429 bp, Homo sapiens
tggctgatcagagcgcgtagggcttcgccggggccgggagctgggcgcggtcctgctcagcccagctcaccgcgcgccggccctcggcgccctggttctgcggatcaggagttgaaaccagcaccttccctttctctgagtcctgcctccttctgcagaagggagctcaaaagaactttgttgttttgccttttactctggggtgaaagcggcaggaggtatgtgagatggtgaaatgatttgcttctgccatgctggggtcacgggtggatcgccctaaactctcggtggccccctcagtagttttggaagaggaccaagtccttgtctctccagcagtggacctggaagaaggatgccggctcagggacttcactgagaaaataatgaatgtcaaaggaaaagtaattctgtcaatgctggttgtctcaactgtgatcattgtgttttgggaatttatcaacagcacagaaggctctttcttgtggatatatcactcaaaaaacccagaagttgatgacagcagtgctcagaagggctggtggtttctgagctggtttaacaatgggatccacaattatcaacaaggggaagaagacatagacaaagaaaaaggaagagaggagaccaaaggaaggaaaatgacacaacagagcttcggctatgggactggtttaatccaaagaaacacccagaggttgtgacagtgaccagatggaaggcgccggttgtgtgggaaggcactttcaacaaagccatcctaggaaattattatgccaaacagaaaattaccgtgcggttgatggtttttgctattggaagatataatgatcattacttggaggagttcataacatctgctaataggtacttcatggttggccacaaagtcatattttacatcatggtggatgatgtctccaagctgccgtttatagagctgggtcctctgcattccttcaaaatgtttgaggtcaagccagagaagaggtggcaagacatcagcatgatgcgtatgaagatcactggggagcacatcttggcccacatccaacacgaggtcgacttcctcttctgcatggatgtggaccaggtcttccaagaccattttggggtggagaccctaggccagtcagtggctcagctacaggctggcggtacaaggcagatccctatgactttacctaggagaggtggaaagagtcagcaggatacattccatttggccaggggatttttattaccatgcagccatttctggaggaacacccattcaggttctcaacatcacccaggagtgctttaagggaatcctcctggacaagaaaaatgacatagaagccaagtggcatgatgaaagccacctaaacaagtatttccttctcaataaaccctctaaaatcttatccctaaaatactgctgggattatcatataggcctgccttcagatattaaaactgtcaagtgatcgtggcagacaaaagagtataatttggttagaaataatgtctgacttcaaattgtgccagtagatttctgaatttaagagagaaatattctggctacttcctcagaaaagtaacacttaattttaacttcaaaaaatactaatgaaacaccaacagggcaaaaacataccattcctccttgtaacttggggctttgtaatgtggaagaatgaatctagggcaatcagatataaattcccagtgatttcttatctattctgggtttgggggaaatactatcaactgaaccaaaaataacttgtcataggcagagataaagccagaaacactctacacatgccagatgacatctggagaaaagggtgctaagggaagcgtttggcagcaagatatgattgtaaggggttgtcccttgagttcaatgtctgcctatttctgatgggtctaaagcaacatggagttactgtgcagcagaactctcagtaaagacaccatttgccttggcaatcctcaaaaagcttcaatagcagattgcttcagaccatctgtagtccgtccttttctcatctggatgttgtttggcttctgtgcgaaagattggtggagtgtcccagtagatatcatggtggtgtgtgatcagagtcccaaggaacctgaatgagccaaggtgcccagcatgaagtcaaaacaaagccttgacatgagtttgccatgaaatagcgaagagagagtggaagagaggagccaatcactgtggggcagtgccaccctgagggcacttagggtatggggttggtgcttaaatacatcacagatccaggtactgaatgggaggaagtgtgggtgatttccaatctcattgaccctatgttcagggacttgaacggaagatgtttcttgtgttgcctaagtggtattcagtctaccagactctgcaacttgcatcttcaaatccttggtaaagagatgtggatggtgtcagagaaggcaaaggcctgcagtggattgaagaggcttgcaagcagttctgtttctaggatgtgggcttcatcagaagacactcggtcaccacttagctagtctaaacctcagggttcctcagcccatcataccccaacttggaggactgacatcaaggagtagactggagaaacagccctcccatcaagtaacctcttgttctctcctgctccatctgcactatagaagtgtaataattagacatacttggcaaaatggctaattgatttggtaacagaagcatgagccataacaatggaagatctagttatcatgactgaacagcttaacattcaattcccttctctaagagaagctgtgaaatcctacatattatttaaagttaaccaaatcaatgtaaagggagttaggagacagtgtgtacctatgcacgtatatttatgttttgcttgtgttccagtctcggtcatttgtttccattttcaagcaatttatttgaagagccattgcactagcctgatgtatactgcaatgagcttctttgataaaatgaaacttagatttttctcgaccatttcaccgtgcctcctacttcattttttgccagaaaatctcacatccaacaaaacaaaacaaaaaccctgaattagtgggctttgaaaaggaaaaagcagggctttgaaaaagtagatcacacatcagttaagactcctgcttctctattagtcaggttgtcttggattcagtctggagtaggcagagcttaagggtttttaagtcctgacccaaagaaatgatctagcctgaaagtttagagcaaaggactaatgtttacttttaaaggaatttcttgatttttttaaaaaacttcattaaagtttaaatccccaatggacaaattcataatcttgttaatcgttattactaaactttttaaaaaatgtcccaatttacaattaaataaattactttctcagt

SEQ ID NO: 5586 - protein, 167 aa, Homo sapiens
MVFAIGRYNDHYLEEFITSANRYFMVGHKVIFYIMVDDVSKLPFIELGPLHSFKMFEVKPEKRWQDISMMRMKITGEHILAHIQHEVDFLFCMDVDQVFQDHFGVETLGQSVAQLQAGGTRQIPMTLPRRGGKSQQDTFHLARGFLLPCSHFWRNTHSGSQHHPGVL

SEQ ID NO: 5587 - DNA, 3530 bp, Homo sapiens
ggccggcccacgggcgggaggacgcgcctccgctcgggcggaggcggcgcggtggctgatcagagcgcgtagggcttcgccggggccgggagctgggcgcggtcctgctcagcccagctcaccgcgcgccggccctcggcgccctggttctgcggatcaggagttgaaaccagcaccttccctttctctgagtcctgcctccttctgcagaagggagctcaaaagaactttgttgttttgccttttactctggggtgaaagcggcaggaggtatgtgagatggtgaaatgatttgcttctgccatgctggggtcacgggtggatcgccctaaactctcggtggccccctcagtagttttggaagaggaccaagtccttgtctctccagcagtggacctggaagaaggatgccggctcagggacttcactgagaaaataatgaatgtcaaaggaaaagtaattctgtcaatgctggttgtctcaactgtgatcattgtgttttgggaatttatcaacagcacagaaggctctttcttgtggatatatcactcaaaaaacccagaagttgatgacagcagtgctcagaagggctggtggtttctgagctggtttaacaatgggatccacaattatcaacaaggggaagaagacatagacaaagaaaaaggaagagaggagaccaaaggaaggaaaatgacacaacagagcttcggctatgggactggtttaatccaaacttgaaggaatccgaataactaaactggactctggttttctgactcagtccttctagaagacctggactgagagatcatgcggttaaggagtgtgtaacaggcggaccacctgttgggactgcgagattctcaaggggaaggactgggtctcatttctcccatctcagcgcttagcaggatgacctgatataatgatcattacttggaggagttcataacatctgctaataggtacttcatggttggccacaaagtcatattttacatcatggtggatgatgtctccaagctgccgtttatagagctgggtcctctgcattccttcaaaatgtttgaggtcaagccagagaagaggtggcaagacatcagcatgatgcgtatgaagatcactggggagcacatcttggcccacatccaacacgaggtcgacttcctcttctgcatggatgtggaccaggtcttccaagaccattttggggtggagaccctaggccagtcagtggctcagctacaggctggcggtacaaggcagatccctatgactttacctaggagaggtggaaagagtcagcaggatacattccatttggccaggggatttttattaccatgcagccatttctggaggaacacccattcaggttctcaacatcacccaggagtgctttaagggaatcctcctggacaagaaaaatgacatagaagccaagtggcatgatgaaagccacctaaacaagtatttccttctcaataaaccctctaaaatcttatccctaaaatactgctgggattatcatataggcctgccttcagatattaaaactgtcaagtgatcgtggcagacaaaagagtataatttggttagaaataatgtctgacttcaaattgtgccagtagatttctgaatttaagagagaaatattctggctacttcctcagaaaagtaacacttaattttaacttcaaaaaatactaatgaaacaccaacagggcaaaaacataccattcctccttgtaacttggggctttgtaatgtggaagaatgaatctagggcaatcagatataaattcccagtgatttcttatctattctgggtttgggggaaatactatcaactgaaccaaaaataacttgtcataggcagagataaagccagaaacactctacacatgccagatgacatctggagaaaagggtgctaagggaagcgtttggcagcaagatatgattgtaaggggttgtcccttgagttcaatgtctgcctatttctgatgggtctaaagcaacatggagttactgtgcagcagaactctcagtaaagacaccatttgccttggcaatcctcaaaaagcttcaatagcagattgcttcagaccatctgtagtccgtccttttctcatctggatgttgtttggcttctgtgcgaaagattggtggagtgtcccagtagatatcatggtggtgtgtgatcagagtcccaaggaacctgaatgagccaaggtgcccagcatgaagtcaaaacaaagccttgacatgagtttgccatgaaatagcgaagagagagtggaagagaggagccaatcactgtggggcagtgccaccctgagggcacttagggtatggggttggtgcttaaatacatcacagatccaggtactgaatgggaggaagtgtgggtgatttccaatctcattgaccctatgttcagggacttgaacggaagatgtttcttgtgttgcctaagtggtattcagtctaccagactctgcaacttgcatcttcaaatccttggtaaagagatgtggatggtgtcagagaaggcaaaggcctgcagtggattgaagaggcttgcaagcagttctgtttctaggatgtgggcttcatcagaagacactcggtcaccacttagctagtctaaacctcagggttcctcagcccatcataccccaacttggaggactgacatcaaggagtagactggagaaacagccctcccatcaagtaacctcttgttctctcctgctccatctgcactatagaagtgtaataattagacatacttggcaaaatggctaattgatttggtaacagaagcatgagccataacaatggaagatctagttatcatgactgaacagcttaacattcaattcccttctctaagagaagctgtgaaatcctacatattatttaaagttaaccaaatcaatgtaaagggagttaggagacagtgtgtacctatgcacgtatatttatgttttgcttgtgttccagtctcggtcatttgtttccattttcaagcaatttatttgaagagccattgcactagcctgatgtatactgcaatgagcttctttgataaaatgaaacttagatttttctcgaccatttcaccgtgcctcctacttcattttttgccagaaaatctcacatccaacaaaacaaaacaaaaaccctgaattagtgggctttgaaaaggaaaaagcagggctttgaaaaagtagatcacacatcagttaagactcctgcttctctattagtcaggttgtcttggattcagtctggagtaggcagagcttaagggtttttaagtcctgacccaaagaaatgatctagcctgaaagtttagagcaaaggactaatgtttacttttaaaggaatttcttgatttttttaaaaaacttcattaaagtttaaatccccaatggacaaattcataatcttgttaatcgttattactaaactttttaaaaaatgtcccaatttacaattaaataaattactttctcagt

SEQ ID NO: 5588 - protein, 145 aa, Homo sapiens
MLGSRVDRPKLSVAPSVVLEEDQVLVSPAVDLEEGCRLRDFTEKIMNVKGKVILSMLVVSTVIIVFWEFINSTEGSFLWIYHSKNPEVDDSSAQKGWWFLSWFNNGIHNYQQGEEDIDKEKGREETKGRKMTQQSFGYGTGLIQT

SEQ ID NO: 5589 - DNA, 1485 bp, Homo sapiens
tggctgatcagagcgcgtagggcttcgccggggccgggagctgggcgcggtcctgctcagcccagctcaccgcgcgccggccctcggcgccctggttctgcggatcaggagttgaaaccagcaccttccctttctctgagtcctgcctccttctgcagaagggagctcaaaagaactttgttgttttgccttttactctggggtgaaagcggcaggaggtatgtgagatggtgaaatgatttgcttctgccatgctggggtcacgggtggatcgccctaaactctcggtggccccctcagtagttttggaagaggaccaagtccttgtctctccagcagtggacctggaagaaggatgccggctcagggacttcactgagaaaataatgaatgtcaaaggaaaagtaattctgtcaatgctggttgtctcaactgtgatcattgtgttttgggaatttatcaacagcacagaaggctctttcttgtggatatatcactcaaaaaacccagaagttgatgacagcagtgctcagaagggctggtggtttctgagctggtttaacaatgggatccacaattatcaacaaggggaagaagacatagacaaagaaaaaggaagagaggagaccaaaggaaggaaaatgacacaacagagcttcggctatgggactggtttaatccaaacttgaaggaatccgaataactaaactggactctggttttctgactcagtccttctagaagacctggactgagagatcatgcggttaaggagtgtgtaacaggcggaccacctgttgggactgcgagattctcaaggggaaggactgggtctcatttctcccatctcagcgcttagcaggatgacctggtatagagcagggaactgggaaatgtgggtcaggggatcagacactccagttgggtcttttatataaattaaatggcaaaaggctccatacccttctccttctttcctaccctccactttatctgcaaaatgggaatgatgataacacccacttcatagaatggtcatgaagatcaaatgagagaataaaagtcaagcacttagcctctggtgcacaataagtattaaataagtatacctattcctccttttccttttttaaaaataatattaccaaatgtccagcttatacacatttacaagacttagctagtgggctatgttagagctactaaaagatctttgacaagctaaaactaagatgcaatgaatgaggtgtaacgaacaagagagttttaagttcagaaatggttacagaagtataagacagctgtgtgggtgttttttggtttttggtttctggtttacaatctcgtcattcaacaaagatgggagttttatagaactaaaagcaccatgtaagctactaaaaacaacaacaaaaaaggctcatcatttctcagtctgaattgacaaaaatgccaatgcaaataaaaatgattactttttatttt

SEQ ID NO: 5590 - protein, 145 aa, Homo sapiens; identical to SEQ ID NO: 5588

SEQ ID NO: 5591 - DNA, 1398 bp, Homo sapiens
cgcactcgctcgccggccttccagctgtctgtgtccggggcggggaccggcttggcgcagcccgctgtcagcgctcgccggctcctcgcgcccctacccgctgcgctctgcccagagcagaagcccggccggccggcccacgggcgggaggacgcgcctccgctcgggcggaggcggcgcggtggctgatcagagcgcgtagggcttcgccggggccgggagctgggcgcggtcctgctcagcccagctcaccgcgcgccggccctcggcgccctggttctgcggatcaggagaaaataatgaatgtcaaaggaaaagtaattctgtcaatgctggttgtctcaactgtgatcattgtgttttgggaatttatcaacagcacagaaggctctttcttgtggatatatcactcaaaaaacccagaagttgatgacagcagtgctcagaagggctggtggtttctgagctggtttaacaatgggatccacaattatcaacaaggggaagaagacatagacaaagaaaaaggaagagaggagaccaaaggaaggaaaatgacacaacagagcttcggctatgggactggtttaatccaaacttgaaggaatccgaataactaaactggactctggttttctgactcagtccttctagaagacctggactgagagatcatgcggttaaggagtgtgtaacaggcggaccacctgttgggactgcgagattctcaaggggaaggactgggtctcatttctcccatctcagcgcttagcaggatgacctggtatagagcagggaactgggaaatgtgggtcaggggatcagacactccagttgggtcttttatataaattaaatggcaaaaggctccatacccttctccttctttcctaccctccactttatctgcaaaatgggaatgatgataacacccacttcatagaatggtcatgaagatcaaatgagagaataaaagtcaagcacttagcctctggtgcacaataagtattaaataagtatacctattcctccttttccttttttaaaaataatattaccaaatgtccagcttatacacatttacaagacttagctagtgggctatgttagagctactaaaagatctttgacaagctaaaactaagatgcaatgaatgaggtgtaacgaacaagagagttttaagttcagaaatggttacagaagtataagacagctgtgtgggtgttttttggtttttggtttctggtttacaatctcgtcattcaacaaagatgggagttttatagaactaaaagcaccatgtaagctactaaaaacaacaacaaaaaaggctcatcatttctcagtctgaattgacaaaaatgccaatgcaaataaaaatgattactttttatttt

SEQ ID NO: 5592 - protein, 100 aa, Homo sapiens
MNVKGKVILSMLVVSTVIIVFWEFINSTEGSFLWIYHSKNPEVDDSSAQKGWWFLSWFNNGIHNYQQGEEDIDKEKGREETKGRKMTQQSFGYGTGLIQT

SEQ ID NO: 5593 - DNA, 787 bp, Homo sapiens
ttctcctcccaccatgattgtgagaccttccccagccacgtggaacttctccagcctcccgagtagctgggattacaggtgcacgccaccaggcctggggaatttttctatattctgtagagacggggtttcgccacgttgcccaagctggtctggaaatcctgagctcaagcaatccgcccacctcggcctcccaaagtgctgggattacaggcgtgagccaccgcgcccggccgaattatttaagaagcgaatttcttagtctatgaaaatgacgttcaacggcaaatggcaaaatgaagttctgacttttccacctgtaaagtagattgatatgagcgggagtgagaagaccttgtcgctatcagtataagacaagagaactgagggcagccagttgtggccacagcaactctctgagtgaattgctgccacactgggcacagaagcgcacactctgaaatcgaatgtttggattcctttctacataattctactaaagagttattccacagcctaggggctgccttagagccccgtttgagacactctgggctcacagatcatgaagtcagtgcgcaaacgcgggcagaccctgaaccaggtgcccaacgcccagccctcacttccagagctcaggactctcgcaagagcgactccagccccggcctgccgctgtctacattcgcgctcttccttcctcgggaaacaaacggtggatcagatctccaaggctctgagtttcccagagtttggccgtgcgccagcgcagcgcagcccctcccag

SEQ ID NO: 5594 - protein, 82 aa, Homo sapiens [sequence omitted]

SEQ ID NO: 5595 - DNA, 1953 bp, Homo sapiens
gatccccgcagccagcatcacgggcagccaggccaaccgtcccggcgtcttcctattttagacatctcgctgcctcagtcccttctaatgtttccagccaggctgcggggggaggaaaaagaggttactgctactttaaatgtactgtatgaaggcgagggctggaaaggggcctgcttgcaggaatacccagtcatctagttggaaaagccgccagatggaatacaaaaggaggaacccagacgctcatggagacagcctcggttcataaatcaggtggggccaggggctgggggcccacacgccatggagcccgactcccttctggaccaagacgactcctacgagtcgcctcaagaaaggccgggctctcggcgcagcctgcctggcagcctttccgagaagagccccagcatggagccctcggccgccacgccgttccgggtcacgggcttcctcagccgccgcctcaagggctccatcaagcgcaccaagagccagcccaagctggaccgcaaccacagcttccgccacatcctgccggggttccggagcgccgccgccgccgccgcggacaatgagaggtcccatctgatgccgaggctgaaggagtctcgctcccacgagtccctgctcagccccagcagtgcggtggaggcgctggacctcagcatggaggaagaggtggtcatcaagcccgtgcacagcagcatccttggccaggactactgcttcgaggtgacgacgtcatcaggaagcaagtgcttttcctgccggtctgcagctgagcgggataagtggatggagaacctccggcgagcggtgcatcccaacaaggacaacagccggcgtgtggagcacatcctgaagctgtgggtgatcgaggccaaggacctgccactgcccttgcagggtgggtgagctctcaggccgagagccttatttacctagtgcaaaaactgtaaaagtgtacagactcttcacagatttttatcttaattgcaagtctgccgattttgtaaatgttcttggtgtttgactgtaatgtaactatctcacctaatggttgtacatatcctttggtcctggtgctgccgagggctggccgggactgctgctctcccaagggttttattttatttctgaatctagagaacagtattgggcaggaggaaaaggcttggtgtctgcggggggtgtcttccctgcctgtggcatttgtgtgttggctttgcagctgctgtctgagtagtggccactggggtgccttcactgggccagtcaacggggggctcctgcccaggccacagagaacctgagttcccgggagctgggccctgcctgcagccagggctggggttgccagaggccctggagggaaggacagtccctgctggggaagaacagccccggggccccctggtcaccgagactcagcctctgctggagaaagccacgccctccctgctagcacagaggcctgactgacttttttgcttaacttccatgttctgggtgatggaaactgccaaacctcctgtcagtgaggactctttccgactgcccagaaagtgggggtggaggaccgaggctacagctccacacgccccggtcccccagagcatctgccccaggtacacctccccctgcgccccgcacgactgcgggagccagactgtccagggaaacagcctctctcttttctacacactcagccacaaagccccccagctcccacaccgcgtcccagctcccctcttttgtaagtatgtgaaaaggaaaaaatgcaaacgttggagtttgggctggagctcctccctccagctgcgacttttaactatgtaataatgtacagaggaagctgttggtgttctaagactctgtgtggctgtgcaatttctgtacatttgcaattagaaatattaaagatttatttagctattttaagcccga

SEQ ID NO: 5596 - protein, 204 aa, Homo sapiens
MEPDSLLDQDDSYESPQERPGSRRSLPGSLSEKSPSMEPSAATPFRVTGFLSRRLKGSIKRTKSQPKLDRNHSFRHILPGFRSAAAAAADNERSHLMPRLKESRSHESLLSPSSAVEALDLSMEEEVVIKPVHSSILGQDYCFEVTTSSGSKCFSCRSAAERDKWMENLRRAVHPNKDNSRRVEHILKLWVIEAKDLPLPLQGG

SEQ ID NO: 5597 - DNA, 5459 bp, Homo sapiens
cccagacgctcatggagacagcctcggttcataaatcaggtggggccaggggctgggggcccacacgccatggagcccgactcccttctggaccaagacgactcctacgagtcgcctcaagaaaggccgggctctcggcgcagcctgcctggcagcctttccgagaagagccccagcatggagccctcggccgccacgccgttccgggtcacgggcttcctcagccgccgcctcaagggctccatcaagcgcaccaagagccagcccaagctggaccgcaaccacagcttccgccacatcctgccggggttccggagcgccgccgccgccgccgcggacaatgagaggtcccatctgatgccgaggctgaaggagtctcgctcccacgagtccctgctcagccccagcagtgcggtggaggcgctggacctcagcatggaggaagaggtggtcatcaagcccgtgcacagcagcatccttggccaggactactgcttcgaggtgacgacgtcatcaggaagcaagtgcttttcctgccggtctgcagctgagcgggataagtggatggagaacctccggcgagcggtgcatcccaacaaggacaacagccggcgtgtggagcacatcctgaagctgtgggtgatcgaggccaaggacctgccagccaagaagaagtacctgtgcgagctgtgcctggacgatgtgctctatgcccgcaccacgggcaagctcaagacggacaatgttttctggggcgagcacttcgagttccacaacttgccgcctctgcgcacggtcactgtccacctgtaccgggagaccgacaagaagaagaagaaggagcgcaacagttacctgggcctggtgagcctacctgctgcctcggtggccgggcggcagttcgtggagaagtggtacccggtggtgacgcccaaccccaagggcggcaagggccctggacccatgatccgcatcaaggcgcgctaccaaaccatcaccatcctgcccatggagatgtacaaagagttcgctgagcacatcaccaaccactacctggggctgtgtgcagccctcgagcccatcctcagtgccaagaccaaggaggagatggcatctgccctggtgcacatcctgcagagcacgggcaaggtgaaggacttcctgacagacctgatgatgtcagaggtggaccgctgcggggacaacgagcacctcatcttccgggagaacacactggccaccaaggccattgaggagtacctcaagctagtgggccagaagtacctgcaggacgccctaggtgagttcatcaaagcgctgtatgagtcagatgagaactgcgaagtggatcccagcaagtgctcggccgctgacctcccagagcaccagggcaacctcaagatgtgctgcgagctggccttctgcaagatcatcaactcctactgtgtcttcccacgggagttgaaagaggtgtttgcctcgtggaggcaggagtgcagcagtcgcggccgcccggacatcagtgagcggctcatcagcgcctccctcttcctgcgcttcctctgcccagccatcatgtcgccctcactcttcaacctgctgcaggagtaccctgatgaccgcactgcccgcaccctcaccctcatcgccaaggtcacccagaacctggccaactttgccaaatttggcagcaaggaggaatacatgtccttcatgaaccagttcctagagcatgagtggaccaacatgcagcgcttcctgctggagatctccaaccccgagaccctctccaatacagccggcttcgagggctacatcgacctgggccgcgagctctccagcctgcactcactgctctgggaggccgtcagccagctggagcagagcatagtatccaaactgggacccctgcctcggatcctgagggacgtccacacagcactgagcaccccaggtagcgggcagctcccagggaccaatgacctggcctccacaccgggctctggcagcagcagcatctcagctgggctgcagaagatggtgattgagaacgatctttccggtctgatagatttcacccggttaccgtctccaacccccgaaaacaaggacttgttttttgtcacaaggtcctccggggtccagccctcacctgcccgcagctcgagttactcggaagccaacgagcctgatcttcagatggccaacggtggcaagagcctctccatggtggacctccaggacgcccgcacgctggatggggaggcaggctccccggcgggccccgacgtcctccccacagatgggcaggccgctgcagctcagctggtggccgggtggccggcccgggcaaccccagtgaacctggcagggctggccacggtgcggcgggcaggccagacaccaaccacaccaggcacctccgagggcgcgccaggccggccccagctgttggcaccgctctccttccagaaccctgtgtaccagatggcggctggcctgccgctgtcaccccgtggccttggcgactcaggctctgagggccacagctccctgagctcacacagcaacagcgaggagttggcggctgctgccaagctgggaagtttcagcactgccgcggaggagctggctcggcggcccggtgagctggcacggcgacagatgtcactgactgaaaaaggcgggcagcccacggtgccacggcagaacagtgctggcccccagaggaggatcgaccagcctccgcccccacccccgccgccacctcctgccccccgcggccggacgccccccaacctgctgagcaccctgcagtacccaagaccctcaagcggaaccctggcgtcggcctcacctgattgggtgggccccagtacccgcctgaggcagcagtcctcttcctccaagggggacagcccagaactgaagccacgggcagtgcacaagcagggcccttcacctgtgagccccaatgccctggaccgcacagccgcttggctcttgaccatgaacgcgcagttgttagaagacgagggcctgggcccagaccccccccacagggataggctaaggagtaaggacgagctcagccaagcagaaaaggacctggcggtgctgcaggacaagctgcgaatctccaccaagaagctggaggagtatgagaccctgttcaagtgccaggaggagacgacgcagaagctggtgctggagtaccaggcacggctggaggagggcgaggagcggctgcggcggcagcaggaggacaaggacatccagatgaagggcatcatcagcaggttgatgtccgtggaggaagaactgaagaaggaccacgcagagatgcaagcggctgtggactccaaacagaagatcattgatgcccaggagaagcgcattgcctcgttggatgccgccaatgcccgcctcatgagtgccctgacccagctgaaagagagtatgcattagaaacaaaagcccgcttgctcgcttgctggaacacaggggccttttaagttgagcgtgcgcactgcatgggaaatagcggccctggaggatgttagacttgctccctctccaagacagcagcagcctgcacctgccccgtgtgtgtggccggcctcctcctcacccttcccggcccccggccaaggacccaggcgctgcatacaggggaggggcgcaccccacagctggggccggttttcctcagctctaggctgttctgtagcttatctgcccctcccccactttcaagacagatgagcaggagcttgggtctctctcggcccctgtctgttcccagcccctgcagattctgagcaaaggccctgggtaagaagggtgggagtggggcctttgccagcagagccagggcagggcgagctgcaggaatcacccctctgcccctgcagctggaatgtgccacagaggccccacctgaagggtggatgtgctggaggggtggcccagagccatactgcgtccaccctgagctcggggacaggtgacagtggctgctctgggaaggggcttttagatgtaacctacaattcagttaggctagagacagatgctggtggaggaagggctgggccaccagggatcacagaccacaggaagatgggaggtggaagcagaggccctgcccccaccccttcctgtctcactcttctgtcttgtccccacccatgcgccttcgtgcctgagaccagggtggccacacaggcagggcctggctccagtctcatcctcccattgcccagtgagccctgctcttctctccccagccccctcccaccgctgcctcgtagagtgacctcggacagagcccccctagcaatacagggaggctcccggggcctggacaggcgggctcggaggctacccgctgtggccggtgccagctgcccttgcagggtgggtgagctctcaggccgagagccttatttacctagtgcaaaaactgtaaaagtgtacagactcttcacagatttttatcttaattgcaagtctgccgattttgtaaatgttcttggtgtttgactgtaatgtaactatctcacctaatggttgtacatatcctttggtcctggtgctgccgagggctggccgggactgctgctctcccaagggttttattttatttctgaatctagagaacagtattgggcaggaggaaaaggcttggtgtctgcggggggtgtcttccctgcctgtggcatttgtgtgttggctttgcagctgctgtctgagtagtggccactggggtgccttcactgggccagtcaacggggggctcctgcccaggccacagagaacctgagttcccgggagctgggccctgcctgcagccagggctggggttgccagaggccctggagggaaggacagtccctgctggggaagaacagccccggggccccctggtcaccgagactcagcctctgctggagaaagccacgccctccctgctagcacagaggcctgactgacttttttgcttaacttccatgttctgggtgatggaaactgccaaacctcctgtcagtgaggactctttccgactgcccagaaagtgggggtggaggaccgaggctacagctccacacgccccggtcccccagagcatctgccccaggtacacctccccctgcgccccgcacgactgcgggagccagactgtccagggaaacagcctctctcttttctacacactcagccacaaagccccccagctcccacaccgcgtcccagctcccctcttttgtaagtatgtgaaaaggaaaaaatgcaaacgttggagtttgggctggagctcctccctccagctgcgacttttaactatgtaataatgtacagaggaagctgttggtgttctaagactctgtgtggctgtgcaatttctgtacatttgcaattagaaatattaaagatttatttagctattttaagcccga

SEQ ID NO: 5598 - protein, 1132 aa, Homo sapiens; identical to SEQ ID NO: 736

SEQ ID NO: 5599 - DNA, 1027 bp, Homo sapiens
cctgctgcagcggtgggccctgtgaagttttttgaatgcctatgagtggccccttctggctgtgcacgaaggatgagttggggggcaggtagagatggacagccccaggaagaggcaaggcagctgtgcaggtgtccaaggtcccgtggcggaggagccagcctgaggcagtggctgtccaggaccacagaagaaggaaggatctatcctgcttggtcctcacaagagaggagccctgcgcggtggctgctgctgtccccatccctccgaggctctgagaatcaactggcctggctcacaggtcacacggaggcgcagcagatagaagcccaggcctgggggtgttaagtacagttcaggaggggctctccaggagcctatgggaagtgaaatgtccgcgtcctatgcacataggtgctccctccctttccctgtccctctctctggggaaaccaactcttctctcttgagctttatcctggctcttccccgccctgctccaggcacaggggctccctcctcaccagccaacccccactgcagcctcagcccctgaccttgttatgaggccagctgctcaggcttgtgtgtggaaatgacctaagcccctcccgagctggcctctttgttctttattgtctgttcctcctgattgcgcctcttcccagagtctcagggcaaggggagggggcgtgtggctctaccactcatccagctgcccagctgggcaagttcagaagccccccgcatggctggccagcagaaccgaggcccccctgggcatgggaaagggccctggattgggggccaggagacccagtggggtggtgggagcagcccaaagtggagaaagctcacaggatcttgggagtcctgggtttgaatcacaagtgttcctcactcgctgtgtggcagggcccttctaagccttgattttctcctctgagctgtggggttgttccttcctctgtgaggagtcagtggagaacatttagcagtgagccaggcacacagtaaatgctcataa

SEQ ID NO: 5600 - protein, 91 aa, Homo sapiens
MSWGAGRDGQPQEEARQLCRCPRSRGGGASLRQWLSRTTEEGRIYPAWSSQERSPARWLLLSPSLRGSENQLAWLTGHTEAQQIEAQAWGC

SEQ ID NO: 5601 - DNA, 5717 bp, Homo sapiens
ccagcggccgaattaactggttctgtctgtacgactgggagagcagctctcgctaaaaatagcgccctgcccagctcgacctgcgagccgccgttggattctgagccgggacggctcaaggagccgggagccctgcacacccctcaccccgggcctggcccgggaccgaccacggaggcggaggccgcgggcaccgcgctggccccacaggtgccgcggagggtggcaggcccgctggccgaggcactgccgaggccgtccgagatgggagctggcggtgcctccttccgcgccctcgcctgggcctccctgcccctgctggggcctccagcctgcgcgctctgcgaggacacgctctgctgcggagagtcgcctcaagaaaggccgggctctcggcgcagcctgcctggcagcctttccgagaagagccccagcatggagccctcggccgccacgccgttccgggtcacgggcttcctcagccgccgcctcaagggctccatcaagcgcaccaagagccagcccaagctggaccgcaaccacagcttccgccacatcctgccggggttccggagcgccgccgccgccgccgcggacaatgagaggtcccatctgatgccgaggctgaaggagtctcgctcccacgagtccctgctcagccccagcagtgcggtggaggcgctggacctcagcatggaggaagaggtggtcatcaagcccgtgcacagcagcatccttggccaggactactgcttcgaggtgacgacgtcatcaggaagcaagtgcttttcctgccggtctgcagctgagcgggataagtggatggagaacctccggcgagcggtgcatcccaacaaggacaacagccggcgtgtggagcacatcctgaagctgtgggtgatcgaggccaaggacctgccagccaagaagaagtacctgtgcgagctgtgcctggacgatgtgctctatgcccgcaccacgggcaagctcaagacggacaatgttttctggggcgagcacttcgagttccacaacttgccgcctctgcgcacggtcactgtccacctgtaccgggagaccgacaagaagaagaagaaggagcgcaacagttacctgggcctggtgagcctacctgctgcctcggtggccgggcggcagttcgtggagaagtggtacccggtggtgacgcccaaccccaagggcggcaagggccctggacccatgatccgcatcaaggcgcgctaccaaaccatcaccatcctgcccatggagatgtacaaagagttcgctgagcacatcaccaaccactacctggggctgtgtgcagccctcgagcccatcctcagtgccaagaccaaggaggagatggcatctgccctggtgcacatcctgcagagcacgggcaaggtgaaggacttcctgacagacctgatgatgtcagaggtggaccgctgcggggacaacgagcacctcatcttccgggagaacacactggccaccaaggccattgaggagtacctcaagctagtgggccagaagtacctgcaggacgccctaggtgagttcatcaaagcgctgtatgagtcagatgagaactgcgaagtggatcccagcaagtgctcggccgctgacctcccagagcaccagggcaacctcaagatgtgctgcgagctggccttctgcaagatcatcaactcctactgtgtcttcccacgggagttgaaagaggtgtttgcctcgtggaggcaggagtgcagcagtcgcggccgcccggacatcagtgagcggctcatcagcgcctccctcttcctgcgcttcctctgcccagccatcatgtcgccctcactcttcaacctgctgcaggagtaccctgatgaccgcactgcccgcaccctcaccctcatcgccaaggtcacccagaacctggccaactttgccaaatttggcagcaaggaggaatacatgtccttcatgaaccagttcctagagcatgagtggaccaacatgcagcgcttcctgctggagatctccaaccccgagaccctctccaatacagccggcttcgagggctacatcgacctgggccgcgagctctccagcctgcactcactgctctgggaggccgtcagccagctggagcagagcatagtatccaaactgggacccctgcctcggatcctgagggacgtccacacagcactgagcaccccaggtagcgggcagctcccagggaccaatgacctggcctccacaccgggctctggcagcagcagcatctcagctgggctgcagaagatggtgattgagaacgatctttccggtctgatagatttcacccggttaccgtctccaacccccgaaaacaaggacttgttttttgtcacaaggtcctccggggtccagccctcacctgcccgcagctcgagttactcggaagccaacgagcctgatcttcagatggccaacggtggcaagagcctctccatggtggacctccaggacgcccgcacgctggatggggaggcaggctccccggcgggccccgacgtcctccccacagatgggcaggccgctgcagctcagctggtggccgggtggccggcccgggcaaccccagtgaacctggcagggctggccacggtgcggcgggcaggccagacaccaaccacaccaggcacctccgagggcgcgccaggccggccccagctgttggcaccgctctccttccagaaccctgtgtaccagatggcggctggcctgccgctgtcaccccgtggccttggcgactcaggctctgagggccacagctccctgagctcacacagcaacagcgaggagttggcggctgctgccaagctgggaagtttcagcactgccgcggaggagctggctcggcggcccggtgagctggcacggcgacagatgtcactgactgaaaaaggcgggcagcccacggtgccacggcagaacagtgctggcccccagaggaggatcgaccagcctccgcccccacccccgccgccacctcctgccccccgcggccggacgccccccaacctgctgagcaccctgcagtacccaagaccctcaagcggaaccctggcgtcggcctcacctgattgggtgggccccagtacccgcctgaggcagcagtcctcttcctccaagggggacagcccagaactgaagccacgggcagtgcacaagcagggcccttcacctgtgagccccaatgccctggaccgcacagccgcttggctcttgaccatgaacgcgcagttgttagaagacgagggcctgggcccagaccccccccacagggataggctaaggagtaaggacgagctcagccaagcagaaaaggacctggcggtgctgcaggacaagctgcgaatctccaccaagaagctggaggagtatgagaccctgttcaagtgccaggaggagacgacgcagaagctggtgctggagtaccaggcacggctggaggagggcgaggagcggctgcggcggcagcaggaggacaaggacatccagatgaagggcatcatcagcaggttgatgtccgtggaggaagaactgaagaaggaccacgcagagatgcaagcggctgtggactccaaacagaagatcattgatgcccaggagaagcgcattgcctcgttggatgccgccaatgcccgcctcatgagtgccctgacccagctgaaagagagtatgcattagaaacaaaagcccgcttgctcgcttgctggaacacaggggccttttaagttgagcgtgcgcactgcatgggaaatagcggccctggaggatgttagacttgctccctctccaagacagcagcagcctgcacctgccccgtgtgtgtggccggcctcctcctcacccttcccggcccccggccaaggacccaggcgctgcatacaggggaggggcgcaccccacagctggggccggttttcctcagctctaggctgttctgtagcttatctgcccctcccccactttcaagacagatgagcaggagcttgggtctctctcggcccctgtctgttcccagcccctgcagattctgagcaaaggccctgggtaagaagggtgggagtggggcctttgccagcagagccagggcagggcgagctgcaggaatcacccctctgcccctgcagctggaatgtgccacagaggccccacctgaagggtggatgtgctggaggggtggcccagagccatactgcgtccaccctgagctcggggacaggtgacagtggctgctctgggaaggggcttttagatgtaacctacaattcagttaggctagagacagatgctggtggaggaagggctgggccaccagggatcacagaccacaggaagatgggaggtggaagcagaggccctgcccccaccccttcctgtctcactcttctgtcttgtccccacccatgcgccttcgtgcctgagaccagggtggccacacaggcagggcctggctccagtctcatcctcccattgcccagtgagccctgctcttctctccccagccccctcccaccgctgcctcgtagagtgacctcggacagagcccccctagcaatacagggaggctcccggggcctggacaggcgggctcggaggctacccgctgtggccggtgccagctgcccttgcagggtgggtgagctctcaggccgagagccttatttacctagtgcaaaaactgtaaaagtgtacagactcttcacagatttttatcttaattgcaagtctgccgattttgtaaatgttcttggtgtttgactgtaatgtaactatctcacctaatggttgtacatatcctttggtcctggtgctgccgagggctggccgggactgctgctctcccaagggttttattttatttctgaatctagagaacagtattgggcaggaggaaaaggcttggtgtctgcggggggtgtcttccctgcctgtggcatttgtgtgttggctttgcagctgctgtctgagtagtggccactggggtgccttcactgggccagtcaacggggggctcctgcccaggccacagagaacctgagttcccgggagctgggccctgcctgcagccagggctggggttgccagaggccctggagggaaggacagtccctgctggggaagaacagccccggggccccctggtcaccgagactcagcctctgctggagaaagccacgccctccctgctagcacagaggcctgactgacttttttgcttaacttccatgttctgggtgatggaaactgccaaacctcctgtcagtgaggactctttccgactgcccagaaagtgggggtggaggaccgaggctacagctccacacgccccggtcccccagagcatctgccccaggtacacctccccctgcgccccgcacgactgcgggagccagactgtccagggaaacagcctctctcttttctacacactcagccacaaagccccccagctcccacaccgcgtcccagctcccctcttttgtaagtatgtgaaaaggaaaaaatgcaaacgttggagtttgggctggagctcctccctccagctgcgacttttaactatgtaataatgtacagaggaagctgttggtgttctaagactctgtgtggctgtgcaatttctgtacatttgcaattagaaatattaaagatttatttagctattttaagcccga

SEQ ID NO: 5602 - protein, 1153 aa, Homo sapiens
MGAGGASFRALAWASLPLLGPPACALCEDTLCCGESPQERPGSRRSLPGSLSEKSPSMEPSAATPFRVTGFLSRRLKGSIKRTKSQPKLDRNHSFRHILPGFRSAAAAAADNERSHLMPRLKESRSHESLLSPSSAVEALDLSMEEEVVIKPVHSSILGQDYCFEVTTSSGSKCFSCRSAAERDKWMENLRRAVHPNKDNSRRVEHILKLWVIEAKDLPAKKKYLCELCLDDVLYARTTGKLKTDNVFWGEHFEFHNLPPLRTVTVHLYRETDKKKKKERNSYLGLVSLPAASVAGRQFVEKWYPVVTPNPKGGKGPGPMIRIKARYQTITILPMEMYKEFAEHITNHYLGLCAALEPILSAKTKEEMASALVHILQSTGKVKDFLTDLMMSEVDRCGDNEHLIFRENTLATKAIEEYLKLVGQKYLQDALGEFIKALYESDENCEVDPSKCSAADLPEHQGNLKMCCELAFCKIINSYCVFPRELKEVFASWRQECSSRGRPDISERLISASLFLRFLCPAIMSPSLFNLLQEYPDDRTARTLTLIAKVTQNLANFAKFGSKEEYMSFMNQFLEHEWTNMQRFLLEISNPETLSNTAGFEGYIDLGRELSSLHSLLWEAVSQLEQSIVSKLGPLPRILRDVHTALSTPGSGQLPGTNDLASTPGSGSSSISAGLQKMVIENDLSGLIDFTRLPSPTPENKDLFFVTRSSGVQPSPARSSSYSEANEPDLQMANGGKSLSMVDLQDARTLDGEAGSPAGPDVLPTDGQAAAAQLVAGWPARATPVNLAGLATVRRAGQTPTTPGTSEGAPGRPQLLAPLSFQNPVYQMAAGLPLSPRGLGDSGSEGHSSLSSHSNSEELAAAAKLGSFSTAAEELARRPGELARRQMSLTEKGGQPTVPRQNSAGPQRRIDQPPPPPPPPPPAPRGRTPPNLLSTLQYPRPSSGTLASASPDWVGPSTRLRQQSSSSKGDSPELKPRAVHKQGPSPVSPNALDRTAAWLLTMNAQLLEDEGLGPDPPHRDRLRSKDELSQAEKDLAVLQDKLRISTKKLEEYETLFKCQEETTQKLVLEYQARLEEGEERLRRQQEDKDIQMKGIISRLMSVEEELKKDHAEMQAAVDSKQKIIDAQEKRIASLDAANARLMSALTQLKESMH

SEQ ID NO: 5603 - DNA, 384 bp, Homo sapiens
gaacgcgtgggcgcccgccgggctgtccggagcggccgatggggcccgtgtgagcgcgcccaggcccggcccggtgcccggcgggcggcagcatgtccgcgggcggcagcgccaggaagagcaccgggaggtcctcctactactaccggctgctgaggcggccccggctgcagcgacagaggagccgctcccgcagccggacccggcctgccagggagtcgcctcaagaaaggccgggctctcggcgcagcctgcctggcagcctttccgagaagagccccagcatggagccctcggccgccacgccgttccgggtcacggtaactatctctgcgtcaccaacaccgccactgccaccaccatcaccacctcgcccggggtgct

SEQ ID NO: 5604 - protein, 96 aa, Homo sapiens
MSAGGSARKSTGRSSYYYRLLRRPRLQRQRSRSRSRTRPARESPQERPGSRRSLPGSLSEKSPSMEPSAATPFRVTVTISASPTPPLPPPSPPRPG

SEQ ID NO: 5605 - DNA, 6383 bp, Homo sapiens
tgttcctcttctttcgtgttgtgtcagaagccatgatttccagtcttctcatctggaagatgaaggaaaagatagacccgaccccacagggttctgaggctcaaactgaaagcctggtggtggggcacctgtgacaggtcccatctgatgccgaggctgaaggagtctcgctcccacgagtccctgctcagccccagcagtgcggtggaggcgctggacctcagcatggaggaagaggtggtcatcaagcccgtgcacagcagcatccttggccaggactactgcttcgaggtgacgacgtcatcaggaagcaagtgcttttcctgccggtctgcagctgagcgggataagtggatggagaacctccggcgagcggtgcatcccaacaaggacaacagccggcgtgtggagcacatcctgaagctgtgggtgatcgaggccaaggacctgccagccaagaagaagtacctgtgcgagctgtgcctggacgatgtgctctatgcccgcaccacgggcaagctcaagacggacaatgttttctggggcgagcacttcgagttccacaacttgccgcctctgcgcacggtcactgtccacctgtaccgggagaccgacaagaagaagaagaaggagcgcaacagttacctgggcctggtgagcctacctgctgcctcggtggccgggcggcagttcgtggagaagtggtacccggtggtgacgcccaaccccaagggcggcaagggccctggacccatgatccgcatcaaggcgcgctaccaaaccatcaccatcctgcccatggagatgtacaaagagttcgctgagcacatcaccaaccactacctggggctgtgtgcagccctcgagcccatcctcagtgccaagaccaaggaggagatggcatctgccctggtgcacatcctgcagagcacgggcaaggtgaaggacttcctgacagacctgatgatgtcagaggtggaccgctgcggggacaacgagcacctcatcttccgggagaacacactggccaccaaggccattgaggagtacctcaagctagtgggccagaagtacctgcaggacgccctaggtgagttcatcaaagcgctgtatgagtcagatgagaactgcgaagtggatcccagcaagtgctcggccgctgacctcccagagcaccagggcaacctcaagatgtgctgcgagctggccttctgcaagatcatcaactcctactgtgtcttcccacgggagttgaaagaggtgtttgcctcgtggaggcaggagtgcagcagtcgcggccgcccggacatcagtgagcggctcatcagcgcctccctcttcctgcgcttcctctgcccagccatcatgtcgccctcactcttcaacctgctgcaggagtaccctgatgaccgcactgcccgcaccctcaccctcatcgccaaggtcacccagaacctggccaactttgccaaatttggcagcaaggaggaatacatgtccttcatgaaccagttcctagagcatgagtggaccaacatgcagcgcttcctgctggagatctccaaccccgagaccctctccaatacagccggcttcgagggctacatcgacctgggccgcgagctctccagcctgcactcactgctctgggaggccgtcagccagctggagcagagcatagtatccaaactgggacccctgcctcggatcctgagggacgtccacacagcactgagcaccccaggtagcgggcagctcccagggaccaatgacctggcctccacaccgggctctggcagcagcagcatctcagctgggctgcagaagatggtgattgagaacgatctttccggtctgatagatttcacccggttaccgtctccaacccccgaaaacaaggacttgttttttgtcacaaggtcctccggggtccagccctcacctgcccgcagctcgagttactcggaagccaacgagcctgatcttcagatggccaacggtggcaagagcctctccatggtggacctccaggacgcccgcacgctggatggggaggcaggctccccggcgggccccgacgtcctccccacagatgggcaggccgctgcagctcagctggtggccgggtggccggcccgggcaaccccagtgaacctggcagggctggccacggtgcggcgggcaggccagacaccaaccacaccaggcacctccgagggcgcgccaggccggccccagctgttggcaccgctctccttccagaaccctgtgtaccagatggcggctggcctgccgctgtcaccccgtggccttggcgactcaggctctgagggccacagctccctgagctcacacagcaacagcgaggagttggcggctgctgccaagctgggaagtttcagcactgccgcggaggagctggctcggcggcccggtgagctggcacggcgacagatgtcactgactgaaaaaggcgggcagcccacggtgccacggcagaacagtgctggcccccagaggaggatcgaccagcctccgcccccacccccgccgccacctcctgccccccgcggccggacgccccccaacctgctgagcaccctgcagtacccaagaccctcaagcggaaccctggcgtcggcctcacctgattgggtgggccccagtacccgcctgaggcagcagtcctcttcctccaagggggacagcccagaactgaagccacgggcagtgcacaagcagggcccttcacctgtgagccccaatgccctggaccgcacagccgcttggctcttgaccatgaacgcgcagttgttagaagacgagggcctgggcccagaccccccccacagggataggctaaggagtaaggacgagctcagccaagcagaaaaggacctggcggtgctgcaggacaagctgcgaatctccaccaagaagctggaggagtatgagaccctgttcaagtgccaggaggagacgacgcagaagctggtgctggagtaccaggcacggctggaggagggcgaggagcggctgcggcggcagcaggaggacaaggacatccagatgaagggcatcatcagcaggttgatgtccgtggaggaagaactgaagaaggaccacgcagagatgcaagcggctgtggactccaaacagaagatcattgatgcccaggagaagcgcattgcctcgttggatgccgccaatgcccgcctcatgagtgccctgacccagctgaaagagaggtacagcatgcaagcccgtaacggcatctcccccaccaaccccaccaaattgcagattactgagaacggcgagttcagaaacagcagcaattgttaacctgcctgaggagggaggaagctacccaaggagagggggactatggtggccaagggcagggtctcggcctggggaggcacccacggttgcagccccagcgcgggtgtcaggaggccgagcctcccctccctgccgctgtccaggaggcggccgcagagggagccaccagagactgaagcagcgtgaggcgaggtcaccagccgctccctgtggggtgcgggcagaagagactgcacgctggggagtggggacagcctgatggggcagggggcctgccaaaaatatgtctgttggttcctgaatgtggtgtgtccttgtcctcctggatctggccgagtgcatgtgtccccccacacctgtgccagggagggggcttcctggaggggggattcaagggctaggggcctacacctgtggcttcccctcgcctccttggggggcccgggactccctggcagccaggccctgtcatgtgggacctggcacttggcagatcagttggcaggcaggaagataggaggacacagagcaggaggtcagtgtcccctgcctgtctccatccgaagcacctgccactgcatgcagcctgttgggaccttcctggctgtgaggaactgaggattcctacccacccaccccctctgaacctgtccccagagcaccacctgctaccttcttccctgccttagttgtattgccagatagacccagtgagggccatggctttttcttgtgagctcttgtccctgtggggaggacccacagcttcccacacctcccacacaggcccaggctgatgctctagggctcccagaagccagagatctgggcggatctggccagatggctctgagcactgtatctgccttctcctggggcccagcacacccagggcacagtggtcctgtagggagtgccacctggtgctcaccctgaaagaaaaggtgatccttcctctgagtgatggtttaaaaaaagattctaacgcctgcaggccctgagaaggtggataactgtgattttttttcctttcacagtatgcattagaaacaaaagcccgcttgctcgcttgctggaacacaggggccttttaagttgagcgtgcgcactgcatgggaaatagcggccctggaggatgttagacttgctccctctccaagacagcagcagcctgcacctgccccgtgtgtgtggccggcctcctcctcacccttcccggcccccggccaaggacccaggcgctgcatacaggggaggggcgcaccccacagctggggccggttttcctcagctctaggctgttctgtagcttatctgcccctcccccactttcaagacagatgagcaggagcttgggtctctctcggcccctgtctgttcccagcccctgcagattctgagcaaaggccctgggtaagaagggtgggagtggggcctttgccagcagagccagggcagggcgagctgcaggaatcacccctctgcccctgcagctggaatgtgccacagaggccccacctgaagggtggatgtgctggaggggtggcccagagccatactgcgtccaccctgagctcggggacaggtgacagtggctgctctgggaaggggcttttagatgtaacctacaattcagttaggctagagacagatgctggtggaggaagggctgggccaccagggatcacagaccacaggaagatgggaggtggaagcagaggccctgcccccaccccttcctgtctcactcttctgtcttgtccccacccatgcgccttcgtgcctgagaccagggtggccacacaggcagggcctggctccagtctcatcctcccattgcccagtgagccctgctcttctctccccagccccctcccaccgctgcctcgtagagtgacctcggacagagcccccctagcaatacagggaggctcccggggcctggacaggcgggctcggaggctacccgctgtggccggtgccagctgcccttgcagggtgggtgagctctcaggccgagagccttatttacctagtgcaaaaactgtaaaagtgtacagactcttcacagatttttatcttaattgcaagtctgccgattttgtaaatgttcttggtgtttgactgtaatgtaactatctcacctaatggttgtacatatcctttggtcctggtgctgccgagggctggccgggactgctgctctcccaagggttttattttatttctgaatctagagaacagtattgggcaggaggaaaaggcttggtgtctgcggggggtgtcttccctgcctgtggcatttgtgtgttggctttgcagctgctgtctgagtagtggccactggggtgccttcactgggccagtcaacggggggctcctgcccaggccacagagaacctgagttcccgggagctgggccctgcctgcagccagggctggggttgccagaggccctggagggaaggacagtccctgctggggaagaacagccccggggccccctggtcaccgagactcagcctctgctggagaaagccacgccctccctgctagcacagaggcctgactgacttttttgcttaacttccatgttctgggtgatggaaactgccaaacctcctgtcagtgaggactctttccgactgcccagaaagtgggggtggaggaccgaggctacagctccacacgccccggtcccccagagcatctgccccaggtacacctccccctgcgccccgcacgactgcgggagccagactgtccagggaaacagcctctctcttttctacacactcagccacaaagccccccagctcccacaccgcgtcccagctcccctcttttgtaagtatgtgaaaaggaaaaaatgcaaacgttggagtttgggctggagctcctccctccagctgcgacttttaactatgtaataatgtacagaggaagctgttggtgttctaagactctgtgtggctgtgcaatttctgtacatttgcaattagaaatattaaagatttatttagctattttaagcccga

SEQ ID NO: 5606 - protein, 1065 aa, Homo sapiens; identical to SEQ ID NO: 738

SEQ ID NO: 5607 - DNA, 549 bp, Homo sapiens
aaaatagctaaataaatctttaatatttctaattgcaaatgtacagaaattgcacagccacacagagtcttagaacaccaacagcttcctctgtacattattacatagttaaaagtcgcagctggagggaggagctccagcccaaactccaacgtttgcattttttccttttcacatacttacaaaagaggggagctgggacgcggtgtgggagctggggggctttgtggctgagtgtgtagaaaagagagaggctgtttccctggacagtctggctcccgcagtcgtgcggggcgcagggggaggtgtacctggggcagatgctctgggggaccggggcgtgtggagctgtagcctcggtcctccacccccactttctgggcagtcggaaagagtcctcactgacaggaggtttggcagtttccatcacccagaacatggaagttaagcaaaaaagtcagtcaggcctctgtgctagcagggagggcggcgacatgatggctgggcagaggaagcgcaggaagagggaggcgctgatgagccgctcac

SEQ ID NO: 5608 - protein, 75 aa, Homo sapiens
MLWGTGACGAVASVLHPHFLGSRKESSLTGGLAVSITQNMEVKQKSQSGLCASREGGDMMAGQRKRRKREALMSR

SEQ ID NO: 5609 - DNA, 3625 bp, Homo sapiens
acagcagttaccagcttggggggtggggtcaggctgccattgagatgttttcttccccacccccgggaaaagaatctactctaaaaatgaaactctcactctgccacacactctgccatctgctggggcaaggggatgcttcgttggtctcccaagccttccagctgtggcagctgctctggatctgggggtagtttttgtctcctactgccagctgcagtccatgtagacggaggaaccagcgcaggccccagaacggcaggcgcttctccactcccctctggatgctctcgccccgctgggccccaggaaagcctgtggcaacctctcgagcaagggtattggggtcagaatggcagaactccttctccccggcctcaggcgaggcccgtctccatgctgcatcctgccaccgccaccatccccggtccgctacatccacctgctttcaccatagttacatgaaggggaccgggggacagggaacacagtgctcccagagccagagtttggctggggagtgaggaggactggcctcactccaggctttttgcatccctgtgtcctcatggcgtctggcccctctcgatcccggcgttggcctttcctcgctcagcgcagagcacctgactcctctctgcagccacgccgcttcccagcctcgtccacatccctgctcctccctgatggttggggtctgtgctggactgaggcagatccagagcctggaccacctgcctttcagttctctctctctccatttcctcatgccactgccaccccctggctttagattcaaacagaggctgggaagctgggatcttaccctgctagtcagtcgctcttcatgtgacatggtcaccttgtctgggcctcagtttcccctcctgcagagctcccacctctcagggtgctgtcacatgtccttcatgtatccaagggttttttaacctttgtcatataaaagttcaaagccctagttacaccctcagtcctgggacttgggtctaagtcttcatccccgctgtagccatacaggtcaggctgggagtttggagtggaggccccacggtggggcacaggcacgcgtctggctgcagcccccaccagctgggctccttgggcatctccttgctatgtgaagtgggcgggtcacagccactggggcctttcaagtggggctccctcctacccttcctcccactcgggctgacgaagctgtgctctctgtgtcctgggtgctgtgcccgtggacgctgccctcctggtaggacctggcggtgctgcaggacaagctgcgaatctccaccaagaagctggaggagtatgagaccctgttcaagtgccaggaggagacgacgcagaagctggtgctggagtaccaggcacggctggaggagggcgaggagcggctgcggcggcagcaggaggacaaggacatccagatgaagggcatcatcagcaggttgatgtccgtggaggaagaactgaagaaggaccacgcagagatgcaagcggctgtggactccaaacagaagatcattgatgcccaggagaagcgcattgcctcgttggatgccgccaatgcccgcctcatgagtgccctgacccagctgaaagagagtatgcattagaaacaaaagcccgcttgctcgcttgctggaacacaggggccttttaagttgagcgtgcgcactgcatgggaaatagcggccctggaggatgttagacttgctccctctccaagacagcagcagcctgcacctgccccgtgtgtgtggccggcctcctcctcacccttcccggcccccggccaaggacccaggcgctgcatacaggggaggggcgcaccccacagctggggccggttttcctcagctctaggctgttctgtagcttatctgcccctcccccactttcaagacagatgagcaggagcttgggtctctctcggcccctgtctgttcccagcccctgcagattctgagcaaaggccctgggtaagaagggtgggagtggggcctttgccagcagagccagggcagggcgagctgcaggaatcacccctctgcccctgcagctggaatgtgccacagaggccccacctgaagggtggatgtgctggaggggtggcccagagccatactgcgtccaccctgagctcggggacaggtgacagtggctgctctgggaaggggcttttagatgtaacctacaattcagttaggctagagacagatgctggtggaggaagggctgggccaccagggatcacagaccacaggaagatgggaggtggaagcagaggccctgcccccaccccttcctgtctcactcttctgtcttgtccccacccatgcgccttcgtgcctgagaccagggtggccacacaggcagggcctggctccagtctcatcctcccattgcccagtgagccctgctcttctctccccagccccctcccaccgctgcctcgtagagtgacctcggacagagcccccctagcaatacagggaggctcccggggcctggacaggcgggctcggaggctacccgctgtggccggtgccagctgcccttgcagggtgggtgagctctcaggccgagagccttatttacctagtgcaaaaactgtaaaagtgtacagactcttcacagatttttatcttaattgcaagtctgccgattttgtaaatgttcttggtgtttgactgtaatgtaactatctcacctaatggttgtacatatcctttggtcctggtgctgccgagggctggccgggactgctgctctcccaagggttttattttatttctgaatctagagaacagtattgggcaggaggaaaaggcttggtgtctgcggggggtgtcttccctgcctgtggcatttgtgtgttggctttgcagctgctgtctgagtagtggccactggggtgccttcactgggccagtcaacggggggctcctgcccaggccacagagaacctgagttcccgggagctgggccctgcctgcagccagggctggggttgccagaggccctggagggaaggacagtccctgctggggaagaacagccccggggccccctggtcaccgagactcagcctctgctggagaaagccacgccctccctgctagcacagaggcctgactgacttttttgcttaacttccatgttctgggtgatggaaactgccaaacctcctgtcagtgaggactctttccgactgcccagaaagtgggggtggaggaccgaggctacagctccacacgccccggtcccccagagcatctgccccaggtacacctccccctgcgccccgcacgactgcgggagccagactgtccagggaaacagcctctctcttttctacacactcagccacaaagccccccagctcccacaccgcgtcccagctcccctcttttgtaagtatgtgaaaaggaaaaaatgcaaacgttggagtttgggctggagctcctccctccagctgcgacttttaactatgtaataatgtacagaggaagctgttggtgttctaagactctgtgtggctgtgcaatttctgtacatttgcaattagaaatattaaagatttatttagctattttaagcccga

SEQ ID NO: 5610 - protein, 62 aa, Homo sapiens
MKGIISRLMSVEEELKKDHAEMQAAVDSKQKIIDAQEKRIASLDAANARLMSALTQLKESMH

SEQ ID NO: 5611 - DNA, 2411 bp, Homo sapiens
tcatgtgggacctggcacttggcagatcagttggcaggcaggaagataggaggacacagagcaggaggtcagtgtcccctgcctgtctccatccgaagcacctgccactgcatgcagcctgttgggaccttcctggctgtgaggaactgaggattcctacccacccaccccctctgaacctgtccccagagcaccacctgctaccttcttccctgccttagttgtattgccagatagacccagtgagggccatggctttttcttgtgagctcttgtccctgtggggaggacccacagcttcccacacctcccacacaggcccaggctgatgctctagggctcccagaagccagagatctgggcggatctggccagatggctctgagcactgtatctgccttctcctggggcccagcacacccagggcacagtggtcctgtagggagtgccacctggtgctcaccctgaaagaaaaggtgatccttcctctgagtgatggtttaaaaaaagattctaacgcctgcaggccctgagaaggtggataactgtgattttttttcctttcacagtatgcattagaaacaaaagcccgcttgctcgcttgctggaacacaggggccttttaagttgagcgtgcgcactgcatgggaaatagcggccctggaggatgttagacttgctccctctccaagacagcagcagcctgcacctgccccgtgtgtgtggccggcctcctcctcacccttcccggcccccggccaaggacccaggcgctgcatacaggggaggggcgcaccccacagctggggccggttttcctcagctctaggctgttctgtagcttatctgcccctcccccactttcaagacagatgagcaggagcttgggtctctctcggcccctgtctgttcccagcccctgcagattctgagcaaaggcccctgagctcggggacaggtgacagtggctgctctgggaaggggcttttagatgtaacctacaattcagttaggctagagacagatgctggtggaggaagggctgggccaccagggatcacagaccacaggaagatgggaggtggaagcagaggccctgcccccaccccttcctgtctcactcttctgtcttgtccccacccatgcgccttcgtgcctgagaccagggtggccacacaggcagggcctggctccagtctcatcctcccattgcccagtgagccctgctcttctctccccagccccctcccaccgctgcctcgtagagtgacctcggacagagcccccctagcaatacagggaggctcccggggcctggacaggcgggctcggaggctacccgctgtggccggtgccagctgcccttgcagggtgggtgagctctcaggccgagagccttatttacctagtgcaaaaactgtaaaagtgtacagactcttcacagatttttatcttaattgcaagtctgccgattttgtaaatgttcttggtgtttgactgtaatgtaactatctcacctaatggttgtacatatcctttggtcctggtgctgccgagggctggccgggactgctgctctcccaagggttttattttatttctgaatctagagaacagtattgggcaggaggaaaaggcttggtgtctgcggggggtgtcttccctgcctgtggcatttgtgtgttggctttgcagctgctgtctgagtagtggccactggggtgccttcactgggccagtcaacggggggctcctgcccaggccacagagaacctgagttcccgggagctgggccctgcctgcagccagggctggggttgccagaggccctggagggaaggacagtccctgctggggaagaacagccccggggccccctggtcaccgagactcagcctctgctggagaaagccacgccctccctgctagcacagaggcctgactgacttttttgcttaacttccatgttctgggtgatggaaactgccaaacctcctgtcagtgaggactctttccgactgcccagaaagtgggggtggaggaccgaggctacagctccacacgccccggtcccccagagcatctgccccaggtacacctccccctgcgccccgcacgactgcgggagccagactgtccagggaaacagcctctctcttttctacacactcagccacaaagccccccagctcccacaccgcgtcccagctcccctcttttgtaagtatgtgaaaaggaaaaaatgcaaacgttggagtttgggctggagctcctccctccagctgcgacttttaactatgtaataatgtacagaggaagctgttggtgttctaagactctgtgtggctgtgcaatttctgtacatttgcaattagaaatattaaagatttatttagctattttaagcccga

SEQ ID NO: 5612 - protein, 140 aa, Homo sapiens
MGGGSRGPAPTPSCLTLLSCPHPCAFVPETRVATQAGPGSSLILPLPSEPCSSLPSPLPPLPRRVTSDRAPLAIQGGSRGLDRRARRLPAVAGASCPCRVGELSGREPYLPSAKTVKVYRLFTDFYLNCKSADFVNVLGV

SEQ ID NO: 5613 - DNA, 1753 bp, Homo sapiens
ctaccttcttccctgccttagttgtattgccagatagacccagtgagggccatggctttttcttgtgagctcttgtccctgtggggaggacccacagcttcccacacctcccacacaggcccaggctgatgctctagggctcccagaagccagagatctgggcggatctggccagatggctctgagcactgtatctgccttctcctggggcccagcacacccagggcacagtggtcctgtagggagtgccacctggtgctcaccctgaaagaaaaggtgatccttcctctgagtgatggtttaaaaaaagattctaacgcctgcaggccctgagaaggtggataactgtgattttttttcctttcacagtatgcattagaaacaaaagcccgcttgctcgcttgctggaacacaggggccttttaagttgagcgtgcgcactgcatgggaaatagcggccctggaggatgttagacttgctccctctccaagacagcagcagcctgcacctgccccgtgtgtgtggccggcctcctcctcacccttcccggcccccggccaaggacccaggcgctgcatacaggggaggggcgcaccccacagctggggccggttttcctcagctctaggctgttctgtagcttatctgcccctcccccactttcaagacagatgagcaggagcttgggtctctctcggcccctgtctgttcccagcccctgcagattctgagcaaaggccctgggtaagaagggtgggagtggggcctttgccagcagagccagggcagggcgagctgcaggaatcacccctctgcccctgcagctggaatgtgccacagaggccccacctgaagggtggatgtgctggaggggtggcccagagccatactgcgtccaccctgagctcggggacaggtgacagtggctgctctgggaaggggcttttagatgtaacctacaattcagttaggctagagacagatgctggtggaggaagggctgggccaccagggatcacagaccacaggaagatgggaggtggaagcagaggccctgcccccaccccttcctgtctcactcttctgtcttgtccccacccatgcgccttcgtgcctgagaccagggtggccacacaggcagggcctggctccagtctcatcctcccattgcccagtgagccctgctcttctctccccagccccctcccaccgggggggctcctgcccaggccacagagaacctgagttcccgggagctgggccctgctagcacagaggcctgactgacttttttgcttaacttccatgttctgggtgatggaaactgccaaacctcctgtcagtgaggactctttccgactgcccagaaagtgggggtggaggaccgaggctacagctccacacgccccggtcccccagagcatctgccccaggtacacctccccctgcgccccgcacgactgcgggagccagactgtccagggaaacagcctctctcttttctacacactcagccacaaagccccccagctcccacaccgcgtcccagctcccctcttttgtaagtatgtgaaaaggaaaaaatgcaaacgttggagtttgggctggagctcctccctccagctgcgacttttaactatgtaataatgtacagaggaagctgttggtgttctaagactctgtgtggctgtgcaatttctgtacatttgcaattagaaatattaaagatttatttagctattttaagcccga

SEQ ID NO: 5614 - protein, 95 aa, Homo sapiens
MLVEEGLGHQGSQTTGRWEVEAEALPPPLPVSLFCLVPTHAPSCLRPGWPHRQGLAPVSSSHCPVSPALLSPAPSHRGGSCPGHREPEFPGAGPC

SEQ ID NO: 5615 - DNA, 1727 bp, Homo sapiens
ctaccttcttccctgccttagttgtattgccagatagacccagtgagggccatggctttttcttgtgagctcttgtccctgtggggaggacccacagcttcccacacctcccacacaggcccaggctgatgctctagggctcccagaagccagagatctgggcggatctggccagatggctctgagcactgtatctgccttctcctggggcccagcacacccagggcacagtggtcctgtagggagtgccacctggtgctcaccctgaaagaaaaggtgatccttcctctgagtgatggtttaaaaaaagattctaacgcctgcaggccctgagaaggtggataactgtgattttttttcctttcacagtatgcattagaaacaaaagcccgcttgctcgcttgctggaacacaggggccttttaagttgagcgtgcgcactgcatgggaaatagcggccctggaggatgttagacttgctccctctccaagacagcagcagcctgcacctgccccgtgtgtgtggccggcctcctcctcacccttcccggcccccggccaaggacccaggcgctgcatacaggggaggggcgcaccccacagctggggccggttttcctcagctctaggctgttctgtagcttatctgcccctcccccactttcaagacagatgagcaggagcttgggtctctctcggcccctgtctgttcccagcccctgcagattctgagcaaaggccctgggtaagaagggtgggagtggggcctttgccagcagagccagggcagggcgagctgcaggaatcacccctctgcccctgcagctggaatgtgccacagaggccccacctgaagggtggatgtgctggaggggtggcccagagccatactgcgtccaccctgagctcggggacaggtgacagtggctgctctgggaaggggcttttagatgtaacctacaattcagttaggctagagacagatgctggtggaggaagggctgggccaccagggatcacagaccacaggaagatgggaggtggaagcagaggccctgcccccaccccttcctgtctcactcttctgtcttgtccccacccatgcgccttcgtgcctgcagccagggctggggttgccagaggccctggagggaaggacagtccctgctggggaagaacagccccggggccccctggtcaccgagactcagcctctgctggagaaagccacgccctccctgctagcacagaggcctgactgacttttttgcttaacttccatgttctgggtgatggaaactgccaaacctcctgtcagtgaggactctttccgactgcccagaaagtgggggtggaggaccgaggctacagctccacacgccccggtcccccagagcatctgccccaggtacacctccccctgcgccccgcacgactgcgggagccagactgtccagggaaacagcctctctcttttctacacactcagccacaaagccccccagctcccacaccgcgtcccagctcccctcttttgtaagtatgtgaaaaggaaaaaatgcaaacgttggagtttgggctggagctcctccctccagctgcgacttttaactatgtaataatgtacagaggaagctgttggtgttctaagactctgtgtggctgtgcaatttctgtacatttgcaattagaaatattaaagatttatttagctattttaagcccga

SEQ ID NO: 5616 - protein, 92 aa, Homo sapiens
MLVEEGLGHQGSQTTGRWEVEAEALPPPLPVSLFCLVPTHAPSCLQPGLGLPEALEGRTVPAGEEQPRGPLVTETQPLLEKATPSLLAQRPD

SEQ ID NO: 5617 - DNA, 1256 bp, Homo sapiens
tttcctcagctctaggctgttctgtagcttatctgcccctcccccactttcaagacagatgagcaggagcttgggtctctctcggcccctgtctgttcccagcccctgcagattctgagcaaaggccctgggtaagaagggtgggagtggggcctttgccagcagagccagggcagggcgagctgcaggaatcacccctctgcccctgcagctggaatgtgccacagaggccccacctgaagggtggatgtgctggaggggtggcccagagccatactgcgtccaccctgagctcggggacaggtgacagtggctgctctgggaaggggcttttagatgtaacctacaattcagttaggctagagacagatgctggtggaggaagggctgggccaccagggatcacagaccacaggaagatgggaggtggaagcagaggccctgcccccaccccttcctgtctcactcttctgtcttgtccccacccatgcgccttcgtgcctgagaccagggtggccacacaggcagggcctggctccagtctcatcctcccattgcccagtgagccctgctcttctctccccagccccctcccaccgctgcctcgtagagtgacctcggacagagcccccctagcaatacagggaggctcccggggcctggacaggcgggctcggaggctacccgctgtggccggtgccagctgcccttgcagggtgggtgagctctcaggccgagagccttatttacctagtgcaaaaactgtaaaagtgtacagactcttcacagatttttatcttaattgcaagtctgccgattttgtaaatgttcttggtgtttgactgtaatgtaactatctcacctaatggttgtacatatcctttggtcctggtgctgccgagggctggccgggactgctgctctcccaagggttttattttatttctgaatctagagaacagtattgggcaggaggaaaaggcttggtgtctgcggggggtgtcttccctgcctgtggcatttgtgtgttggctttgcagctgctgtctgagtagtggccactggggtgccttcactgggccagtcaacggggggctcctgcccaggccacagagaacctgactcctccctccagctgcgacttttaactatgtaataatgtacagaggaagctgttggtgttctaagactctgtgtggctgtgcaatttctgtacatttgcaattagaaatattaaagatttatttagctatttt

SEQ ID NO: 5618 - protein, 140 aa, Homo sapiens; identical to SEQ ID NO: 5612

SEQ ID NO: 5619 - DNA, 1298 bp, Homo sapiens
gaagggtgggagtggggcctttgccagcagagccagggcagggcgagctgcaggaatcacccctctgcccctgcagctggaatgtgccacagaggccccacctgaagggtggatgtgctggaggggtggcccagagccatactgcgtccaccctgagctcggggacaggtgacagtggctgctctgggaaggggcttttagatgtaacctacaattcagttaggctagagacagatgctggtggaggaagggctgggccaccagggatcacagaccacaggaagatgggaggtggaagcagaggccctgcccccaccccttcctgtctcactcttctgtcttgtccccacccatgcgccttcgtgcctgagaccagggtggccacacaggcagggcctggctccagtctcatcctcccattgcccagtgagccctgctcttctctccccagccccctcccaccgctgcctcgtagagtgacctcggacagagcccccctagcaatacagggaggctcccggggcctggacaggcgggctcggaggctacccgctgtggccggtgccagctgcccttgcagggtgggtgagctctcaggccgagagccttatttacctagtgcaaaaactgtaaaagtgtacagactcttcacagatttttatcttaattgcaagtctgccgattttgtaaatgttcttggtgtttgactgtaatgtaactatctcacctaatggttgtacatatcctttggtcctggtgctgccgagggctggccgggactgctgctctcccaagggttttattttatttctgaatctagagaacagtattgggcaggaggaaaaggcttggtgtctgcggggggtgtcttccctgcctgtggcatttgtgtgttggctttgcagctgctgtctgagtagtggccactggggtgccttcactgggccagtcaacggggggctcctgcccaggccacagagaacctgagttcccgggagctgggccctgcctgcagccagggtgtccagggaaacagcctctctcttttctacacactcagccacaaagccccccagctcccacaccgcgtcccagctcccctcttttgtaagtatgtgaaaaggaaaaaatgcaaacgttggagtttgggctggagctcctccctccagctgcgacttttaactatgtaataatgtacagaggaagctgttggtgttctaagactctgtgtggctgtgcaatttctgtacatttgcaattagaaatattaaagatttatttagctattttaagcccga

SEQ ID NO: 5620 - protein, 140 aa, Homo sapiens; identical to SEQ ID NO: 5612

SEQ ID NO: 5621 - DNA, 1244 bp, Homo sapiens
gaggggtggcccagagccatactgcgtccaccctgagctcggggacaggtgacagtggctgctctgggaaggggcttttagatgtaacctacaattcagttaggctagagacagatgctggtggaggaagggctgggccaccagggatcacagaccacaggaagatgggaggtggaagcagaggccctgcccccaccccttcctgtctcactcttctgtcttgtccccacccatgcgccttcgtgcctgagaccagggtggccacacaggcagggcctggctccagtctcatcctcccattgcccagtgagccctgctcttctctccccagccccctcccaccgctgcctcgtagagtgacctcggacagagcccccctagcaatacagggaggctcccggggcctggacaggcgggctcggaggctacccgctgtggccggtgccagctgcccttgcagggtgggtgagctctcaggccgagagccttatttacctagtgcaaaaactgtaaaagtgtacagactcttcacagatttttatcttaattgcaagtctgccgattttgtaaatgttcttggtgtttgactgtaatgtaactatctcacctaatggttgtacatatcctttggtcctggtgctgccgagggctggccgggactgctgctctcccaagggttttattttatttctgaatctagagaacagtattgggcaggaggaaaaggcttggtgtctgcggggggtgtcttccctgcctgtggcatttgtgtgttggctttgcagctgctgtctgagtagtggccactggggtgccttcactgggccagtcaacggggggctcctgcccaggccacagagaacctgagttcccgggagctgggccctgcctgcagccagggctggggttgccagaggccctggagggaaggacagtccctggccccgcacgactgcgggagccagactgtccagggaaacagcctctctcttttctacacactcagccacaaagccccccagctcccacaccgcgtcccagctcccctcttttgtaagtatgtgaaaaggaaaaaatgcaaacgttggagtttgggctggagctcctccctccagctgcgacttttaactatgtaataatgtacagaggaagctgttggtgttctaagactctgtgtggctgtgcaatttctgtacatttgcaattagaaatattaaagatttatttagctattttaagcccga

SEQ ID NO: 5622 - protein, 140 aa, Homo sapiens; identical to SEQ ID NO: 5612

SEQ ID NO: 5623 - DNA, 743 bp, Homo sapiens
accgctgcctcgtagagtgacctcggacagagcccccctagcaatacagggaggctcccggggcctggacaggcgggctcggaggctacccgctgtggccggtgccagctgcccttgcagggtgggtgagctctcaggccgagagccttatttacctagtgcaaaaactgtaaaagtgtacagactcttcacagatttttatcttaattgcaagtctgccgattttgtaaatgttcttggtgtttgactgtaatgtaactatctcacctaatggttgtacatatcctttggtcctggtgctgccgagggctggccgggactgctgctctcccaagggttttattttatttctgaatctagagaacagtattgggcaggaggaaaaggcttggtgtctgcggggggtgtcttccctgcctgtggcatttgtgtgttggctttgcagctgctgtctgagtagtggccactggggtgccttcactgggccagtcaacggggggctcctgcccaggccacagagaacctgactcccacaccgcgtcccagctcccctcttttgtaagtatgtgaaaaggaaaaaatgcaaacgttggagtttgggctggagctcctccctccagctgcgacttttaactatgtaataatgtacagaggaagctgttggtgttctaagactctgtgtggctgtgcaatttctgtacatttgcaattagaaatattaaagatttatttagctattttaa

SEQ ID NO: 5624 - protein, 98 aa, Homo sapiens [sequence omitted]

SEQ ID NO: 5625 - DNA, 623 bp, Homo sapiens
gatttttatcttaattgcaagtctgccgattttgtaaatgttcttggtgtttgactgtaatgtaactatctcacctaatggttgtacatatcctttggtcctggtgctgccgagggctggccgggactgctgctctcccaagggttttattttatttctgaatctagagaacagtattgggcaggaggaaaaggcttggtgtctgcggggggtgtcttccctgcctgtggcatttgtgtgttggctttgcagctgctgtctgagtagtggccactggggtgccttcactgggccagtcaacggggggctcctgcccaggccacagagaacctgagttcccgggagctgggccctgcctgcagccagggctggggttgccagaggccctggagggaaggacaccccccagctcccacaccgcgtcccagctcccctcttttgtaagtatgtgaaaaggaaaaaatgcaaacgttggagtttgggctggagctcctccctccagctgcgacttttaactatgtaataatgtacagaggaagctgttggtgttctaagactctgtgtggctgtgcaatttctgtacatttgcaattagaaatattaaagatttatttagctatttt

SEQ ID NO: 5626 - protein, 98 aa, Homo sapiens [sequence omitted]

SEQ ID NO: 5627 - DNA, 380 bp, Homo sapiens
gaaagtatttgaggcgctagtactgtgcctggtgtggtgcactgtaggactcagaaaatgctcgtagtgcgtggcaagggagggttctgggaggcagaggtgcatcccaaataagctcctgcagctttctcctccttccttccaacatcctgtccctgactcctgacccaaactgataagagcagttgacctggttcataacaggtactcaaaagcatctgtggaaacaagttacttgaatccgccctccccagatatttttaaacccaaaggcaagattgttaatccaagatgtctccaatttggagcgcaatgttcaggtctaaaaccaaccaagcacattgaatattttgaaaaataaaatcaagaggttgaattcc

SEQ ID NO: 5628 - protein, 64 aa, Homo sapiens [sequence omitted]

SEQ ID NO: 5629 - DNA, 1356 bp, Homo sapiens
ttagtagagatgaggtttctccatgttggccaggctggtctcgaactactgacctcaagtgatccacgcacctcggcctcccaaagtgctgggattataggcatgagccactgcgcccagccaggagctgggttttaatgggggcatttcattgtggacattttacaaggctttgagctaggtttaaatcttatataactttccccagctctctccgtgtctctgagactcaacttcctcatctgcaaaatagggttaaccgaacttccttcataggtctgtgtgagagatttggtctgcacatggccataaaatgcccagctagtgcctggtgggcacagtgggcactctgtgagtgagttagccctgttaggagtttctggaatggagacggtggtggggagcggggctagctcttgctgacatccttgtggctggaggtgggccttcccagggcagcgtagggcagctgtgtgcaccccctcatccagtctctttgttcacagggatgtgtctgcaggccttcgtagaagctttctttttcctggctcagaggaagttcaagatgctgccacttcatgagcaggtggcctcactgattgacctttgcgagtaccacctgtccctgctggatgaaaaacgcctggaagcaccaactggggcaaatctgttgtatttggggcacaggacacaatcgatcccaaggcccggagctgtggagaggaagccgagtgttaggatctgctgccggggcctccacgcgcccaccgggaaaagcctgagaacatcgtgtttatttcctgccgcccgttccgagagaaggaagtggaaatatcaagtaggcatctgcgaatctcccatcccagtcatgtgctacatgggtgtagtgaacagattaacctcatttagttcattagcttgcctgttgctgcaatatttggtttgttattaattaagaaaaaattaattaagaagtaactaagactcctggagcctcagagctggcaggagcctcagagatcattttgtttgattttgtttgactgtgaccccaaagcaggaatcccatctttagcctccctgaccagatggtctgagtggacccctgcataggtggggtgctggtcatgtggccagcgtgtccacaacaagcactgccaggggtccctgcatgcccagcactgtgctgggagccctgggtgagggaaggaaatcagacatggataagaaccagagcaagaggagtagtgtatgtcagacctggtgccagggtcaggggagctcacactgtcttccatgagaccctttccttgtctccatctgtatccccaggtagcccccctctcggaggaaacg

SEQ ID NO: 5630 - protein, 147 aa, Homo sapiens
MCLQAFVEAFFFLAQRKFKMLPLHEQVASLIDLCEYHLSLLDEKRLEAPTGANLLYLGHRTQSIPRPGAVERKPSVRICCRGLHAPTGKSLRTSCLFPAARSERRKWKYQVGICESPIPVMCYMGVVNRLTSFSSLACLLLQYLVCY

SEQ ID NO: 5631 - DNA, 3145 bp, Homo sapiens
ctgccgctgtcaacccgagcctgagcgatcatggcaacgggctcgggcggggaacgcgtggcagcggctgcagcggcggcagtttggtggcggactggggcggcggagcggcggcggcggcggcggtggcactggcactggccccggccctgagcaccatgcggcggggcagctccgagagcgagctggcggcccggtgggaggcggaggcggtggctgcggccaaagcggcggccaaagctgaggccgaggccacagcggagacggtggcggaacaggtccgcgtggacgcgggcgcggccggggaaccggagtgcaaggcaggggaggagcagcccaaggtcctggccccggccccggcgcagcccagtgcggctgaggaggggaacacccaggtccttcagcggccgccgcccacgctgcccccgtccaagccgaagccggtgcagggcctctgcccgcacgggaagccccgggacaagggccgaagctgcaagcggagctcgggccacggttccggcgagaacggctcccagcggccggtcaccgtggacagctccaaggccaggacctccctggatgccctgaagatcagcatccgccagctcaagtggaaggagttcccatttggccggcgcttgccttgtgacatctactggcatggagtttcatttcacgacaatgacatattctccggtcaagtgaacaagtttccaggttcaaatggtgaaagacgatgacccctcctggaagcccacttttatcgtgaaacctgatggtggttgtcagggtgatggaatctacctcattaaagaccccagtgacatccgcctggcagggaccctccagagcaggccagcggtggtccaggagtacatctgcaaacctctccttatcgacaagctcaagtttgatattcgtctgtatgtcttactcaagtccttagaccccttagagatttatatagccaaagacggactctctaggttttgtaccgagccatatcaggagcccacccccaaaaacctgcaccgcatctttatgcacttaaccaactattcactgaacatccacagcggcaacttcatccactcggacagtgctagcactggcagcaaaaggactttttccagcatcctttgtagactgtcttccaaaggcgttgacatcaagaaggtctggtctgacatcatctccgtggtgattaagacggtcatcgcgctgactccagagctcaaagtcttctaccagtcagacatccccacggggaggccgggccccacgtgcttccagattttaggctttgacattcttctaatgaaaaatctgaagcctatactacttgaagtaaatgcaaatcccagtatgagaatcgaacatgagcacgaagggtgtttgaaaatgtccccagcctcgttgatgaagaagtgaaagtggctgtgatcagagacactctgcgcctcatggacccacttaagaagaaaagagagaatcagtctcagcagcttgaaaaaccattcgctggaaaggaagatgctttggacggcgagctgaccagtgctccagactgcaacgccaaccccgaagcccacctgccttccatttgcctcaagcaggtgttccccaagtacgcaaaacagttcaactacctgcgcctggtggacaggatggcaaatttgtttatccggttcctgggcatcaaggggacaatgaagttggggccaacaggctttcgtaccttcataaggagctgcaaactcagcagcagcagcctgtccatggctgccgtggacatcctctacattgacatcacacggaggtggaactccatgaccctggaccagcgggactcagggatgtgtctgcaggccttcgtagaagctttctttttcctggctcagaggaagttcaagatgctgccacttcatgagcaggtggcctcactgattgacctttgcgagtaccacctgtccctgctggatgaaaaacgcctggtgtgtggccggggcgtcccgtcggggggccggcccccacaccgtggccctccccaggagccctccccctcggcccagccagcaggggacaaccccccaccccgcaccagctgtgccaataagctctcccatcccagacataccctgtcctgagggccactctgtcctcctggaaaacggaagacgagagcagctttcagggctggagcgccccaggcattctgcctgcagaggaatggcaggcaggctgccgaggggcccagctgaggtccccacgaactgtctctgtgtgcggctgagctgtgcttcaccaggctggctggttctcacctgccttcctcctcacacctcctggtgatacaccctgtttctgagtcatcagtcatcggacatatgacatctaaaacgtgacagatggcaccttctattctgggctcacaggaagcaccaactggggcaaatctgttgtatttggggcacaggacacaatcgatcccaaggcccggagctgtggagaggaagccgagtgttaggatctgctgccggggcctccacgcgcccaccgggaaaagcctgagaacatcgtgtttatttcctgccgcccgttccgagagaaggaagtggaaatatcaagtaggcatctgcgaatctcccatcccagtcatgtgctacatgggtgtagtgaacagattaacctcatttagttcattagcttgcctgttgctgcaatatttggtttgttattaattaagaaaaaattaattaagaagtaactaagactcctggagcctcagagctggcaggagcctcagagatcattttgtttgattttgtttgactgtgaccccaaagcaggaatcccatctttagcctccctgaccagatggtctgagtggacccctgcataggtggggtgctggtcatgtggccagcgtgtccacaacaagcactgccaggggtccctgcatgcccagcactgtgctgggagccctgggtgagggaaggaaatcagacatggataagaaccagagcaagaggagtagtgtatgtcagacctggtgccagggtcaggggagctcacactgtcttccatgagaccctttccttgtctccatctgtatccccaggtagcccccctctcggaggaaacg

SEQ ID NO: 5632 - protein, 235 aa, Homo sapiens
MVKDDDPSWKPTFIVKPDGGCQGDGIYLIKDPSDIRLAGTLQSRPAVVQEYICKPLLIDKLKFDIRLYVLLKSLDPLEIYIAKDGLSRFCTEPYQEPTPKNLHRIFMHLTNYSLNIHSGNFIHSDSASTGSKRTFSSILCRLSSKGVDIKKVWSDIISVVIKTVIALTPELKVFYQSDIPTGRPGPTCFQILGFDILLMKNLKPILLEVNANPSMRIEHEHEGCLKMSPASLMKK

SEQ ID NO: 5633 - DNA, 547 bp, Homo sapiens
cagacaggagccgagcccctctgccggcaggtctcagcagcttgaaaaaccattcgctggaaaggaagatgctttggacggcgagctgaccagtgctccagactgcaacgccaaccccgaagcccacctgccttccatttgcctcaagcaggtgttccccaagtacgcaaaacagttcaactacctgcgcctggtggacaggatggcaaatttgtttatccggttcctgggcatcaaggggacaatgaagttggggccaacaggctttcgtaccttcataaggagctgcaaactcagcagcagcagcctgtccatggctgccgtggacatcctctacattgacatcacacggaggtggaactccatgaccctggaccagcgggactcagccagccagaccttccttctgccgttataagactttggtgcccactgaaggggttaaccagatccctgatgcttgagacctttaagaacaaaaataacctgcaaaaggagaccttgctattgaaatggagaagaaaaaatggtgcttaaaataattagg

SEQ ID NO: 5634 - protein, 71 aa, Homo sapiens
MANLFIRFLGIKGTMKLGPTGFRTFIRSCKLSSSSLSMAAVDILYIDITRRWNSMTLDQRDSASQTFLLPL

SEQ ID NO: 5635 - DNA, 1077 bp, Homo sapiens
gtctgttgagagggaaccatttccaagatgtatggggaagaatttcctgagctgatgtgagagtgtcattccacagggccatcagacaggagccgagcccctctgccggcagggaaacggtctcttatggaaactgggaatcatatgaagaagaatcctaacctcaaagggtcgtggtgagaatcaaataagaggatgtgcttagcacacaggtgtccaagcagcgagagctccagcatcctgaccccacagcctttgtggttaaccactgctcactgctttccacttgctaggatgccccagaatatttgaatcagagcctccaaatggaaaacggacagtggaagacttctgtacaagtccccagaaaccaggctgaggaagagggagaatccgaagctgacttcagggttttgagcttggctcactggggtgatgaagttgccagtaacaacatggaaatagcaagaagcaggttcaaggggatgtattatcttcatcctggaacgttggattaccgagatgcaagtgggctatctgggtggattttctggcaggtgttggacttccagaaaatgattcttcaaagctacacgaggactaagagtgtgggaaataattgatcccatctgggcaaattcaagtgttttcctgggtgaagacttctgggggcagagagcaaactagaaaacagaaaacagaagtgggtactcatgggtttgtggtcacggcattcagttttcttgcctgcagagtgggtgccttgctttgttcttcccaagctgttgttgaggctgcattaggtcaggaatgggaaattgccctgtagattgtgccctgagctgtggcgagaggcagcagacagtagcgtcaaccccagtctcccaaatgctgagcaggacaggagaggtacaagtgaagtgccccctgtctctgtgtcatagctgagaaattaataattgttccctcttctggtttgaactggccttttgaataggctctaaatttgttcataattgccaaaggaacgacacaataaaaactggaatttctccattccctggcaaggggggtgca

SEQ ID NO: 5636 - protein, 98 aa, Homo sapiens
MENGQWKTSVQVPRNQAEEEGESEADFRVLSLAHWGDEVASNNMEIARSRFKGMYYLHPGTLDYRDASGLSGWIFWQVLDFQKMILQSYTRTKSVGNN

SEQ ID NO: 5637 - DNA, 687 bp, Homo sapiens
cctgctggcctggagctgattgacgctttcctgccccagcagttgagaagtccatttatttccctccaggggcctcacagacccatttaccccagagctgtgggtctgggggattcaaagagagacctggtgactgtgacagcctctggaaacctgagtcgacattgtctgctgggcattagtggtgatgccccagagacaggatcttgctctgttgcccaggcgagagtgcagtggcatgatcacagctcattgcagccttgacctcctgtgctcaagcaatcctcctgcctcagcctccagagtagctgagactacaagcacccaccaccgcgcctggataatttttaaactttttagagatggtatctcactgtgttacccaggctggcctcaaacccctggctccaagcaatcttcctgcctcagcctcccaaagtgctgggattacaggtatgagccaccatgcttcgccttgtgagctaatttgcaagaatggaacaatgaagactcctagacctactcacctgccttaaagatatgctattgtcccccagagaggtggcaaaatggtttgtatttttgtcttaagccttggacttttaaaatcctggattttgatgtgtgtgcagaagagaactaagatagcgtgcttgagaccgctctcctttaaaaggcctgcttgca

SEQ ID NO: 5638 - protein, 97 aa, Homo sapiens
MPQRQDLALLPRRECSGMITAHCSLDLLCSSNPPASASRVAETTSTHHRAWIIFKLFRDGISLCYPGWPQTPGSKQSSCLSLPKCWDYRYEPPCFAL

SEQ ID NO: 5639 - DNA, 3519 bp, Homo sapiens
ctagggtgctcaggcaaactgcacgtgtcaccgctcctcagctgctgcagctggtggccacgtggcagtgccagggtcacactcacagagatgaggagaagctgggccccctttgatcttcacagtagcctatgagatggtccccagatcctccgatgcttcaagaggagctgggcaccacagttaagtgaagtttcctaaattttaagtgttggtcatttgtgtttaaaaatgtgaaaacaaaagaaataaaagtgcagccagacaaagcctctctgcctgcacatggctgctgaaaggctgaaatggatggaggtggtctcacccaggggatcccagggactgacgttcctatcgcagggaaggtgtcacacacggagctacggaacagcagggccggagcaaacaaagccagcccagctgcctcggctattccaacaggggctacactggagacattttaaaaataaagggggtgaggggaaagaattctccagaaactttggttcttctgtaatggcaagtataattgcaaaaaacatcttgtcagcctgtaaaatgacactttcacaggttttcttagcaagggagctagatgggcaagaaccaagcgttcaagttcggggaccgttcgagcccagtttgctttgctgtgtttcgtagccattaatgtccccccgccaattaccaccagtcattttgcaaagttatcattactactgtttaaaagaaaaaaaaacattgctcattttagaaagctgtctgtcaaaaatgcttaaaataaaagcagtcttggcattcgaaggaataagtaccatttatcttgaaagccacttgggtaagaatttctcaacagtgttggctacaagaaccgttgatgtatttgcaagaaagcgcaggtgtttatggtacatggcctttggtgggtgggcgtttttaagtttacttctttattcagcaaatatgtattgggcacctgctgtatgcagggtaatatcctaaggccttggggatgcagtatggggcaggccgtgaaagtccagtgggaaatagggcaagtccagggcccaggcagagcagaagaggagactgggcaggcggggctggtggcattgccagagagtgagtgcttcccacgcctggcctcactctgtcctctcacgagccttactcagtatgcagtacagtctccattttatggaaggggaaactgaggcttagagaggcccccataagaggccaggggccgggccccggcttgcctggctgcagagccggcgtcctcacgttttgtggggcagcctctccagctgcaggtgtggacacacatcaccgtgcggggcgcggaccctggtctccacctgcccagcttgctctgcgcctgcatgggttcagccacatacacagtgttcattgggggttagaaaatgaacacgtctacacaagttagacctatgttcattcttctcaaagctaaggattttctctggagttttttgggttttttattttaggtgtggttttttcattttgttttgtttgagacaggtctctgtcgcccaggctggagtgcagtggcacagtcacagttcactgtagcctcaacttcccaggctcggatgatcctcccatctcagcctcctgagtagctgggactataggtgtgtggcatcacagccagctaattttttgtattttctatagaggcggggtcttgctctattgtccaggctggtcttgaactcctgggcccaagtgatcccccctgactcagcctcccaaaggtctgggattacaggcatgaggcaccgcacctggcctgttttgtttttaatgatgacatgtgcgatgtcaagaatccctaatgaggacaatcatgtaaaccattactttgaacataactatcaaattaggtataatctactcatatgctgattgacggcgggcattaacaattcacagtgtcatccagtttcagaaccaccagggttctgaggccagcccctttgctccttggaaggggcatggagacgcagagaggataaggagctggatccaggtcagggggtggtgctggagcttaaaccctgtgctctgtccatctggtcacctgatgccttcactggacttcaagcagccttgcccttggccttgctgataaacttctcctgaggagtcaggagacaataggcacagacccctaaggtgctgaccataggccacagccttcagagagctggtgaggggaccacaccaggcgcgccgggctcctgcgaagggccatcctagcaacggtgaggcccaacagaacagcctcagaaactgccaggctccccatcataaatcctgtgtggctcagaaactgccaggctccccatcataaatcctgtgtggctacaaatggtgacagaatgagaattcaaggaaatggaaagagaccaattgccctgttgggaaaaccatcgcaggaggaagaggaagtgtgcgtaccgggcggaagtgctccttgtcgtatgtgctgtgtgtgccgcgccttgctgagcagggaggcttgggatcccctctgggatctgcccccactggcctctggccgctccctctgccagtgctccagcctggccaggctttccgttgctggaatcttccacacgccccctgcctccaggcctgcatcctttctgccgacagcatgcctcttctccccctctgggtccccaactctgctaactaatttttctacagagattttattttagatgccctttcctccacgagatactcagatctgttttcacacagaaggcgtgcatttgtcctgcttgttttctctatgccagcttggagtggccgctaactcgtctttgtccttcactctcaggtgacagaccatgccaccactgccctgctccactatcagctgccccagatgccggatgtcgtggtccgatccttcatgacctggttaagaagttacataaagctgttccaggccccgtgccagcgctgcgggaagtttctgcaggacggccttcccccgacatggagggatttccgaaccctcgaagccttccatgacacctgccggcagtagcccccacgctggccccagcctcagaccccacccagcaccttcccagacacgcaggaagcccacagaaggctcagctggttcctcactgcccagatgtgtacagctgctcctccctttcataaagcagcgccatgtgtgcagaggccactcttgaagagcagactccctctgtggctgatgggactaattattcccactagccagcggactgaaggcaaagaagacctttctagaacctggtagaaggaagctgtgcagcatgctcctcgtccatgtgtgtcggcagtgctggtgtctgtcgtctccgcgagctgttactggaatgagcccttgtgttcatgggtatcgtcatgcggggttcttgtgttttgtggggcttgggttttggtaacttatttttataagcaataaaccttttgtatcctgga

SEQ ID NO: 5640 - protein, 54 aa, Homo sapiens
MPDVVVRSFMTWLRSYIKLFQAPCQRCGKFLQDGLPPTWRDFRTLEAFHDTCRQ

SEQ ID NO: 5641 - DNA, 727 bp, Homo sapiens
tgagaacagacgtgtctgtgctgaagcaattggtcatctgcaagcttgatatatggtccaaatccaactatcaagtattccagaaggtgacagaccatgccaccactgccctgctccactatcagctgccccagatgccggatgtcgtggtccgatccttcatgacctggttaagaagttacataaagctgttccaggccccgtgccagcgctgcgggaagtttctgcaggacggccttcccccgacatggagggatttccgaaccctcgaagccttccatgacacctgccggcagtagcccccacgctggccccagcctcagaccccacccagcaccttcccagacacgcaggaagcccacagaaggctcagctggttcctcactgcccagatgtgtacagctgctcctccctttcataaagcagcgccatgtgtgcagaggccactcttgaagagcagactccctctgtggctgatgggactaattattcccactagccagcggactgaaggcaaagaagacctttctagaacctggtagaaggaagctgtgcagcatgctcctcgtccatgtgtgtcggcagtgctggtgtctgtcgtctccgcgagctgttactggaatgagcccttgtgttcatgggtatcgtcatgcggggttcttgtgttttgtggggcttgggttttggtaacttatttttataagcaataaaccttttgtatcctgga

SEQ ID NO: 5642 - protein, 76 aa, Homo sapiens
MVQIQLSSIPEGDRPCHHCPAPLSAAPDAGCRGPILHDLVKKLHKAVPGPVPALREVSAGRPSPDMEGFPNPRSLP

SEQ ID NO: 5643 - DNA, 1386 bp, Homo sapiens
gagctgctgtggcggcggcaacatggcggacgtgataaatgtcagtgtgaacctggaggccttttcccaggccattagtgccatccaggcgctgcgctccagcgtgagcagggtgttcgactgcctgaaggatgggatgcggaacaaggagacgctggagggccgggagaaggcctttattgcgcacttccaggacaacttacattcggtcaaccgggacctcaatgagctggaacgtctgagcaatctggtaggcaagccatctgagaaccatcctcttcataacagtgggctgttaagcctggatcctgtgcaggacaaaactcctctctatagtcaactccttcaagcatataagtggtcaaacaagttgcagtaccatgcaggactagcatctggccttttaaatcagcagtcattgaagcgttccgctaatcagatgggagtatctgccaaacgtagaccaaaggctcagcccacaactcttgtcctaccacctcaatatgttgatgatgtgatcagccgcattgacaggatgtttcctgaaatgtccatccacttatccagacccaatggaacatcagcaatgcttctggtgaccttgggaaaggtgttgaaagtgatcgtcgtcatgcggagcctgttcattgatcgaacaatagtaaagggatataacgagaatgtctacacagaagatggcaagcttgatatatggtccaaatccaactatcaagtattccagaaggtgacagaccatgccaccactgccctgctccactatcagctgccccagatgccggatgtcgtggtccgatccttcatgacctggttaagaagttacataaagctgttccaggccccgtgccagcgctgcgggaagtttctgcaggacggccttcccccgacatggagggatttccgaaccctcgaagccttccatgacacctgccggcagtagcccccacgctggccccagcctcagaccccacccagcaccttcccagacacgcaggaagcccacagaaggctcagctggttcctcactgcccagatgtgtacagctgctcctccctttcataaagcagcgccatgtgtgcagaggccactcttgaagagcagactccctctgtggctgatgggactaattattcccactagccagcggactgaaggcaaagaagacctttctagaacctggtagaaggaagctgtgcagcatgctcctcgtccatgtgtgtcggcagtgctggtgtctgtcgtctccgcgagctgttactggaatgagcccttgtgttcatgggtatcgtcatgcggggttcttgtgttttgtggggcttgggttttggtaacttatttttataagcaataaaccttttgtatcctgga

SEQ ID NO: 5644 - protein, 311 aa, Homo sapiens; identical to SEQ ID NO: 742

SEQ ID NO: 5645 - DNA, 1278 bp, Homo sapiens
gagctgctgtggcggcggcaacatggcggacgtgataaatgtcagtgtgaacctggaggccttttcccaggccattagtgccatccaggcgctgcgctccagcgtgagcagggtgttcgactgcctgaaggatgggatgcggaacaaggagacgctggagggccgggagaaggcctttattgcgcacttccaggacaacttacattcggtcaaccgggacctcaatgagctggaacgtctgagcaatctggtaggcaagccatctgagaaccatcctcttcataacagtgggctgttaagcctggatcctgtgcaggacaaaactcctctctatagtcaactccttcaagcatataagtggtcaaacaagttgcagtaccatgcaggactagcatctggccttttaaatcagcagtcattgaagcgttccgctaatcagatgggagtatctgccaaacgtagaccaaaggctcagcccacaactcttgtcctaccacctcaatatgttgatgatgtgatcagccgcattgacaggatgtttcctgaaatgtccatccacttatccagacccaatggaacatcagcaatgcttctgcttgatatatggtccaaatccaactatcaagtattccagaaggtgacagaccatgccaccactgccctgctccactatcagctgccccagatgccggatgtcgtggtccgatccttcatgacctggttaagaagttacataaagctgttccaggccccgtgccagcgctgcgggaagtttctgcaggacggccttcccccgacatggagggatttccgaaccctcgaagccttccatgacacctgccggcagtagcccccacgctggccccagcctcagaccccacccagcaccttcccagacacgcaggaagcccacagaaggctcagctggttcctcactgcccagatgtgtacagctgctcctccctttcataaagcagcgccatgtgtgcagaggccactcttgaagagcagactccctctgtggctgatgggactaattattcccactagccagcggactgaaggcaaagaagacctttctagaacctggtagaaggaagctgtgcagcatgctcctcgtccatgtgtgtcggcagtgctggtgtctgtcgtctccgcgagctgttactggaatgagcccttgtgttcatgggtatcgtcatgcggggttcttgtgttttgtggggcttgggttttggtaacttatttttataagcaataaaccttttgtatcctgga

SEQ ID NO: 5646 - protein, 275 aa, Homo sapiens
MADVINVSVNLEAFSQAISAIQALRSSVSRVFDCLKDGMRNKETLEGREKAFIAHFQDNLHSVNRDLNELERLSNLVGKPSENHPLHNSGLLSLDPVQDKTPLYSQLLQAYKWSNKLQYHAGLASGLLNQQSLKRSANQMGVSAKRRPKAQPTTLVLPPQYVDDVISRIDRMFPEMSIHLSRPNGTSAMLLLDIWSKSNYQVFQKVTDHATTALLHYQLPQMPDVVVRSFMTWLRSYIKLFQAPCQRCGKFLQDGLPPTWRDFRTLEAFHDTCRQ

SEQ ID NO: 5647 - DNA, 780 bp, Homo sapiens
aagcacccgttgtgaaaaccctccaccctggcaccccacagtgcccactgtgaaactggtaccattcattttgattcatgagaagacagactgtccttctgatttgtatttctttgtttcatggcccagaatcctccgatgcttcaagaggagctgggcaccacagttaagtgaagtttcctaaattttaagtgttggtcatttgtgtttaaaaatgtgaaaacaaaagaaataaaagtgcagccagacaaagcctctctgcctgcacatggctgctgaaaggctgaaatggatggaggtggtctcacccaggggatcccagggactgacgttcctatcgcagggaaggtgtcacacacggagctacggaacagcagggccggagcaaacaaagccagcccagctgcctcggctattccaacaggggctacactggagacattttaaaaataaagggggtgaggggaaagaattctccagaaactttggttcttctgtaatggcaagtataattgcaaaaaacatcttgtcagcctgtaaaatgacactttcacaggttttcttagcaagggagctagatgggcaagaaccaagcgttcaagttcggggaccgttcgagcccagtttgctttgctgtgtttcgtagccattaatgtccccccgccaattaccaccagtcattttgcaaagttatcattactactgtttaaaagaaaaaaaaacattgctcattttagaaagctgtctgtcaaaaatgcttaaaataaaagcagtcttggc

SEQ ID NO: 5648 - protein, 30 aa, Homo sapiens
MRRQTVLLICISLFHGPESSDASRGAGHHS

SEQ ID NO: 5649 - DNA, 2124 bp, Homo sapiens
gttaacagtagttacaatattatttcttgaagtcccgaattctaagaccgatgctgatgatccttctctcctttcccctcagcttgatatatggtccaaatccaactatcaagtattccagaaggtaagttttactttttgcttcttactcaagcggcattaggaaaacgtgaatgctttgaggtttaaacattggtctcaaatcagaggcttttgaaaaagtgaaaaaagccagacagaaaaggatgctcactgtctgattccatatgtatgacattctggaaaaaaacaaaactgtattctgaaaacctagttttaaaactcggtttctcagagccctagcggtctccactggtgcccaagggatgggccaagggaagcaggctggcactccctcaccctgccccttccccactttgtgctctggggacactgtatctttttcagatattgggcttccttatgaaaaactgttatgggaaatgtcagacgaaatgaaaagtgaccagagaaaattcatttccccagctcctgacagtgcagggccccttccctggactaactcaggccctgtggctgatgaggattctgtccccaccgccacacccccaccagtccccacagtactcagggccagctccctgcagggcagcagccggcttcttctgttctcatccatcttctgtctctggtctcatccagtagtgaaataagagagttggccatcatctcattcattccctcatccagctcaacaacaggtgtccactccccagcactttgggaggccaaggtaggcagatcacctgaggtcaggagttcaagaccagcctagccaatatggcaaaaccctgtctgtactaaaaatataaaattagccgggcatggtggcgggcgcctataatcctagctactcaggaggctgaggcagaagaattgcttaaacctgggagacagaggttgcagtgagcccagattgtgccattgcactccagcctgggtgacagatgagactccatctcaaaaaaaaaaaaaaaagtatccactgagcccctttgctctgtgccaggcactgttaggtgccagggccacagaggaaactccaacaggcaaggaagcctaacaaatgactccaggtgattaactgggggctgtggccaggaaacacaagggggcctccttctgattaggctagtcagaggaagcctttgtaggggaaactgaggcaggcagtgtgaggaggaggagccagccccgtgaagtggggatgaagtggaggtagaaggcagggctcaggtcagggaggtgcctctaggccctggtgcagaattcggattttatccttaattcagtgagaaaccactgacgggatttacacagagggggatgtgattttgaaagcttggtccgagttatccccacgatgaagaatggttgtgtccacagtgtgccaggaagcacaggactcttttgtagatcaaggtgaaattcacataacttgaaattaaccgttttaaagtgaatgctccttggcttgatgtgccttcacaatagtgtacatccactacctctgtctggttctaaaacatttccttaccccacaagaaaatctggtgtgcattgagcagtgagcataggacttagtggatcagaggggcgtcatggaccaccctctagaggtgtttactgtacataatccacagtgccccctgggcccctttttggtgataagggctaggcagaggacaggcgtctaggattaggggagtagtctgaggctgaaaaccacacatttagggaacctatataagcattacagattcatgatctgatcacagctaaatgcaatgtgctaccctggattggatcctgaaacagaaagaggttactaatggggccgggtgcggtggctcatgcctgtaatcccagcactttgggaggctcaggtgggtggattacaaggtcaggagttcgagaccagcctggccaacatggtgaaaccctgtctctactaaaaatacacaaatcagccaggcgtggtggcgggcgcctgtaatcccagctacgcgggaggttgcagtgagccactgcactccagcctgggtgacagagcaagactacatc

SEQ ID NO: 5650 - protein, 115 aa, Homo sapiens
MGQGKQAGTPSPCPFPTLCSGDTVSFSDIGLPYEKLLWEMSDEMKSDQRKFISPAPDSAGPLPWTNSGPVADEDSVPTATPPPVPTVLRASSLQGSSRLLLFSSIFCLWSHPVVK

SEQ ID NO: 5651 - DNA, 537 bp, Homo sapiens
tgagctggaacgtctgagcaatctggtaggcaagccatctgagaaccatcctcttcataacagtgggctgttaagcctggatcctgtgcaggacaaaactcctctctatagtcaactccttcaagcatataagtggtcaaacaagaaagagcaactttctattccaagaatattccattggaaagtctgaagacatttcctccctcctgccctcctgaactgttcttattagaatccagttgcttaatgactaagttactgcaaagttcacctctcacatctatctctgaaggtgctcttttctgtttttgcatcatggaactaacagggttggaatcgttttacattgcaacgcagagcctttcctttagggactctgtcctctattaagggtaaactataaggctcaggggagaggcaccatgtccatcttgttccttgctgggagtccccagcaactagcaaggcgcctggtacactgtaatcattcagtgaagattcactgagagaatgaaagaataaatgaatcgaagcgtt

SEQ ID NO: 5652 - protein, 47 aa, Homo sapiens
MTKLLQSSPLTSISEGALFCFCIMELTGLESFYIATQSLSFRDSVLY

SEQ ID NO: 5653 - DNA, 3986 bp, Homo sapiens
cgcagcccggatcagaccgagagataaaagccccgatggtgatcacaagtcagaccccaggtacctggatggattgagagctgagatctcagaaactttctgatctgtccatcagcagtctgagaaacgctggctctgaattttccgtgtcggccttttggaaacaacaagttcctcgctgtttgcaaagcttcagtgctcgggtccctgggacaccccggccaccctcgcctggtagatgtggcatttccatgctgaggccgcgagtcccgcctgaccccgtcgctgcctctccagggcttctctgggccgcgcctctgcagactgcgcagccatgctgcatctgctggcgctcttcctgcactgcctccctctggcctctggggactatgacatctgcaaatcctgggtgaccacagatgagggccccacctgggagttctacgcctgccagcccaaggtgatgcgcctgaaggactacgtcaaggtgaaggtggagccctcaggcatcacatgtggagacccccctgagaggttctgctcccatgagaatccctacctatgcagcaacgagtgtgacgcctccaacccggacctggcccacccgcccaggctcatgttcgacaaggaggaggagggcctggccacctactggcagagcatcacctggagccgctaccccagcccgctggaagccaacatcaccctttcgtggaacaagaccgtggagctgaccgacgacgtggtgatgaccttcgagtacggccggcccacggtcatggtcctggagaagtccctggacaacgggcgcacctggcagccctaccagttctacgccgaggactgcatggaggccttcggtatgtccgcccgccgggcccgcgacatgtcatcctccagcgcgcaccgcgtgctctgcaccgaggagtactcgcgctgggcaggctccaagaaggagaagcacgtgcgcttcgaggtgcgggaccgcttcgccatctttgccggccccgacctgcgcaacatggacaacctctacacgcggctggagagcgccaagggcctcaaggagttcttcaccctcaccgacctgcgcatgcggctgctgcgcccggcgctgggcggcacctatgtgcagcgggagaacctctacaagtacttctacgccatctccaacatcgaggtcatcggcaggtgcaagtgcaacctgcacgccaacctgtgctccatgcgcgagggcagcctgcagtgcgagtgcgagcacaacaccaccggccccgactgcggcaagtgcaagaagaatttccgcacccggtcctggcgggccggctcctacctgccgctgccccatggctctcccaacgcctgtacgtgccatggtctctcctttcagccttgcaaacccctccccctgggaggtcgccatctgctctgcgaggcagcaggagaggactggccaatgtcaaagagccagccgggagcagaccccaaatctcagagatgcttctggggtgcaccgtcaccctccaccagggctctgtggggccccacatcccacccaagttgtccctcccggacccagggggcccctggctgggaagccagtgagccgagagggcgccagaaagaagctggaccctgcagggacgctggtctgcacagccgtcgtaagttgcttctctgtggtgtccccaccccggcaaccccccaaccctctcttgcttttcccatctctcaccaggcatcagcaggtcccagaaagaccccgaccccaaaggccctgtggccactgcggccaccacagccatgacaggggcccctactactcctgtcccctccacgtccactgcctgggcccccatggcgcccagcaccccacagcccacaggtgggtgccagggtacagcgacccctgtcatcccaccctctcctgcttctagcctgggtccctgcctctcttggggtgggagggtcggcagccctgggcagagagcaggggcttggctcttagaatagagacgctagaaccctagagctgggaggccacaggccaaaggggcttgaggacacctgggtcaacctgttcctgagcccagccaggggattcagggatcagttcagcttccaaagtcgtcttcctcctgcccttcaagccattgcttggaagggctcccagaccattgtggccagacggctgcaggaactgagaggaaaggtgctgggggcagcgaggccatcctgacatgcagccaaagactggccttatctcccaatggtgcttctgcctccgtggtccctggagccccgcccacaccctgtccccacctggcccccagggcctctctgtccttagcccctcagcagcacaccggtgggatggatggagcagggttagcccagaaagcaaatgtctctgatcagcagggcaaagggagcctctggagctgagtttggacaccgtgggctgctgggaatgtggaggctgtgtgtgtagtgcaaggccaggccagggccagacgtcctgccccctcaggggtctgccacagacaggcatggaaacctgattctcgctcccctccaacggagggattcacgtgtattcaaggctgggggtgctggagtgggcctctgctctcacctggactcacctggggagtatccctgcactctgtgcagtgcaggtgccaggggtctgaaaggatttatccttcccagagggcaccaggaagacgatgaccaaggggaattcttcctggtcccagccagggaggggtgctccaatagcctgccacaccctgtcccccgccaccctgcagggaggacctggtggggactcctggccccttgggtagtgccctggccctccatctctctgatccaaggagacctgccccactgatccttcccccttggggggtggcatttctaaagggcagagtcccctccatcagctcctgcctcggcctgttgctgggtggacactcaggctccccagacaggggcaaatgctgagagaaagacctcctccttcctaggccatccagagcagctcccctgggggcagcacaccccacctctttctacatccttccttttctgcaggaggcatttacaggaggcaggggctagccaaaagattggaggatttccgggaagcctcctgacccaggaatcctctttggggtggaagacatgggtcactctgagaattctggacttcagacataggttggcccagccacaagggacctgtgctttgctgctgagcctgtggtgggcagacagaagcaaaaacagtggtggtgggtgctgtgcctgtctccaaacaggggtttggctgggaggccagatactctccatatcacatgtgcaagtgcacacatgcacacacacacatgcatgcacacacacaggcatgcacacgcacatgtacacacacacacacacagaggaatccatttgcagagctgcttctgacttggtgccagggcagccgtgggaggctgggcagattgtgcaaagttgggaattaaagaggaaaagtcagaggccagagtgggaaatgcaggggaggtgagggtccccaggaccccctcagtgagcagaaggcacaccctccctctcggcaagacagtgctgctctgcaccctcagccctgtatcaagaagcaggacattaggggaggaggtggctccaatgtgacagccagtggcccctacagcccacatctaggggctcctccctcctcttcagcaactgaagcccctgtccagagcccccattaatgaaaacgatcattgcagtagctgagggtgagttctcctgggctgtgctcgtatcattgtatcatcatatcattgtattctgggctcacagctccgtgagatggaggctgttattttcctagtcccacaggtgaggggatcgaggcttaggaagaagcagctggattttatgatatgtaaattacacctcaatcaagctgtttc

SEQ ID NO: 5654 - protein, 490 aa, Homo sapiens
MLHLLALFLHCLPLASGDYDICKSWVTTDEGPTWEFYACQPKVMRLKDYVKVKVEPSGITCGDPPERFCSHENPYLCSNECDASNPDLAHPPRLMFDKEEEGLATYWQSITWSRYPSPLEANITLSWNKTVELTDDVVMTFEYGRPTVMVLEKSLDNGRTWQPYQFYAEDCMEAFGMSARRARDMSSSSAHRVLCTEEYSRWAGSKKEKHVRFEVRDRFAIFAGPDLRNMDNLYTRLESAKGLKEFFTLTDLRMRLLRPALGGTYVQRENLYKYFYAISNIEVIGRCKCNLHANLCSMREGSLQCECEHNTTGPDCGKCKKNFRTRSWRAGSYLPLPHGSPNACTCHGLSFQPCKPLPLGGRHLLCEAAGEDWPMSKSQPGADPKSQRCFWGAPSPSTRALWGPTSHPSCPSRTQGAPGWEASEPRGRQKEAGPCRDAGLHSRRKLLLCGVPTPATPQPSLAFPISHQASAGPRKTPTPKALWPLRPPQP

SEQ ID NO: 5655 - DNA, 3095 bp, Homo sapiens
cgctcagcccgggcgggcgatgcgggcggcgcgggcggccccctcccccggcccgcgtctccgggacggctgcgggcggcccccccggcggccggagggctccctggccccgatctgacggcggcggcggcggcggccacagcggcgggagcggcgcggggaaggagcagcggctcgcagccctcggcccgcgcccccacccagcgccagcccgaggggggaggcgcagcgccggagggtggcggtcctcggccctcccaggtctccgcgccgggaagccgctccgagccggggctggagggttgttttgccgttgtgttgagcacgtcacccattaagagccctttaaagacctggattgattggaaggacaaaaattaaaagcaatctgatccagcctcatgcaggatccctgcggattttctccttatcccatttccatccactgtcacaatttgagaatctgcctgatttgatcagattcacctccaggggaggtgtgataccagggttaggaggacgtgaagttatgggcaactttctgatctgtccatcagcagtctgagaaacgctggctctgaattttccgtgtcggccttttggaaacaacaagttcctcgctgtttgcaaagcttcagtgctcgggtccctgggacaccccggccaccctcgcctggtagatgtggcatttccatgctgaggccgcgagtcccgcctgaccccgtcgctgcctctccagggcttctctgggccgcgcctctgcagactgcgcagccatgctgcatctgctggcgctcttcctgcactgcctccctctggcctctggggactatgacatctgcaaatcctgggtgaccacagatgagggccccacctgggagttctacgcctgccagcccaaggtgatgcgcctgaaggactacgtcaaggtgaaggtggagccctcaggcatcacatgtggagacccccctgagaggttctgctcccatgagaatccctacctatgcagcaacgagtgtgacgcctccaacccggacctggcccacccgcccaggctcatgttcgacaaggaggaggagggcctggccacctactggcagagcatcacctggagccgctaccccagcccgctggaagccaacatcaccctttcgtggaacaagaccgtggagctgaccgacgacgtggtgatgaccttcgagtacggccggcccacggtcatggtcctggagaagtccctggacaacgggcgcacctggcagccctaccagttctacgccgaggactgcatggaggccttcggtatgtccgcccgccgggcccgcgacatgtcatcctccagcgcgcaccgcgtgctctgcaccgaggagtactcgcgctgggcaggctccaagaaggagaagcacgtgcgcttcgaggtgcgggaccgcttcgccatctttgccggccccgacctgcgcaacatggacaacctctacacgcggctggagagcgccaagggcctcaaggagttcttcaccctcaccgacctgcgcatgcggctgctgcgcccggcgctgggcggcacctatgtgcagcgggagaacctctacaagtacttctacgccatctccaacatcgaggtcatcggcaggtgcaagtgcaacctgcacgccaacctgtgctccatgcgcgagggcagcctgcagtgcgagtgcgagcacaacaccaccggccccgactgcggcaagtgcaagaagaatttccgcacccggtcctggcgggccggctcctacctgccgctgccccatggctctcccaacgcctgtacgtgccatgccccggggccacactgcgaatgctacggtcactccaaccgctgcagctacattgacttcctgaatgtggtgacctgcgtcagctgcaagcacaacacgcgaggtcagcactgccagcactgccggctgggctactaccgcaacggctcggcagagctggatgatgagaacgtctgcattgagtgtaactgcaaccagataggctccgtgcacgaccggtgcaacgagaccggcttctgcgagtgccgcgagggcgcggcgggccccaagtgcgacgactgcctccccacgcactactggcgccagggctgctaccccaacgtgtgcgacgacgaccagctgctgtgccagaacggaggcacctgcctgcagaaccagcgctgcgcctgcccgcgcggctacaccggcgtgcgctgcgagcagccccgctgcgaccccgccgacgatgacggcggtctggactgcgaccgcgcgcccggggccgccccgcgccccgccaccctgctcggctgcctgctgctgctggggctggccgcccgcctgggccgctgagccccgcccggaggacgctccccgcacccggaggccgggggtcccggggtcccggggcggggccggcgtccgaggccgggcggtgagaagggtgcggcccgaggtgctcccaggtgctactcagcagggccccccgcccggcccgcgctcccgcccgcactgccctccccccgcagcaggggcgccttgggactccggtccccgcgcctgcgatttggtttcgtttttcttttgtattatccgccgcccagttccttttttgtctttctctctctctctttttttttttttttttctggcggtgagccagagggtcgggagaaacgctgctcgccccacaccccgtcctgcctcccaccacacttacacacacgggactgtggccgacaccccctggcctgtgccaggctcacgggcggcggcggaccccgacctccagttgcctacaattccagtcgctgacttggtcctgttttctattctttatttttcctgcaacccaccagaccccaggcctcaccggaggcccggtgaccacggaactcaccgtctgggggaggaggagagaaggaaggggtggggggcctggaaacttcgttctgtagagaactatttttgtttgtattcactgtcccctgcaagggggacggggcgggagcactggtcaccgcgggggccgatggtggagaatccgaggagtaaagagtttgctcactgctgcctcca

SEQ ID NO: 5656 - protein, 530 aa, Homo sapiens
MLHLLALFLHCLPLASGDYDICKSWVTTDEGPTWEFYACQPKVMRLKDYVKVKVEPSGITCGDPPERFCSHENPYLCSNECDASNPDLAHPPRLMFDKEEEGLATYWQSITWSRYPSPLEANITLSWNKTVELTDDVVMTFEYGRPTVMVLEKSLDNGRTWQPYQFYAEDCMEAFGMSARRARDMSSSSAHRVLCTEEYSRWAGSKKEKHVRFEVRDRFAIFAGPDLRNMDNLYTRLESAKGLKEFFTLTDLRMRLLRPALGGTYVQRENLYKYFYAISNIEVIGRCKCNLHANLCSMREGSLQCECEHNTTGPDCGKCKKNFRTRSWRAGSYLPLPHGSPNACTCHAPGPHCECYGHSNRCSYIDFLNVVTCVSCKHNTRGQHCQHCRLGYYRNGSAELDDENVCIECNCNQIGSVHDRCNETGFCECREGAAGPKCDDCLPTHYWRQGCYPNVCDDDQLLCQNGGTCLQNQRCACPRGYTGVRCEQPRCDPADDDGGLDCDRAPGAAPRPATLLGCLLLLGLAARLGR

SEQ ID NO: 5657 - DNA, 2702 bp, Homo sapiens
ccagcctcatgcaggatccctgcggattttctccttatcccatttccatccactgtcacaatttgagaatctgcctgatttgatcagattcacctccaggggaggtgtgataccagggttaggaggacgtgaagttatgggcaactttctgatctgtccatcagcagtctgagaaacgctggctctgaattttccgtgtcggccttttggaaacaacaagttcctcgctgtttgcaaagcttcagtgctcgggtccctgggacaccccggccaccctcgcctggtagatgtggcatttccatgctgaggccgcgagtcccgcctgaccccgtcgctgcctctccagggcttctctgggccgcgcctctgcagactgcgcagccatgctgcatctgctggcgctcttcctgcactgcctccctctggcctctggggactatgacatctgcaaatcctgggtgaccacagatgagggccccacctgggagttctacgcctgccagcccaaggtgatgcgcctgaaggactacgtcaaggtgaaggtggagccctcaggcatcacatgtggagacccccctgagaggttctgctcccatgagaatccctacctatgcagcaacgagtgtgacgcctccaacccggacctggcccacccgcccaggctcatgttcgacaaggaggaggagggcctggccacctactggcagagcatcacctggagccgctaccccagcccgctggaagccaacatcaccctttcgtggaacaagaccgtggagctgaccgacgacgtggtgatgaccttcgagtacggccggcccacggtcatggtcctggagaagtccctggacaacgggcgcacctggcagccctaccagttctacgccgaggactgcatggaggccttcggtatgtccgcccgccgggcccgcgacatgtcatcctccagcgcgcaccgcgtgctctgcaccgaggagtactcgcgctgggcaggctccaagaaggagaagcacgtgcgcttcgaggtgcgggaccgcttcgccatctttgccggccccgacctgcgcaacatggacaacctctacacgcggctggagagcgccaagggcctcaaggagttcttcaccctcaccgacctgcgcatgcggctgctgcgcccggcgctgggcggcacctatgtgcagcgggagaacctctacaagtacttctacgccatctccaacatcgaggtcatcggcaggtgcaagtgcaacctgcacgccaacctgtgctccatgcgcgagggcagcctgcagtgcgagtgcgagcacaacaccaccggccccgactgcggcaagtgcaagaagaatttccgcacccggtcctggcgggccggctcctacctgccgctgccccatggctctcccaacgcctgtacgtgccatgccccggggccacactgcgaatgctacggtcactccaaccgctgcagctacattgacttcctgaatgtggtgacctgcgtcagctgcaagcacaacacgcgaggtcagcactgccagcactgccggctgggctactaccgcaacggctcggcagagctggatgatgagaacgtctgcattgagtgtaactgcaaccagataggctccgtgcacgaccggtgcaacgagaccggcttctgcgagtgccgcgagggcgcggcgggccccaagtgcgacgactgcctccccacgcactactggcgccagggctgctaccccaacgtgtgcgacgacgaccagctgctgtgccagaacggaggcacctgcctgcagaaccagcgctgcgcctgcccgcgcggctacaccggcgtgcgctgcgagcagccccgctgcgaccccgccgacgatgacggcggtctggactgcgaccgcgcgcccggggccgccccgcgccccgccaccctgctcggctgcctgctgctgctggggctggccgcccgcctgggccgctgagccccgcccggaggacgctccccgcacccggaggccgggggtcccggggtcccggggcggggccggcgtccgaggccgggcggtgagaagggtgcggcccgaggtgctcccaggtgctactcagcagggccccccgcccggcccgcgctcccgcccgcactgccctccccccgcagcaggggcgccttgggactccggtccccgcgcctgcgatttggtttcgtttttcttttgtattatccgccgcccagttccttttttgtctttctctctctctctttttttttttttttttctggcggtgagccagagggtcgggagaaacgctgctcgccccacaccccgtcctgcctcccaccacacttacacacacgggactgtggccgacaccccctggcctgtgccaggctcacgggcggcggcggaccccgacctccagttgcctacaattccagtcgctgacttggtcctgttttctattctttatttttcctgcaacccaccagaccccaggcctcaccggaggcccggtgaccacggaactcaccgtctgggggaggaggagagaaggaaggggtggggggcctggaaacttcgttctgtagagaactatttttgtttgtattcactgtcccctgcaagggggacggggcgggagcactggtcaccgcgggggccgatggtggagaatccgaggagtaaagagtttgctcactgctgcctcca

SEQ ID NO: 5658 - protein, 530 aa, Homo sapiens; identical to SEQ ID NO: 5656

SEQ ID NO: 5659 - DNA, 2106 bp, Homo sapiens
gagaatccctacctatgcagcaacgagtgtgacgcctccaacccggacctggcccacccgcccaggctcatgttcgacaaggaggaggagggcctggccacctactggcagagcatcacctggagccgctaccccagcccgctggaagccaacatcaccctttcgtggaacaagaccgtggagctgaccgacgacgtggtgatgaccttcgagtacggccggcccacggtcatggtcctggagaagtccctggacaacgggcgcacctggcagccctaccagttctacgccgaggactgcatggaggccttcggtatgtccgcccgccgggcccgcgacatgtcatcctccagcgcgcaccgcgtgctctgcaccgaggagtactcgcgctgggcaggctccaagaaggagaagcacgtgcgcttcgaggtgcgggaccgcttcgccatctttgccggccccgacctgcgcaacatggacaacctctacacgcggctggagagcgccaagggcctcaaggagttcttcaccctcaccgacctgcgcatgcggctgctgcgcccggcgctgggcggcacctatgtgcagcgggagaacctctacaagtacttctacgccatctccaacatcgaggtcatcggcaggtgcaagtgcaacctgcacgccaacctgtgctccatgcgcgagggcagcctgcagtgcgagtgcgagcacaacaccaccggccccgactgcggcaagtgcaagaagaatttccgcacccggtcctggcgggccggctcctacctgccgctgccccatggctctcccaacgcctgtgccactgcaggttcctttggcaactgcgaatgctacggtcactccaaccgctgcagctacattgacttcctgaatgtggtgacctgcgtcagctgcaagcacaacacgcgaggtcagcactgccagcactgccggctgggctactaccgcaacggctcggcagagctggatgatgagaacgtctgcattgagtgtaactgcaaccagataggctccgtgcacgaccggtgcaacgagaccggcttctgcgagtgccgcgagggcgcggcgggccccaagtgcgacgactgcctccccacgcactactggcgccagggctgctaccccaacgtgtgcgacgacgaccagctgctgtgccagaacggaggcacctgcctgcagaaccagcgctgcgcctgcccgcgcggctacaccggcgtgcgctgcgagcagccccgctgcgaccccgccgacgatgacggcggtctggactgcgaccgcgcgcccggggccgccccgcgccccgccaccctgctcggctgcctgctgctgctggggctggccgcccgcctgggccgctgagccccgcccggaggacgctccccgcacccggaggccgggggtcccggggtcccggggcggggccggcgtccgaggccgggcggtgagaagggtgcggcccgaggtgctcccaggtgctactcagcagggccccccgcccggcccgcgctcccgcccgcactgccctccccccgcagcaggggcgccttgggactccggtccccgcgcctgcgatttggtttcgtttttcttttgtattatccgccgcccagttccttttttgtctttctctctctctctttttttttttttttttctggcggtgagccagagggtcgggagaaacgctgctcgccccacaccccgtcctgcctcccaccacacttacacacacgggactgtggccgacaccccctggcctgtgccaggctcacgggcggcggcggaccccgacctccagttgcctacaattccagtcgctgacttggtcctgttttctattctttatttttcctgcaacccaccagaccccaggcctcaccggaggcccggtgaccacggaactcaccgtctgggggaggaggagagaaggaaggggtggggggcctggaaacttcgttctgtagagaactatttttgtttgtattcactgtcccctgcaagggggacggggcgggagcactggtcaccgcgggggccgatggtggagaatccgaggagtaaagagtttgctcactgctgcctcca

SEQ ID NO: 5660 - protein, 436 aa, Homo sapiens
MFDKEEEGLATYWQSITWSRYPSPLEANITLSWNKTVELTDDVVMTFEYGRPTVMVLEKSLDNGRTWQPYQFYAEDCMEAFGMSARRARDMSSSSAHRVLCTEEYSRWAGSKKEKHVRFEVRDRFAIFAGPDLRNMDNLYTRLESAKGLKEFFTLTDLRMRLLRPALGGTYVQRENLYKYFYAISNIEVIGRCKCNLHANLCSMREGSLQCECEHNTTGPDCGKCKKNFRTRSWRAGSYLPLPHGSPNACATAGSFGNCECYGHSNRCSYIDFLNVVTCVSCKHNTRGQHCQHCRLGYYRNGSAELDDENVCIECNCNQIGSVHDRCNETGFCECREGAAGPKCDDCLPTHYWRQGCYPNVCDDDQLLCQNGGTCLQNQRCACPRGYTGVRCEQPRCDPADDDGGLDCDRAPGAAPRPATLLGCLLLLGLAARLGR

SEQ ID NO: 5661 - DNA, 335 bp, Homo sapiens
ccattggtatttctcccacttggccggcccagactgcgaatgctacggtcactccaaccgctgcagctacattgacttcctgaatgtggtgacctgcgtcagctgcaagcacaacacgcgaggtcagcactgccagcactgccggctgggctactaccgcaacggctcggcagagctggatgatgagaacgtctgcattgagtgtaactgcaaccagataggctccgtgcacgaccggtgcaacgagaccggcttctgcgagtgccgcgagggcgcggcgggccccaagtgcgacgactgcctccccacgcactactggcgccagggctgctacc

SEQ ID NO: 5662 - protein, 110 aa, Homo sapiens
HWYFSHLAGPDCECYGHSNRCSYIDFLNVVTCVSCKHNTRGQHCQHCRLGYYRNGSAELDDENVCIECNCNQIGSVHDRCNETGFCECREGAAGPKCDDCLPTHYWRQGC

SEQ ID NO: 5663 - DNA, 1399 bp, Homo sapiens
gcgacccctctagttgcccagagaggggaaggggctgacccaggccacaccagtgccagggcggggaaggtggggctgggacgtgtttgatcccaaggaaggaagccagagtcttctctccaggcctggccaccctgggaagtccccacctgccgtccagccgcgggctcacgtggacccagtgtggggagcatcccctggggagtgtggagatgctccctgcgaggccgggagagtgggggtccgagaagacggcgcccacacgtagccctgaccgcgcgcccgtgcccgtgtccgtccagagtgtaactgcaaccagataggctccgtgcacgaccggtgcaacgagaccggcttctgcgagtgccgcgagggcgcggcgggccccaagtgcgacgactgcctccccacgcactactggcgccagggctgctaccccaacgtgtgcgacgacgaccagctgctgtgccagaacggaggcacctgcctgcagaaccagcgctgcgcctgcccgcgcggctacaccggcgtgcgctgcgagcagccccgctgcgaccccgccgacgatgacggcggtctggactgcgaccgcgcgcccggggccgccccgcgccccgccaccctgctcggctgcctgctgctgctggggctggccgcccgcctgggccgctgagccccgcccggaggacgctccccgcacccggaggccgggggtcccggggtcccggggcggggccggcgtccgaggccgggcggtgagaagggtgcggcccgaggtgctcccaggtgctactcagcagggccccccgcccggcccgcgctcccgcccgcactgccctccccccgcagcaggggcgccttgggactccggtccccgcgcctgcgatttggtttcgtttttcttttgtattatccgccgcccagttccttttttgtctttctctctctctctttttttttttttttttctggcggtgagccagagggtcgggagaaacgctgctcgccccacaccccgtcctgcctcccaccacacttacacacacgggactgtggccgacaccccctggcctgtgccaggctcacgggcggcggcggaccccgacctccagttgcctacaattccagtcgctgacttggtcctgttttctattctttatttttcctgcaacccaccagaccccaggcctcaccggaggcccggtgaccacggaactcaccgtctgggggaggaggagagaaggaaggggtggggggcctggaaacttcgttctgtagagaactatttttgtttgtattcactgtcccctgcaagggggacggggcgggagcactggtcaccgcgggggccgatggtggagaatccgaggagtaaagagtttgctcactgctgcctcca

SEQ ID NO: 5664 - protein, 276 aa, Homo sapiens
MTAVWTATARPGPPRAPPPCSAACCCWGWPPAWAAEPRPEDAPRTRRPGVPGSRGGAGVRGRAVRRVRPEVLPGATQQGPPPGPRSRPHCPPPAAGAPWDSGPRACDLVSFFFCIIRRPVPFLSFSLSLFFFFFLAVSQRVGRNAARPTPRPASHHTYTHGTVADTPWPVPGSRAAADPDLQLPTIPVADLVLFSILYFSCNPPDPRPHRRPGDHGTHRLGEEERRKGWGAWKLRSVENYFCLYSLSPARGTGREHWSPRGPMVENPRSKEFAHCC

SEQ ID NO: 5665 - DNA, 977 bp, Homo sapiens
gggttggttggaaagccaacgtgtgcgacgacgaccagctgctgtgccagaacggaggcacctgcctgcagaaccagcgctgcgcctgcccgcgcggctacaccggcgtgcgctgcgagcagccccgctgcgaccccgccgacgatgacggcggtctggactgcgaccgcgcgcccggggccgccccgcgccccgccaccctgctcggctgcctgctgctgctggggctggccgcccgcctgggccgctgagccccgcccggaggacgctccccgcacccggaggccgggggtcccggggtcccggggcggggccggcgtccgaggccgggcggtgagaagggtgcggcccgaggtgctcccaggtgctactcagcagggccccccgcccggcccgcgctcccgcccgcactgccctccccccgcagcaggggcgccttgggactccggtccccgcgcctgcgatttggtttcgtttttcttttgtattatccgccgcccagttccttttttgtctttctctctctctctttttttttttttttttctggcggtgagccagagggtcgggagaaacgctgctcgccccacaccccgtcctgcctcccaccacacttacacacacgggactgtggccgacaccccctggcctgtgccaggctcacgggcggcggcggaccccgacctccagttgcctacaattccagtcgctgacttggtcctgttttctattctttatttttcctgcaacccaccagaccccaggcctcaccggaggcccggtgaccacggaactcaccgtctgggggaggaggagagaaggaaggggtggggggcctggaaacttcgttctgtagagaactatttttgtttgtattcactgtcccctgcaagggggacggggcgggagcactggtcaccgcgggggccgatggtggagaatccgaggagtaaagagtttgctcactgctgcctcca

SEQ ID NO: 5666 - protein, 276 aa, Homo sapiens; identical to SEQ ID NO: 5664

SEQ ID NO: 5667 - DNA, 2418 bp, Homo sapiens
ttggaaaacatggaaaatgcatccttaacacctgagcctctggtcatcttcagtattttctgtcatttgcaaaagctttcagagggcattgtgtatccgtaataatgtccttgaagtcagagactggaaatgttgatctcttagtcttctatagacaaggaggtcagactggagtgaatgttgtaaaagttgaaatgtatatttgtatagcaaataacaaaatccttttaaaatttaatctagtagaccgcttttctttccccctgtttaaaatgttaatcagttttcaacagaacaaactttatattaccaaaaaaaaaaagatgggaggagggcgggtcctttcaaccattgttagagcaagacagataattatttaacagcctagcttggaataagctgagttagtgctggtgggtcaggtgtctctggctctattaaaaaaagcaaaaacccccccaaaaacctggagtctcctaggggacactttgggcagcacggttatgttaggtaaagtcttgctgacatggtgcatttttagatagagtgcattggcccagggtattatatttctgtgatgagttcatttacctgtttcagtatgcacatagttccctagctaaaattcctaatcttcttgagagagaagaatatggagtgaaagaataattcttgagctatcattcaaatgctcccagcatattgtgagccttgtgtgactggtgaggtacagacatttggttgccaaatgctagattagcgctgggtcagctgtggaagaatcgcctcagcttacagattgtcagacagatctaactattttccaaatatccacgcagtgaactggagtatcctaaacatgagaatgtacagttgacagttgtaaaaactagggatctgtagtgaatgctgtgcagccccatatctcatttgggggtaggaaaatagctgaagattcatgtgcattatttgacatttcctttgtcatctgctttttaagcaaaaaagggttttgtgttagaaattctacttgagcagattataaagagctttaaaaaacaactttcggttgccaaaagtttgagcatttgatttcattacctgtgtctccctcactggtgtccagacggtcaactgaatactcctgaaacccagggagcaggtgacttcctggagtgctttgtccccagagtcagccactgcttcctctgtgggggtggagagtttgtctttggccatgcagtgtgcgacagttcaggacgggtagggatgggtcccattctgtctgggtcaagggctctatcagcttcttccatgtgcctttgggaagaaatctcgttactttaagtttgctttcctgttatcttgatgaagtgcccattttagcagacacttgtagtgctgaccacttagggaatgtacaaactcctaagcttctaaagggaggcatggcaaaaacgttggggtcaggatgtctctcacgctgctcatgttaatactattaacacatgatttgagaaataagttttctctaaaatgcatattttgccgccacacactgaacaatattatttccagtgaagtttgatgcctgttcttacgttgtgttcacctgttggttcaccactcagcagatctgattctgcaagaattaatggtagaactagatcatcctttctaacagacgagcctgtgtcctgtgacggcctttcacagcggaatgcagttgtacctcacattacttttgaaacttcactcgttccagttggtacaagtatttgccaaagccatttcctatgttcaccgtggcccctcctgatgtggctgtcagcgcagcgttgttgaacagggctattctttttacaaggtgtgaagtgtggctcttcgcttcgtctttgccatggcattaaaagaaagttccctgtcttctttcaatattagttatttcaaatgaatatgtgctacttaaaagcttgttttgtttctttgtatataatttgccttggatttattgtgcacagtttgttgagttgtatgtttttgtgaattatcaggagtaaatttgacaagtacatgtgaataacctcctgtaaatgaattttataacaaaaatgtactgaactattttttaaagttgtgcagattagcaattttttgctatagctttgacttttctatgctgtgaattaatagctgcgatttggcaaacagccctgttgtctttgttaaaccctaaattttaagaggaaatggcagaattaaaagcagaaacaagaagatggacatggattagaggttatgtattatgaagtaaactacaaggtactaacatcatttcgtctgccatttggtttgctttatgctgaaattacttggtggggatttgtgcaattcagatataaaaagtttcattatcca

SEQ ID NO: 5668 - protein, 91 aa, Homo sapiens [sequence omitted]

SEQ ID NO: 5669 - DNA, 2691 bp, Homo sapiens
gtgcttgcagggccgcttcggggaaccatcgcggcgcctaggtcccggtgggcggatgggggaagagtcggcgcgggctcggccgcttccctcggtgcgggggcgggagcacccctcgacggctggcggccgcctgttgccttcctgcgcgctggacccggccgctgcgaccccctgtccttccgttgtctacactgcggtctcgtaaatgttcttttggggccagagtctgggcatatatgaatgcaaatccgtgtttgttcacaactaagcccagctgagacgatcacttttctgtaggccatttgtccaggtacagaatgagcacatgttgttggtgtacgccaggtggtgcttccaccattgacttcctaaagcgctatgcttccaacactccgtccggtgaatttcaaacagccgacgaagacctctgctactgcttggagtgtgtggctgagtaccacaaagcaagagatgaattgccattcttgcatgaggttttatgggaattagaaaccttacgtctcataaatcactttgaaaaatccatgaaggcagaaattggagatgatgatgagttatatatagtagacaataatggagagatgccactgtttgacatcactgggcaagactttgaaaataagcttcgagttcctcttcttgaaatactgaaatatccttacttgcttctacatgaacgtgttaacgagttatgtgttgaagcactttgtcggatggaacaagccaattgctcctttcaggtgtttgataaacatccagggatctatttgtttttagtccatcccaatgaaatggttcggcgttgggctatcttgactgcaagaaacttggggaaagtggacagagatgattattatgacttacaagaagttttactttgcctttttaaagtcattgagttggggcttttagagagtccagacatttatacttcttctgtcctagagaagggtaaactgattcttctgccctcacacatgtatgatactaccaactacaaaagctattggttaggtatttgcatgttgctgaccattcttgaggaacaagccatggattccctgttgttgggctcagacaaacaaaatgattttatgcaatcgatacttcacactatggagagggaagcagatgatgatagtgtggatcctttctggccagcgttacactgttttatggtgattctggatcgccttggatctaaggtctggggtcaacttatggatcctattgtggcatttcaaaccattatcaacaacgcaagctacaatagagagatccgacatatacggaacagctctgtaaggaccaagttagaaccggagtcctatttggatgatatggtgacttgcagccagatcgtatacaattataatcctgaaaagaccaaaaaggattctggatggagaacagccatttgcccagattattgtcctaacatgtatgaagaaatggaaacattagccagtgtacttcagtcagatattggtcaagacatgcgtgttcataacagcacatttctatggttcatcccttttgtccagtccctcatggatcttaaggatttgggtgtggcttacatagcacaggttgttaatcatctgtactctgaagtcaaagaagtcctcaaccaaacagatgctgtgtgtgacaaagtcactgaattttttcttctaattttggtatcagtgattgaactgcatagaaataaaaaatgtttgcatttgctgtgggtaagttcccagcaatgggtggaagccgtcgtcaaatgtgccaagcttcctaccactgcgtttacacggagttctgagaaatcatctggaaattgctccaaaggaacagcaatgatatcttcactgtcattgcattccatgccatctaactctgtacaacttgcttatgtgcagctgattagaagtctccttaaagaaggttatcagcttgggcagcagtctctttgcaagcgattctgggataagctcaacttattccttagaggaaatttatctctaggttggcagttgactagtcaggaaacccatgagctacaaagttgcttaaagcaaattattagaaacataaaattcaaagcacctccatgtaacacttttgtggatctgacttctgcatgtaaaatctctcctgcatcttataataaagaagaaattccctgtcttctttcaatattagttatttcaaatgaatatgtgctacttaaaagcttgttttgtttctttgtatataatttgccttggatttattgtgcacagtttgttgagttgtatgtttttgtgaattatcaggagtaaatttgacaagtacatgtgaataacctcctgtaaatgaattttataacaaaaatgtactgaactattttttaaagttgtgcagattagcaattttttgctatagctttgacttttctatgctgtgaattaatagctgcgatttggcaaacagccctgttgtctttgttaaaccctaaattttaagaggaaatggcagaattaaaagcagaaacaagaagatggacatggattagaggttatgtattatgaagtaaactacaaggtactaacatcatttcgtctgccatttggtttgctttatgctgaaattacttggtggggatttgtgcaattcagatataaaaagtttcattatcca

SEQ ID NO: 5670 - protein, 670 aa, Homo sapiens
MSTCCWCTPGGASTIDFLKRYASNTPSGEFQTADEDLCYCLECVAEYHKARDELPFLHEVLWELETLRLINHFEKSMKAEIGDDDELYIVDNNGEMPLFDITGQDFENKLRVPLLEILKYPYLLLHERVNELCVEALCRMEQANCSFQVFDKHPGIYLFLVHPNEMVRRWAILTARNLGKVDRDDYYDLQEVLLCLFKVIELGLLESPDIYTSSVLEKGKLILLPSHMYDTTNYKSYWLGICMLLTILEEQAMDSLLLGSDKQNDFMQSILHTMEREADDDSVDPFWPALHCFMVILDRLGSKVWGQLMDPIVAFQTIINNASYNREIRHIRNSSVRTKLEPESYLDDMVTCSQIVYNYNPEKTKKDSGWRTAICPDYCPNMYEEMETLASVLQSDIGQDMRVHNSTFLWFIPFVQSLMDLKDLGVAYIAQVVNHLYSEVKEVLNQTDAVCDKVTEFFLLILVSVIELHRNKKCLHLLWVSSQQWVEAVVKCAKLPTTAFTRSSEKSSGNCSKGTAMISSLSLHSMPSNSVQLAYVQLIRSLLKEGYQLGQQSLCKRFWDKLNLFLRGNLSLGWQLTSQETHELQSCLKQIIRNIKFKAPPCNTFVDLTSACKISPASYNKEEIPCLLSILVISNEYVLLKSLFCFFVYNLPWIYCAQFVELYVFVNYQE

SEQ ID NO: 5671 - DNA, 8192 bp, Homo sapiens
acttccgctggtggcctagagcggggcccggtatggaggtgggctagaggccgacgccagccagagagcgaaatgttcttttggggccagagtctgggcatatatgaatgcaaatccgtgtttgttcacaactaagcccagctgagacgatcacttttctgtaggccatttgtccaggtacagaatgagcacatgttgttggtgtacgccaggtggtgcttccaccattgacttcctaaagcgctatgcttccaacactccgtccggtgaatttcaaacagccgacgaagacctctgctactgcttggagtgtgtggctgagtaccacaaagcaagagatgaattgccattcttgcatgaggttttatgggaattagaaaccttacgtctcataaatcactttgaaaaatccatgaaggcagaaattggagatgatgatgagttatatatagtagacaataatggagagatgccactgtttgacatcactgggcaagactttgaaaataagcttcgagttcctcttcttgaaatactgaaatatccttacttgcttctacatgaacgtgttaacgagttatgtgttgaagcactttgtcggatggaacaagccaattgctcctttcaggtgtttgataaacatccagggatctatttgtttttagtccatcccaatgaaatggttcggcgttgggctatcttgactgcaagaaacttggggaaagtggacagagatgattattatgacttacaagaagttttactttgcctttttaaagtcattgagttggggcttttagagagtccagacatttatacttcttctgtcctagagaagggtaaactgattcttctgccctcacacatgtatgatactaccaactacaaaagctattggttaggtatttgcatgttgctgaccattcttgaggaacaagccatggattccctgttgttgggctcagacaaacaaaatgattttatgcaatcgatacttcacactatggagagggaagcagatgatgatagtgtggatcctttctggccagcgttacactgttttatggtgattctggatcgccttggatctaaggtctggggtcaacttatggatcctattgtggcatttcaaaccattatcaacaacgcaagctacaatagagagatccgacatatacggaacagctctgtaaggaccaagttagaaccggagtcctatttggatgatatggtgacttgcagccagatcgtatacaattataatcctgaaaagaccaaaaaggattctggatggagaacagccatttgcccagattattgtcctaacatgtatgaagaaatggaaacattagccagtgtacttcagtcagatattggtcaagacatgcgtgttcataacagcacatttctatggttcatcccttttgtccagtccctcatggatcttaaggatttgggtgtggcttacatagcacaggttgttaatcatctgtactctgaagtcaaagaagtcctcaaccaaacagatgctgtgtgtgacaaagtcactgaattttttcttctaattttggtatcagtgattgaactgcatagaaataaaaaatgtttgcatttgctgtgggtaagttcccagcaatgggtggaagccgtcgtcaaatgtgccaagcttcctaccactgcgtttacacggagttctgagaaatcatctggaaattgctccaaaggaacagcaatgatatcttcactgtcattgcattccatgccatctaactctgtacaacttgcttatgtgcagctgattagaagtctccttaaagaaggttatcagcttgggcagcagtctctttgcaagcgattctgggataagctcaacttattccttagaggaaatttatctctaggttggcagttgactagtcaggaaacccatgagctacaaagttgcttaaagcaaattattagaaacataaaattcaaagcacctccatgtaacacttttgtggatctgacttctgcatgtaaaatctctcctgcatcttataataaagaagaaagtgaacaaatggggaagacgtctagaaaagatatgcattgtttggaagcttccagcccaacattttctaaagaaccaatgaaagtgcaagacagtgtattgatcaaagcagataacactatagaaggtgacaataatgagcaaaattatataaaggatgtgaaactagaggaccatctcttagctgggtcatgcttaaagcagagtagtaaaaacatttttactgaaagagctgaagatcaaattaaaataagtacaaggaagcagaagtctgtaaaagagatctcttcatatacaccaaaggactgtacttcaagaaatggtccagaaaggggatgtgacagaggaataatagtatcaacacgtttgttgactgattctagcactgatgctttggaaaaagtgtccacatcgaatgaagatttctctttaaaggatgatgctcttgctaaaacctcaaaacgaaaaactaaggtacagaaagatgaaatctgtgcaaagttatcacatgtaataaagaagcaacacaggaagagtactttggtcgataatactatcaatttagatgaaaatttgactgtatctaacattgagagtttctattcaaggaaagatacaggagttcagaaaggagatggtttcatacacaatctttctttagaccctagtggtgttctggatgataagaatggagaacaaaaatctcaaaacaatgtattgccaaaagagaaacaattaaagaatgaagaattagttattttctctttccatgaaaacaattgtaaaatacaggaatttcatgttgatggtaaagaattgatcccttttacagaaatgaccaatgcttcagagaagaaatcatctccctttaaagatcttatgactgtacctgaatcaagagatgaggagatgagtaatagtaccagtgtgatttattctaacttgacaagagaacaggcccctgacatcagtcctaaatctgacaccttaacggattctcagatagacagagaccttcacaaattatctttactagctcaagccagtgttattacgttcccatccgattcacctcagaactcatcgcagctgcaaaggaaagtaaaagaagataaaagatgtttcacagctaaccaaaataatgttggagatacctcccgtggacaggttattattatttcagattctgatgatgatgatgatgaaagaatcctgagtcttgagaaactcactaaacaggacaaaatatgccttgagagggaacatccagagcagcacgtttcaacagttaatagtaaggaggaaaagaatccagtaaaggaagaaaagacagagactctttttcagtttgaggaatctgattctcagtgttttgagtttgaaagttcatctgaagtgttttcagtttggcaagatcatccagacgataataattcagttcaagatggtgagaaaaaatgtttggctcctatagccaatactacaaatggtcagggttgtacagattatgtatctgaagttgttaaaaaaggagcagagggcattgaagaacacacaagaccacggagtatttctgttgaagaattttgtgaaattgaagtaaaaaagcctaagagaaaacgatctgaaaaaccaatggctgaagatcctgtgaggccttcatcttctgtcagaaatgagggccagtctgatactaataagagagatcttgtgggaaatgattttaaaagtattgatagaaggacttcaactcccaattcacgtattcagagagccactacggtttcacaaaagaagtcttcaaagctttgtacttgtacagaacccatcaggaaagttccagtttctaagacccctaagaaaactcattcagatgccaaaaaaggacagaatagaagttcaaattacctaagttgtagaacaactcctgctatagtgccgccaaagaaatttcgtcagtgtcctgagccaacttcaacagctgagaaacttggcctgaaaaagggtcctcgtaaggcatatgagttgtcccagcggtctttggattatgtagctcaattacgtgatcatggcaaaactgttggagtagttgatacccgaaaaaagactaaattaatttctcctcagaacctgtctgtcagaaataataagaaacttctgactagtcaagaacttcagatgcaaaggcagatcagacccaaatcacaaaaaaatagacgaagactttctgattgtgaaagtacagatgttaaaagagcagggtcacatacagcacagaattctgacatatttgtaccagaatctgataggtcagattataattgtacaggaggaactgaggtacttgccaacagtaacagaaaacagttaataaaatgcatgccttctgaaccagaaaccataaaagcaaaacatgggtctccagcaactgatgatgcttgccctttgaaccagtgtgattctgtagtgttaaatggaacagtaccaacaaatgaagtaattgtctccacttcagaagaccctctgggtggaggtgatccaacagcacgtcatatagagatggcagctttgaaagaaggagagcctgactccagcagtgatgcagaggaagataacttatttttaacccaaaatgatcctgaagatatggatttatgttcacaaatggagaatgacaattataaactcattgaactaattcatggaaaagatacagttgaggttgaagaagattctgtaagtcggcctcagttggaatctttgagtggcacaaagtgtaagtacaaagattgtcttgaaaccacaaaaaaccagggtgaatactgcccaaaacactctgaagtgaaagcagcagatgaagatgtatttcgtaaacctggcttgcctcctcctgcatctaaacctttgagacctaccactaagatttttagctcaaagagtacttcacgaattgctggtctttctaaatctttggaaacttcttcagcactttcaccgtctctaaaaaataagtcaaaggggatacagtcgattttgaaagtaccacagccagttcccctcatagctcagaagccagttggtgaaatgaagaattcgtgcaatgttcttcatcctcagtctccgaataattccaacaggcaaggttgcaaagttccatttggtgaaagcaaatattttccatcttcctctccagtaaacattcttttgtcatcacagtctgtctctgacaccttcgttaaagaggtcttaaaatggaaatatgaaatgtttttgaactttggtcagtgtgggccccctgcaagtctttgtcagtccatctcaagacctgtgcctgtcagatttcacaattatggagattattttaatgtttttttccctttgatggtattgaatacttttgaaacagtggcacaagaatggctcaactctccaaatagagagaatttctatcagttgcaagtacgaaaatttcctgccgattatataaaatactgggagtttgcagtttatctggaagaatgtgaactggctaaacagctttatccaaaggaaaacgatttggtgtttttagctcctgagagaataaatgaagagaagaaagatacagagagaaatgacatacaagatctccacgaatatcattctggttatgttcataaatttcgccgcacgtcagtcatgcgtaatgggaaaactgagtgttacctttccatccagactcaagagaactttccggccaatttaaacgaacttgtgaattgtattgtaatcagttctctggtaactacacaaaggaagttgaaagccatgtctctgttgggtagtcggaaccaactggctagagctgttctgaatccaaaccctatggacttctgtacaaaagatttactgactacaacatctgagagaattattgcgtacttaagagatttcaatgaagatcaaaagaaagcaatagaaactgcatatgctatggtgaaacactcaccatcagttgccaaaatctgcttgattcatggaccacctggaacaggaaaatcaaaaactattgttggcctcctctatcgtctactgacagagaaccagaggaaggggcattcagacgaaaactccaatgccaaaatcaaacaaaaccgtgtcctcgtgtgtgcaccttccaatgcagctgttgatgaactcatgaaaaaaattatccttgaattcaaagaaaaatgtaaagacaagaagaatcctttaggaaactgtggagatataaatttagtacgactgggtccagaaaagtctattaatagtgaggttctaaagttcagtttggacagccaagtaaaccacagaatgaaaaaagagttaccttctcatgttcaggcgatgcataaaagaaaggaatttctagattatcagctggatgagctttcccggcagcgagctctatgccgaggtggacgggaaatacagaggcaagaattagatgaaaacatttccaaagtttctaaggaaaggcaggaacttgcttctaaaattaaagaggttcaaggacgcccacagaaaacacagagtatcatcatcttagagtcccatatcatctgctgcacgttgagcacaagtggtggtttactacttgagtctgctttccgtgggcaagggggtgtccccttcagctgtgtcattgttgatgaggctggacagtcttgtgaaattgagactcttactccactcatccatcgctgcaataagctcatcctagtaggagatcctaagcagctccctccgacagtcatctctatgaaagcacaggagtatggctacgaccagtcaatgatggctcgcttctgcagactgctggaagagaatgtagaacacaacatgatcagcaggctgcccattctacagctcactgttcagtacaggatgcatccagacatatgcctcttcccttctaattatgtttataacagaaacttaaaaacaaatagacagacagaagccattcgatgttcatcagattggccatttcagccataccttgtgtttgatgttggagatggttcagaaagacgggataatgactcatatataaatgttcaagaaataaaactggtgatggaaataattaagcttattaaagacaaaagaaaggatgttagttttcgaaacattggcataataactcattacaaggcccagaagacgatgattcagaaggatttggacaaagagttcgatagaaaaggaccagcagaagtagacactgtggatgcattccagggtcggcagaaggattgtgttattgttacgtgtgtcagagcaaatagcatccaaggttcaattggattcctggcaagtttgcagagattgaatgtcaccatcacacgagccaagtacagcctcttcatcctcggacatttgaggaccctgatggaaaaccagcattggaatcagctgattcaggatgctcagaagcgtggtgccattattaagacctgtgacaaaaactatagacatgatgcagtgaagattctgaaactcaagcctgtgctgcagagaagtctcactcaccctcctaccatagccccagaggggtccagaccccagggtggtttgcccagcagcaagctagacagtggatttgccaagacatctgttgctgcttctctataccacacaccctctgactccaaggaaattactcttactgttacttcaaaggaccctgaaagacctcctgttcatgaccaacttcaggacccacgactgctgaagaggatgggcattgaggtcaaaggaggaatattcctttgggatccacaaccctcgagcccccagcatcctggagcaacacctcctacgggcgagccgggcttccctgtcgttcaccaggacctgagccatatacagcagcccgctgctgtagtggctgctctgagcagccacaaacctcccgtgcggggcgaacctccagctgccagtcccgaggcttccacgtgtcagagcaaatgtgatgacccggaagaggagctctgtcacaggagagaggccagggctttcagtgaaggggagcaggagaagtgtggttccgagacccatcacaccaggaggaactctaggtgggacaagaggacactggagcaggaggacagca

SEQ ID NO: 5672 - protein, 2677 aa, Homo sapiens
MSTCCWCTPGGASTIDFLKRYASNTPSGEFQTADEDLCYCLECVAEYHKARDELPFLHEVLWELETLRLINHFEKSMKAEIGDDDELYIVDNNGEMPLFDITGQDFENKLRVPLLEILKYPYLLLHERVNELCVEALCRMEQANCSFQVFDKHPGIYLFLVHPNEMVRRWAILTARNLGKVDRDDYYDLQEVLLCLFKVIELGLLESPDIYTSSVLEKGKLILLPSHMYDTTNYKSYWLGICMLLTILEEQAMDSLLLGSDKQNDFMQSILHTMEREADDDSVDPFWPALHCFMVILDRLGSKVWGQLMDPIVAFQTIINNASYNREIRHIRNSSVRTKLEPESYLDDMVTCSQIVYNYNPEKTKKDSGWRTAICPDYCPNMYEEMETLASVLQSDIGQDMRVHNSTFLWFIPFVQSLMDLKDLGVAYIAQVVNHLYSEVKEVLNQTDAVCDKVTEFFLLILVSVIELHRNKKCLHLLWVSSQQWVEAVVKCAKLPTTAFTRSSEKSSGNCSKGTAMISSLSLHSMPSNSVQLAYVQLIRSLLKEGYQLGQQSLCKRFWDKLNLFLRGNLSLGWQLTSQETHELQSCLKQIIRNIKFKAPPCNTFVDLTSACKISPASYNKEESEQMGKTSRKDMHCLEASSPTFSKEPMKVQDSVLIKADNTIEGDNNEQNYIKDVKLEDHLLAGSCLKQSSKNIFTERAEDQIKISTRKQKSVKEISSYTPKDCTSRNGPERGCDRGIIVSTRLLTDSSTDALEKVSTSNEDFSLKDDALAKTSKRKTKVQKDEICAKLSHVIKKQHRKSTLVDNTINLDENLTVSNIESFYSRKDTGVQKGDGFIHNLSLDPSGVLDDKNGEQKSQNNVLPKEKQLKNEELVIFSFHENNCKIQEFHVDGKELIPFTEMTNASEKKSSPFKDLMTVPESRDEEMSNSTSVIYSNLTREQAPDISPKSDTLTDSQIDRDLHKLSLLAQASVITFPSDSPQNSSQLQRKVKEDKRCFTANQNNVGDTSRGQVIIISDSDDDDDERILSLEKLTKQDKICLEREHPEQHVSTVNSKEEKNPVKEEKTETLFQFEESDSQCFEFESSSEVFSVWQDHPDDNNSVQDGEKKCLAPIANTTNGQGCTDYVSEVVKKGAEGIEEHTRPRSISVEEFCEIEVKKPKRKRSEKPMAEDPVRPSSSVRNEGQSDTNKRDLVGNDFKSIDRRTSTPNSRIQRATTVSQKKSSKLCTCTEPIRKVPVSKTPKKTHSDAKKGQNRSSNYLSCRTTPAIVPPKKFRQCPEPTSTAEKLGLKKGPRKAYELSQRSLDYVAQLRDHGKTVGVVDTRKKTKLISPQNLSVRNNKKLLTSQELQMQRQIRPKSQKNRRRLSDCESTDVKRAGSHTAQNSDIFVPESDRSDYNCTGGTEVLANSNRKQLIKCMPSEPETIKAKHGSPATDDACPLNQCDSVVLNGTVPTNEVIVSTSEDPLGGGDPTARHIEMAALKEGEPDSSSDAEEDNLFLTQNDPEDMDLCSQMENDNYKLIELIHGKDTVEVEEDSVSRPQLESLSGTKCKYKDCLETTKNQGEYCPKHSEVKAADEDVFRKPGLPPPASKPLRPTTKIFSSKSTSRIAGLSKSLETSSALSPSLKNKSKGIQSILKVPQPVPLIAQKPVGEMKNSCNVLHPQSPNNSNRQGCKVPFGESKYFPSSSPVNILLSSQSVSDTFVKEVLKWKYEMFLNFGQCGPPASLCQSISRPVPVRFHNYGDYFNVFFPLMVLNTFETVAQEWLNSPNRENFYQLQVRKFPADYIKYWEFAVYLEECELAKQLYPKENDLVFLAPERINEEKKDTERNDIQDLHEYHSGYVHKFRRTSVMRNGKTECYLSIQTQENFPANLNELVNCIVISSLVTTQRKLKAMSLLGSRNQLARAVLNPNPMDFCTKDLLTTTSERIIAYLRDFNEDQKKAIETAYAMVKHSPSVAKICLIHGPPGTGKSKTIVGLLYRLLTENQRKGHSDENSNAKIKQNRVLVCAPSNAAVDELMKKIILEFKEKCKDKKNPLGNCGDINLVRLGPEKSINSEVLKFSLDSQVNHRMKKELPSHVQAMHKRKEFLDYQLDELSRQRALCRGGREIQRQELDENISKVSKERQELASKIKEVQGRPQKTQSIIILESHIICCTLSTSGGLLLESAFRGQGGVPFSCVIVDEAGQSCEIETLTPLIHRCNKLILVGDPKQLPPTVISMKAQEYGYDQSMMARFCRLLEENVEHNMISRLPILQLTVQYRMHPDICLFPSNYVYNRNLKTNRQTEAIRCSSDWPFQPYLVFDVGDGSERRDNDSYINVQEIKLVMEIIKLIKDKRKDVSFRNIGIITHYKAQKTMIQKDLDKEFDRKGPAEVDTVDAFQGRQKDCVIVTCVRANSIQGSIGFLASLQRLNVTITRAKYSLFILGHLRTLMENQHWNQLIQDAQKRGAIIKTCDKNYRHDAVKILKLKPVLQRSLTHPPTIAPEGSRPQGGLPSSKLDSGFAKTSVAASLYHTPSDSKEITLTVTSKDPERPPVHDQLQDPRLLKRMGIEVKGGIFLWDPQPSSPQHPGATPPTGEPGFPVVHQDLSHIQQPAAVVAALSSHKPPVRGEPPAASPEASTCQSKCDDPEEELCHRREARAFSEGEQEKCGSETHHTRRNSRWDKRTLEQEDSSSKKRKLL

SEQ ID NO: 5673 - DNA, 2333 bp, Homo sapiens
ttggaaaacatggaaaatgcatccttaacacctgagcctctggtcatcttcagtattttctgtcatttgcaaaagctttcagagggcattgtgtatccgtaataatgtccttgaagtcagagactggaaatgttgatctcttagtcttctatagacaaggaggtcagactggagtgaatgttgtaaaagttgaaatgtatatttgtatagcaaataacaaaatccttttaaaatttaatctagtagaccgcttttctttccccctgtttaaaatgttaatcagttttcaacagaacaaactttatattaccaaaaaaaaaaagatgggaggagggcgggtcctttcaaccattgttagagcaagacagataattatttaacagcctagcttggaataagctgagttagtgctggtgggtcaggtgtctctggctctattaaaaaaagcaaaaacccccccaaaaacctggagtctcctaggggacactttgggcagcacggttatgttaggtaaagtcttgctgacatggtgcatttttagatagagtgcattggcccagggtattatatttctgtgatgagttcatttacctgtttcagtatgcacatagttccctagctaaaattcctaatcttcttgagagagaagaatatggagtgaaagaataattcttgagctatcattcaaatgctcccagcatattgtgagccttgtgtgactggtgaggtacagacatttggttgccaaatgctagattagcgctgggtcagctgtggaagaatcgcctcagcttacagattgtcagacagatctaactattttccaaatatccacgcagtgaactggagtatcctaaacatgagaatgtacagttgacagttgtaaaaactagggatctgtagtgaatgctgtgcagccccatatctcatttgggggtaggaaaatagctgaagattcatgtgcattatttgacatttcctttgtcatctgctttttaagcaaaaaagggttttgtgttagaaattctacttgagcagattataaagagctttaaaaaacaactttcggttgccaaaagtttgagcatttgatttcattacctgtgtctccctcactggtgtccagacggtcaactgaatactcctgaaacccagggagcaggtgacttcctggagtgctttgtccccagagtcagccactgcttcctctgtgggggtggagagtttgtctttggccatgcagtgtgcgacagttcaggacgggtagggatgggtcccattctgtctgggtcaagggctctatcagcttcttccatgtgcctttgggaagaaatctcgttactttaagtttgctttcctgttatcttgatgaagtgcccattttagcagacacttgtagtgctgaccacttagggaatgtacaaactcctaagcttctaaagggaggcatggcaaaaacgttggggtcaggatgtctctcacgctgctcatgttaatactattaacacatgatttgagaaataagttttctctaaaatgcatattttgccgccacacactgaacaatattatttccagtgaagtttgatgcctgttcttacgttgtgttcacctgttggttcaccactcagcagatctgattctgcaagaattaatggtagaactagatcatcctttctaacagacgagcctgtgtcctgtgacggcctttcacagcggaatgcagttgtacctcacattacttttgaaacttcactcgttccagttggtacaagtatttgccaaagccatttcctatgttcaccgtggcccctcctgatgtggctgtcagcgcagcgttgttgaacagggctattctttttacaaggtgtgaagtgtggctcttcgcttcgtctttgccatggcattaaaagaaagttccctgtcttctttcaatattagttatttcaaatgaatatgtgctacttaaaagcttgttttgtttctttgtatataatttgccttggatttattgtgcacagtttgttgagttgtatgtttttgtgaattatcaggagtaaatttgacaagtacatgtgaataacctcctgtaaatgaattttataacaaaaatgtactgaactattttttaaagttgtgcagattagcaattttttgctatagctttgacttttctatgctgtgaattaatagctgcgatttggcaaacagccctgttgtctttgttaaaccctaaattttaagaggaaatggcagaattaaaagcagaaacaagaagatggacatggattagaggttatgtattatgaagtaaactacaaggtactaacatc

SEQ ID NO: 5674 - protein, 91 aa, Homo sapiens [sequence omitted]

SEQ ID NO: 5675 - DNA, 2606 bp, Homo sapiens
gtgcttgcagggccgcttcggggaaccatcgcggcgcctaggtcccggtgggcggatgggggaagagtcggcgcgggctcggccgcttccctcggtgcgggggcgggagcacccctcgacggctggcggccgcctgttgccttcctgcgcgctggacccggccgctgcgaccccctgtccttccgttgtctacactgcggtctcgtaaatgttcttttggggccagagtctgggcatatatgaatgcaaatccgtgtttgttcacaactaagcccagctgagacgatcacttttctgtaggccatttgtccaggtacagaatgagcacatgttgttggtgtacgccaggtggtgcttccaccattgacttcctaaagcgctatgcttccaacactccgtccggtgaatttcaaacagccgacgaagacctctgctactgcttggagtgtgtggctgagtaccacaaagcaagagatgaattgccattcttgcatgaggttttatgggaattagaaaccttacgtctcataaatcactttgaaaaatccatgaaggcagaaattggagatgatgatgagttatatatagtagacaataatggagagatgccactgtttgacatcactgggcaagactttgaaaataagcttcgagttcctcttcttgaaatactgaaatatccttacttgcttctacatgaacgtgttaacgagttatgtgttgaagcactttgtcggatggaacaagccaattgctcctttcaggtgtttgataaacatccagggatctatttgtttttagtccatcccaatgaaatggttcggcgttgggctatcttgactgcaagaaacttggggaaagtggacagagatgattattatgacttacaagaagttttactttgcctttttaaagtcattgagttggggcttttagagagtccagacatttatacttcttctgtcctagagaagggtaaactgattcttctgccctcacacatgtatgatactaccaactacaaaagctattggttaggtatttgcatgttgctgaccattcttgaggaacaagccatggattccctgttgttgggctcagacaaacaaaatgattttatgcaatcgatacttcacactatggagagggaagcagatgatgatagtgtggatcctttctggccagcgttacactgttttatggtgattctggatcgccttggatctaaggtctggggtcaacttatggatcctattgtggcatttcaaaccattatcaacaacgcaagctacaatagagagatccgacatatacggaacagctctgtaaggaccaagttagaaccggagtcctatttggatgatatggtgacttgcagccagatcgtatacaattataatcctgaaaagaccaaaaaggattctggatggagaacagccatttgcccagattattgtcctaacatgtatgaagaaatggaaacattagccagtgtacttcagtcagatattggtcaagacatgcgtgttcataacagcacatttctatggttcatcccttttgtccagtccctcatggatcttaaggatttgggtgtggcttacatagcacaggttgttaatcatctgtactctgaagtcaaagaagtcctcaaccaaacagatgctgtgtgtgacaaagtcactgaattttttcttctaattttggtatcagtgattgaactgcatagaaataaaaaatgtttgcatttgctgtgggtaagttcccagcaatgggtggaagccgtcgtcaaatgtgccaagcttcctaccactgcgtttacacggagttctgagaaatcatctggaaattgctccaaaggaacagcaatgatatcttcactgtcattgcattccatgccatctaactctgtacaacttgcttatgtgcagctgattagaagtctccttaaagaaggttatcagcttgggcagcagtctctttgcaagcgattctgggataagctcaacttattccttagaggaaatttatctctaggttggcagttgactagtcaggaaacccatgagctacaaagttgcttaaagcaaattattagaaacataaaattcaaagcacctccatgtaacacttttgtggatctgacttctgcatgtaaaatctctcctgcatcttataataaagaagaaattccctgtcttctttcaatattagttatttcaaatgaatatgtgctacttaaaagcttgttttgtttctttgtatataatttgccttggatttattgtgcacagtttgttgagttgtatgtttttgtgaattatcaggagtaaatttgacaagtacatgtgaataacctcctgtaaatgaattttataacaaaaatgtactgaactattttttaaagttgtgcagattagcaattttttgctatagctttgacttttctatgctgtgaattaatagctgcgatttggcaaacagccctgttgtctttgttaaaccctaaattttaagaggaaatggcagaattaaaagcagaaacaagaagatggacatggattagaggttatgtattatgaagtaaactacaaggtactaacatc

SEQ ID NO: 5676 - protein, 670 aa, Homo sapiens; identical to SEQ ID NO: 5670

SEQ ID NO: 5677 - DNA, 8192 bp, Homo sapiens; identical to SEQ ID NO: 5671

SEQ ID NO: 5678 - protein, 2677 aa, Homo sapiens; identical to SEQ ID NO: 5672

SEQ ID NO: 5679 - DNA, 250 bp, Homo sapiens
agattctgaaactcaagcctgtgctgcagagaagtctcactcaccctcctaccatagccccagaggggtccagaccccagggtggtttgcccagcagcaagctagacagtggatttgccaagacatctccctgttgtctttgttaaaccctaaattttaagaggaaatggcagaattaaaagcagaaacaagaagatggacatggattagaggttatgtattatgaagtaaactacaaggtactaacatc

SEQ ID NO: 5680 - protein, 52 aa, Homo sapiens [sequence omitted]

SEQ ID NO: 5681 - DNA, 8192 bp, Homo sapiens; identical to SEQ ID NO: 5671

SEQ ID NO: 5682 - protein, 2677 aa, Homo sapiens; identical to SEQ ID NO: 5672

SEQ ID NO: 5683 - DNA, 682 bp, Homo sapiens
ggaatcagctgattcaggatgctcagaagcgtggtgccattattaagacctgtgacaaaaactatagacatgatgcagtgaagattctgaaactcaagcctgtgctgcagagaagtctcactcaccctccagctgccagtcccgaggcttccacgtgtcagagcaaatgtgatgacccggaagaggagctctgtcacaggagagaggccagggctttcagtgaaggggagcaggagaagtgtggttccgagacccatcacaccaggaggaactctaggtgggacaagaggacactggagcaggaggacagcagttccaagaaaagaaagcttttataggaaagcccagtgacatgggccagcagccacagcatattgtaaactgaagatgaccagctcgtgggaccatctagataagcttgttttttgtaaggagtttgtgtgctgttggaaaacatggaaaatgcatccttaacacctgagcctctggtcatcttcagtattttctgtcatttgcaaaagctttcagagggcattgtgtatccgtaataatgtccttgaagtcagagactggaaatgttgatctcttagtcttctatagacaaggaggtcagactggagtgaatgttgtaaaagttgaaatgtatatttgtatagcaaataacaaaatccttttaaaattt

SEQ ID NO: 5684 - protein, 59 aa, Homo sapiens
MTRKRSSVTGERPGLSVKGSRRSVVPRPITPGGTLGGTRGHWSRRTAVPRKESFYRKAQ

SEQ ID NO: 5685 - DNA, 8192 bp, Homo sapiens; identical to SEQ ID NO: 5671

SEQ ID NO: 5686 - protein, 2677 aa, Homo sapiens; identical to SEQ ID NO: 5672

SEQ ID NO: 5687 - DNA, 2236 bp, Homo sapiens
atcctagcattatatctacagagcagaggcaggacctttggcaggagacacatcccttctcctgtgatgtgtcagttagtgtagagaagcaagctggcatggacttgagagccggggtgatgtctccagcggcagcgtgtcatcctggaggacattgtgtcagcagtgaagccctgcatccctgccagtcatcctgaaggacattgtgtcagtagtgaagccctgcgtccctgccagtccaggctttcttccttgtccttgccccgcctggtgaagctgacagacagagatgaaagcatggaaataaaaaagcaaattacagggatgagaagattgctgaacgacagcactgggcggatctatcagcgagttggcaaagaaggagagaaactaaaagaagagccccaggacctggatttagtctggcctccacgtttgaactcctctgctgaggccccgcaaagcctccacccgtcttcacgtggtgtgtggaatgagctaccgccccagagtggacagttctcagggcagtatggcacccgttctagaaccttccaaagccagccccaccctaccacgagctccaatggagaacttccagtggtgaattcatcagctggatcaaactgctgtacttgtaactgccagtcaacgttgcaggccattctacaagaactcaagaccatgaggaaattaatgcaaattcaagcagttggaactcaaaacagacaacaacctccaatttcccttatatgctcccagcgaactgctgtctcacgaaagagaaataaaaagaaaaaagtgcccccaaagactgtggaacctcttactgtgaaacagaagcccagtgggtcagagatggagaaaaagtcggtggtggcctctgagctatctgctctccaggcagccgagcacacctccccggaggagagccgcgttctaggattcggcattgttctggaatcaccttcctcagatccagaagtacaacttgctgaaggctttgacgtgtttatgcctaaatctcagctggactctatattgtcaaactacactcgctcaggaagccttctgtttagaaaactggtgtgtgcgttttttgatgacaagactttggctaactccttacccaatgggaagaggaaaagaggactcaatgacaaccggaaaggactagaccaaaatattgtgggtgcaataaaagtcttcacagaaaagtactgtacagctaaccatgtggataagcttcctggcccaagagattgggtacagattctacaggatcaaattaaactggccagaagaaggttaaaaagaggctcagagatcgcggacagtgatgaaagactggacggcattgctctaccaccaacaggtgcttgtggtgggccctgcactgttctgccgggtgggagtgcagcggtgaccctagtcttgcagagctcacctcagacaatgtcacaagaaaagggacagatggcagaaccctgggaggagcagcatctcgtgctcctgaacaaccttaccagagacagagctgaaacaggagctttgtcccaaaccagccaagacttcaagcaccattcattcctcataactcaggtctcagctacacttcatcatcagagagggattcgcaactttcccacgccaggctcagccaagtctcttacccttcacatctcttgcctctctctctgaaattatcttgcttatttatgtgtgtgtgtatcacccatctttccactggaatctgagccttgtgatgtcaggctgttaagatttcaggccctggtgaaaacatgttcaggatgccctctctcccctttgcccagcaagagtggactgattaaagttggacctgaggtttccatgaatatgcaaccgagtcattctgacgacagtgagtcctggcctcccagtgctgccagttaccagaagtgactccccttctcccatcagcccaaacccagagcctttatcacagaacccaagattgagaggagggtcaggctggttggacagtggccttatcatgggatggatggatcaggagccttttacagcgctctcctttccgctgtatcccattgtcttagatcacgtggacttgccttttcccctaataccgccccctcagtgctcttctataattggagaaattgtgtcaatagatcgaccaaagagatgcaggttgtactccatgagaatttaataaacgctagcgattcaaagc

SEQ ID NO: 5688 - protein, 467 aa, Homo sapiens
MEIKKQITGMRRLLNDSTGRIYQRVGKEGEKLKEEPQDLDLVWPPRLNSSAEAPQSLHPSSRGVWNELPPQSGQFSGQYGTRSRTFQSQPHPTTSSNGELPVVNSSAGSNCCTCNCQSTLQAILQELKTMRKLMQIQAVGTQNRQQPPISLICSQRTAVSRKRNKKKKVPPKTVEPLTVKQKPSGSEMEKKSVVASELSALQAAEHTSPEESRVLGFGIVLESPSSDPEVQLAEGFDVFMPKSQLDSILSNYTRSGSLLFRKLVCAFFDDKTLANSLPNGKRKRGLNDNRKGLDQNIVGAIKVFTEKYCTANHVDKLPGPRDWVQILQDQIKLARRRLKRGSEIADSDERLDGIALPPTGACGGPCTVLPGGSAAVTLVLQSSPQTMSQEKGQMAEPWEEQHLVLLNNLTRDRAETGALSQTSQDFKHHSFLITQVSATLHHQRGIRNFPTPGSAKSLTLHISCLSL

SEQ ID NO: 5689 - DNA, 1608 bp, Homo sapiens
ggacctttggcaggagacacatcccttctcctgtgatgtgtcagttagtgtagagaagcaagctggcatggacttgagagccggggagatgaaagcatggaaataaaaaagcaaattacagggatgagaagattgctgaacgacagcactgggcggatctatcagcgagttggcaaagaaggagagaaactaaaagaagagccccaggacctggatttagtctggcctccacgtttgaactcctctgctgaggccccgcaaagcctccacccgtcttcacgtggtgtgtggaatgagctaccgccccagagtggacagttctcagggcagtatggcacccgttctagaaccttccaaagccagccccaccctaccacgagctccaatggtatggttgtcaacaaacattcagaaggctctcatgggggagaacttccagtggtgaattcatcagctggatcaaactgctgtacttgtaactgccagtcaacgttgcaggccattctacaagaactcaagaccatgaggaaattaatgcaaattcaagcagttggaactcaaaacagacaacaacctccaatttcccttatatgctcccagcgaactgctgtctcacgaaagagaaataaaaagaaaaaagtgcccccaaagactgtggaacctcttactgtgaaacagaagcccagtgggtcagagatggagaaaaagtcggtggtggcctctgagctatctgctctccaggcagccgagcacacctccccggaggagagccgcgttctaggattcggcattgttctggaatcaccttcctcagatccagaagtacaacttgctgaaggctttgacgtgtttatgcctaaatctcagctggactctatattgtcaaactacactcgctcaggaagccttctgtttagaaaactggtgtgtgcgttttttgatgacaagactttggctaactccttacccaatgggaagaggaaaagaggactcaatgacaaccggaaaggactagaccaaaatattgtgggtgcaataaaagtcttcacagaaaagtactgtacagctaaccatgtggataagcttcctggcccaagagattgggtacagattctacaggatcaaattaaactggccagaagaaggttaaaaagaggctcagagatcgcggacagtgatgaaagactggacggcattgctctaccaccaacagtggtctgatgaaggactgcaaaccacagctcttgtgttttttgcaccatgggttttaaaatccgtcctctgcctcccacaaggagctactacccaagggaagggagaagattaattggtgacctttcgccgtgttaaaataggatgagtatgttgctggtcaaggcagaaacgctaacttccaactgtggtctgttaagagatctgctgggaaccttcagaagcactgccttccaaggcggggccacagcttggggtgttcagcacttgaggacgggtggagcttgttcaacccaaagatgtgtgcgatgaacggatctacacactggaaatacgtatcaaaactgcaacagcaaaatcatattttgtaaattaaaattgtgtttacttactgtg

SEQ ID NO: 5690 - protein, 374 aa, Homo sapiens
MEIKKQITGMRRLLNDSTGRIYQRVGKEGEKLKEEPQDLDLVWPPRLNSSAEAPQSLHPSSRGVWNELPPQSGQFSGQYGTRSRTFQSQPHPTTSSNGMVVNKHSEGSHGGELPVVNSSAGSNCCTCNCQSTLQAILQELKTMRKLMQIQAVGTQNRQQPPISLICSQRTAVSRKRNKKKKVPPKTVEPLTVKQKPSGSEMEKKSVVASELSALQAAEHTSPEESRVLGFGIVLESPSSDPEVQLAEGFDVFMPKSQLDSILSNYTRSGSLLFRKLVCAFFDDKTLANSLPNGKRKRGLNDNRKGLDQNIVGAIKVFTEKYCTANHVDKLPGPRDWVQILQDQIKLARRRLKRGSEIADSDERLDGIALPPTVV

SEQ ID NO: 5691 - DNA, 380 bp, Homo sapiens
ttgttgaagggtttgctttattgaacggaagaaacagttctccctctcccctccacgctaggtataaccagccttccggatgtgccgcctttggtatcacccaagatctcgggatgggtacccatccctgcctccactgcctggtttgctggttaccctgctctttggttctgtttctccatgtgtgtttctgcaagctgcctcaatgtcccccttcctcggcagttgtcctactctgtgtcccttggtcccggcggctccgccgcggtgacacgagcccgcgccgccgctgccgctgccgccgctgccgctgccgccgctgccgccgcctcctcagcccccgccgccgccttccccgcaccatggagttctccgagagg

SEQ ID NO: 5692 - protein, 88 aa, Homo sapiens
MGTHPCLHCLVCWLPCSLVLFLHVCFCKLPQCPPSSAVVLLCVPWSRRLRRGDTSPRRRCRCRRCRCRRCRRLLSPRRRLPRTMEFSE

SEQ ID NO: 5693 - DNA, 1357 bp, Homo sapiens
ctctctcatcccagcttccgccggaagcggctcctgtcagttgttctcaggtgtttgggcttgttgttccgtatactcagtgggttcgcggccgccggcccagtgaggctgggttcgaggagctggagcgggaaactggagcttaaattctggcggcgagatggacattctgaaatcagagatccttcggaagcggcagctggtggaggacaggaacctgctggtggaaaataaaaaatatttcaagcgtagtgagctcgccaaaaaagaagaggaagcatattttgaaagatgtggctacaagatacagccaaaagaggaggaccagaaaccattaacttcatcgaatccagtgttagaacttgaactggcagaggaaaaattacctatgacgctttctaggcaagaggtcatcagaagattgagagaaagaggagaaccaatcagactatttggagagactgattatgatgcttttcaacgtttaaggaaaatagagatcctcacaccagaagttaacaagggattgaggaatgatttgaaagcagccttggataagattgatcagcagtacctcaatgaaatcgtcggcggtcaggagcctggagaggaagacacacagaatgatctgaaagttcatgaggaaaacaccacaattgaagagttagaggcgcttggagagtccttagggaaaggcgatgatcataaagacatggacatcatcaccaaattcctgaagtttcttcttggcgtttgggctaaagaattgaatgccagagaagattatgtgaaacgcagtgtgcagggtaaactgaacagtgcgacccagaaacagaccgagtcctacctaagaccactttttagaaagctacggaaaaggaatcttcctgctgatattaaagaatcaataacggatattattaaattcatgttgcagagagaatacgtgaaggcaaatgatgcttatcttcagatggccattggaaatgcgccttggcccatcggtgtcactatggttggtatccatgccagaactggcagagaaaagattttttccaagcatgttgcacatgttttaaatgacgaaactcagcggaaatatattcagggattgaagaggttaatgaccatttgccagaaacactttcctacagacccatccaaatgtgtggagtacaatgcactgtgagatctgtgtatggtgtgttaataacaataagaaacttagggaagcaggctgtggacttctggaattaccaacaggaatgaggaaagaagaaaactggagtttccagtctctgagttctacctgatgtaactcttgattggttttaagaactttgttggccttcatttc

SEQ ID NO: 5694 - protein, 342 aa, Homo sapiens; identical to SEQ ID NO: 750

SEQ ID NO: 5695 - DNA, 1579 bp, Homo sapiens
ctctctcatcccagcttccgccggaagcggctcctgtcagttgttctcaggtgtttgggcttgttgttccgtatactcagtgggttcgcggccgccggcccagtgaggctgggttcgaggagctggagcgggaaactggagcttaaattctggcggcgagatggacattctgaaatcagagatccttcggaagcggcagctggtggaggacaggaacctgctggtggaaaataaaaaatatttcaagcgtagtgagctcgccaaaaaagaagaggaagcatattttgaaagatgtggctacaagatacagccaaaagaggaggaccagaaaccattaacttcatcgaatccagtgttagaacttgaactggcagaggaaaaattacctatgacgctttctaggcaagaggtcatcagaagattgagagaaagaggagaaccaatcagactatttggagagactgattatgatgcttttcaacgtttaaggaaaatagagatcctcacaccagaagttaacaagggattgaggaatgatttgaaagcagccttggataagattgatcagcagtacctcaatgaaatcgtcggcggtcaggagcctggagaggaagacacacagaatgatctgaaagttcatgaggaaaacaccacaattgaagagttagaggcgcttggagagtccttagggaaaggcgatgatcataaagacatggacatcatcaccaaattcctgaagtttcttcttggcgtttgggctaaagaattgaatgccagagaagattatgtgaaacgcagtgtgcagggtaaactgaacagtgcgacccagaaacagaccgagtcctacctaagaccactttttagaaagctacggaaaaggaatcttcctgctgatattaaagaatcaataacggatattattaaattcatgttgcagagagaatacgtgaaggcaaatgatgcttatcttcagatggccattggaaatgcgccttggcccatcggtgtcactatggttggtatccatgccagaactggcagagaaaagattttttccaagcatgttgcacatgttttaaatgacgaaactcagcggaaatatattcagggattgaagaggttaatgaccatttgccagaaacactttcctacagacccatccaaatgtgtggagtacaatgcactgtgagatctgtgtatggtgtgttaataacaataagaaacttagggaagcaggctgtggacttctggaattaccaacaggaatgaggaaagaagaaaactggagtttccagtctctgagttctacctgatgtaactcttgattggttttaagaactttgttggccttcatttcatatctgactgcaagctgatttttctttcttgctttcattttaattagtccaaaattaagttttaaagatttttcctcacaatttaaatccatagacaacagaagggggtttaaaatgacctttttttcagttgacccgaaagttgtggttagatgattaaaaagaaacatttgaggatggacttaattatttcagtaaaatattataatttgcctattgtc

SEQ ID NO: 5696 - protein, 342 aa, Homo sapiens; identical to SEQ ID NO: 750

SEQ ID NO: 5697 - DNA, 1476 bp, Homo sapiens
ctgtcagttgttctcaggtgtttgggcttgttgttccgtatactcagtgggttcgcggccgccggcccagtgaggctgggttcgaggagctggagcgggaaactggagcttaaattctggcggcgagatggacattctgaaatcagagatccttcggaagcggcagctggtggaggacaggaacctgctgagagaatacgtgaaggcaaatgatgcttatcttcagatggccattggaaatgcgccttggcccatcggtgtcactatgtgaagttgacacaaaattaaccatcacagctgccttcctgtgggcctcatgttatatgagaacagtattgggtgtacacttaaagcgttctgggaatatgaatcccttctgcaccctggaatcaccagtccagccatgcatggagctggggaaagcaggccctgaattgtctagagagacttggtggaggaggccacggcccgccttgtccctgccgggtcccggccaggtgtgtgtgtgccccagctcgactctcggtggtctccaggctgcagcagaaggaataccttgggccctgtgctaatcacgagtctttcctgttcggagcagtgaggcctgagaccctcaacagtgctgtgtgtacagaaggcccccagaatccacacaaaggggccgcctgaaacctagagcatttgtgaaggaggaaaatggaaggaacaactggatgttgtaaatgtttctcatctggccttaaaatccatgaaagctggaaaatcacaaggcatctgtgcatatactggtggattttaatgagagtcctgtgtttggagcaccagaaataaaccagcttcagaagcaaagatctgaacgtctatgacactctttcgagctgacacagtgaagaacatagaaggagaactcacccagtctgccagggtcacagaatgatcatactcaagatcttcctggggagtcaatggcaaatttcactgggctattttacagatgaagaaggaacataaagaaggttctgggaccccgaagtccacggaacacccaccattacctgatctttggagcttgtcatttggccagtggaccctaataaacgtccacggggatgtggggatagaatgccagagcctggctcgctagggcatccaggttcttccttcctctttgccctgctgtctccaggcaccaagaatctcctacagttccccaaagatgaaccccccattatctcaggtcactctgtttcccccgatctttaccaaattcctgactcagagttcctcccatttgcttctgactctcattttattcttacctctcattttattcttatgatgtttaccatttctcttctcctcagtgtccctctctgagtggtaagagtatgttaataagccagtgctgagaccggagcacgaggcaactgctcaatgttggtcattgtcactgttattaaatgtaacttaagggaa

SEQ ID NO: 5698 - protein, 120 aa, Homo sapiens [sequence omitted]

SEQ ID NO: 5699 - DNA, 628 bp, Homo sapiens
ctgtcagttgttctcaggtgtttgggcttgttgttccgtatactcagtgggttcgcggccgccggcccagtgaggctgggttcgaggagctggagcgggaaactggagcttaaattctggcggcgagatggacattctgaaatcagagatccttcggaagcggcagctggtggaggacaggaacctgctggtggtgaggaccctgcggtcgtgggggtcgggatgtaagagtgagagtatcagggaacttgagtacaattcgtgctgacttcccaaagctggatcaaaaggaaaacacctgggtctgggggcgggaacctgaggccaattaacgcccacgtccaaaagccaaaccaaaagaaaaatcctcatcttcccaccaccgagtagcaaaggcttcaggctgcggctctccccgcatccctgcctttccaccacctctcagatgggaagggaacgtgccctgcattggccgtgggccaatcacgggccatcccttcatctgcatagggcgccagttcacctcagtctttagccacagaccgaacccttcatccagatacggggtagctgatagggacctcagaaggagtacctaaaacccggaaaactttgtaaccggggcctc

SEQ ID NO: 5700 - protein, 46 aa, Homo sapiens
MDILKSEILRKRQLVEDRNLLVVRTLRSWGSGCKSESIRELEYNSC

SEQ ID NO: 5701 - DNA, 590 bp, Homo sapiens
aatgctgtgcagctagttttcttcatgaagttctaaattactcactgcttcttttcttggtattattatcttaactttttttagagcttatccttctaaactttaaaaaataaacatgaatattcaaaaataagtataattaaatgctcttatgctaaatatttatacttaaattattttaattattattttgtaacatacttccctttcccttatttaataatacgtctttccagattaaaatatggagatctacataattttgaatgagtgtataatttcccattgcttgtttgctccataatgtttctttctttatttatttattttgagacagaaatcgcttgaacctgggaggcggagcttgcagtgagccgagatcgcaccactgcactccagcctgggcaacagagtgagactgtctcaaaaaaaaaaaaaaaaaaaaaaatttactgggtatctgtttcactttgtaggtcatcagaagattgagagaaagaggagaaccaatcagactatttggagagactgattatgatgcttttcaacgtttaaggaaaatagagatcctcacaccagaagttaacaag

SEQ ID NO: 5702 - protein, 56 aa, Homo sapiens
TLKNKHEYSKISIIKCSYAKYLYLNYFNYYFVTYFPFPYLIIRLSRLKYGDLHNFE

SEQ ID NO: 5703 - DNA, 323 bp, Homo sapiens
aaaaaaaaaaaaaaaaaaaaaaatttactgggtatctgtttcactttgtaggtcatcagaagattgagagaaagaggagaaccaatcagactatttggagagactgattatgatgcttttcaacgtttaaggaaaatagagatcctcacaccagaagttaacaagagtctcactccgtcacctacgctggaatgcggtggcataatcatggctcatggcagctgcaacctcctgggcttaagcagtcctcccacctcagcctctcaagtagctgggattacaggcgctttttgttcattttaaaaataaacttgtctttttgt

SEQ ID NO: 5704 - protein, 43 aa, Homo sapiens
MRWHNHGSWQLQPPGLKQSSHLSLSSSWDYRRFLFILKINLSF

SEQ ID NO: 5705 - DNA, 486 bp, Homo sapiens
cagtatgtatagctgatcaccttgggctggttgcacattgttggataaagcaagattaaacaaggtattacaaaataaatgggaggtcagttaaagtacgagataggtttggctgggtgtggtggctcacgccttgatctgcctgccttggcctcccaaagtgctgggattccaggtgtaagccaccgtgcccagccctaaaacgtatttaaaatgttattttgttcccttaaaaatacttattatttttgcttagtgcaaagataatgtgtgtttatgatgaaaaccctgaaaatgtagacaggtataagaaatagtccattaactaatcacccagaaataaccattgctatgcattttcttttggccttttttctaagtacatatatttaaaaaataaaattagaatgctattgtattttttaacttcatgttttgtatcatgagcaaattccctcctaataaaagttatacatattttaacat

SEQ ID NO: 5706 - protein, 40 aa, Homo sapiens [sequence omitted]

SEQ ID NO: 5707 - DNA, 462 bp, Homo sapiens
ccaaatatttgggtaccgtcttccccagtgaagttgacacaaaattaaccatcacagctgccttcctgtgggcctcatgttatatgagaacagtattgggtgtacacttaaagcgttctgggaatatgaatcccttctgcaccctggaatcaccagtccagccatgcatggagctggggaaagcaggccctgaattgtctagagagacttggtggaggaggccacggcccgccttgtccctgccgggtcccggccaggtgtgtgtgtgccccagctcgactctcggtggtctccaggctgcagcagaaggaataccttggtatttgtttcattttagtgtccatccttacccttctggtctggtagagcctatggttattcttggattccacatacatgaaaagcgaagatttttctttgtttttatgcttaagctaacttcagttctgctttcccacaaaa

SEQ ID NO: 5708 - protein, 125 aa, Homo sapiens [sequence omitted]

SEQ ID NO: 5709 - DNA, 6818 bp, Homo sapiens
gaacgctcacagaacaggcagtgcaattccatgttcctcttaagtatgttagccctaccgggagctgagctggccagtctacttggagaggaaaagtagatctggggaaggtggaagggtcagttcctaagtgacttcctcctcggggatggtaagggcatttgctgatctccagtgactgcctggtgcctcatggtcagactcggctgtctcactcccagatatctgattttgcaaaaagggacacacctatctgcagcaaagaagacactgaccagattgcgagcggtgcttttggatgctctgtagccacccggggcccaggaggactgactcggcagcaggattcgtgcatgggaatcggagaccatggcagtgcagctggtgcccgactcagctctcggcctgctgatgatgacggagggccgccgatgtcaagtacatcttcttgatgacaggaagctggaactcctagtacagcccaagctgttggccaaggagcttcttgaccttgtggcttctcacttcaatctgaaggaaaaggagtactttggaatagcattcacagatgaaacgggacacttaaactggcttcagctagatcgaagagtattggaacatgacttccctaaaaagtcaggacccgtggttttatacttttgtgtcaggttctatatagaaagcatttcatacctgaaggataatgctaccattgagcttttctttctgaacgcgaagtcctgcatctacaaggagcttattgacgttgacagcgaagtggtgtttgaattagcttcctatattttacaggaggcaaagggagatttttctagcaatgaagttgtgaggagtgacttgaagaagctgccagcccttcccacccaagccctgaaggagcacccttccctggcctactgtgaagacagagtcattgagcactacaagaaactgaacggtcagacaagaggtcaagcaatcgtaaactacatgagcatcgtggagtctctcccaacctacggggttcactattatgcagtgaaggacaagcagggcataccatggtggctgggcctgagctacaaagggatcttccagtatgactaccatgataaagtgaagccaagaaagatattccaatggagacagttggaaaacctgtacttcagagaaaagaagttttccgtggaagttcatgacccacgcagggcttcagtgacaaggaggacgtttgggcacagcggcattgcagtgcacacgtggtatgcatgtccggcattgatcaagtccatctgggctatggccataagccaacaccagttctatctggacagaaagcagagtaagtccaaaatccatgcagcacgcagcctgagtgagatcgccatcgacctgaccgagacggggacgctgaagacctcgaagctggccaacatgggtagcaaggggaagatcatcagcggcagcagcggcagcctgctgtcttcaggttctcaggaatcagatagctcgcagtcggccaagaaggacatgctggctgccttgaagtccaggcaggaagctctggaggaaaccctgcgtcagaggctggaggaactgaagaagctgtgtctccgagaagctgagctcacgggcaagctgccagtagaatatcccctggatccaggggaggaaccacccattgttcggagaagaataggaacagccttcaaactggatgaacagaaaatcctgcccaaaggagaggaagctgagctggaacgcctggaacgagagtttgccattcagtcccagattacggaggccgcccgccgcctagccagtgaccccaacgtcagcaaaaaactgaagaaacaaaggaaaacctcgtatctgaatgcactgaagaaactgcaggagattgaaaatgcaatcaatgagaaccgcatcaagtctgggaagaaacccacccagagggcttcgctgatcatagacgatggaaacattgccagtgaagacagctccctctcagatgcccttgttcttgaggatgaagactctcaggttaccagcacaatatcccccctacattctcctcacaagggactccctcctcggccaccgtcgcacaacaggcctcctcctccccagtccctggagggactccgacagatgcactatcaccgcaacgactatgacaagtcacccatcaagcccaaaatgtggagtgagtcctctttagatgaaccctatgagaaggtcaagaagcgctcctctcacagccattccagcagccacaagcgcttccccagcacaggaagctgtgcggaagccggcggaggaagcaactccttgcagaacagccccatccgcggcctcccgcactggaactcccagtccagcatgccgtccacgccagacctgcgggtccggagtccccactacgtccattccacgaggtcggtggacatcagccccacccgactgcacagcctcgcactgcactttaggcaccggagctccagcctggagtcccagggcaagctcctgggctcggaaaacgacaccgggagccccgacttctacaccccgcggactcgtagcagcaacggctcagaccccatggacgactgctcgtcgtgcaccagccactcgagctcggagcactactacccggcgcagatgaacgccaactactccacgctggccgaggactcgccgtccaaggcgcgccagaggcagaggcagcggcagcgggcggcgggcgcactgggctcagccagctcgggcagcatgcccaacctggcggcgcgcgggggtgcggggggcgcggggggcgcggggggcggtgtgtacctgcacagccagagccagcccagctcgcagtaccgcatcaaggagtacccgctgtacatcgagggcggcgccacgcccgtggtggtgcgcagcctggagagcgaccaggagggccactacagcgtcaaggctcagttcaagacgtccaactcctacacggcgggcggcctgttcaaggagagctggcgcggcggcggcggcgacgagggcgacacgggccgcctgacgccgtcgcgatcgcagatcctgcggactccgtcgctgggccgcgagggcgcccacgacaagggcgcgggccgtgccgccgtctcagacgagctgcgccagtggtaccagcgttccaccgcctcgcacaaggagcacagccgcctgtcgcacaccagctccacctcctcggacagcggctcgcagtacagcacctcctcccagagcaccttcgtggcgcacagcagggtcaccaggatgccccagatgtgcaaggccacgtcagctgccttacctcaaagccagagaagctcgacaccgtcaagtgaaattggagccacccccccaagcagcccccaccacatcctaacctggcagactggagaagcaacagaaaactcacccattctggatgggtctgagtctccacctcaccaaagtactgatgaatagaggagctacaatgatagctgtttcctggattcctccctctatccagaactagctgatgtccagtggtacgggcaggaaaaagccaagcccgggaccctcgtgtgagccagcccggcctaatctgaccgcctcaacgccattctgagatcacctcactgcctctcatttgccttacccagacgcaccgtcaccctgcaccagctttggccctcagcactttttttctcctgtctccgcattccctcccccttgaaaacctgactgaggagacattctggaaggttccggtcccactgtgtgtcccctggcgctcttgcccatagagagccagacaccaatcctcaatggcaccttggtggcttccctctgccatgacagcccctaggccaggaaccatcaggggggccagccggcatccaattcctgcggataagtagcgttgggagagaacgggaaaggggacttgagttacagggtgacccagaaagacgattcagctgtgtccagcctgccacccatacgtaggccaaccaagcacttcatgaagaggaggcctcgtggcatattcagtttacacctgaaatattccttgatgggacagcttgtggggatggctatgggggaaggggaggttgagaaaggaagttctcgacaccagaaatgcatcggaggaccacaatcagttctatgctgccaaagattaaaaataaataaaaacataaaaaattaagaggggccaagaggaagacattctttctgcaaggaaatttcttttaaattctgaactgctactacacacaagtgaaagtcaaccctatgtaaactggtgtcctctctctagccctctcccttactggcccacttctctctccgtagagagcctgaaaaactgccccaatgccacggtaaaggcgaggaagtcttggctggcgttgctgactcacagtcgccatccatctggacacaaagagagacctgtgggagtcgtagagggtactgttagccccggtccatgcagggggttcagccgagcccaagactcaaagctgctttcctttcaggatttgtagtaacgtaaggtgataatggccaaaagtggttctctctcattaaaccaaccagtaaaagcgtatcctatttttttgcacaaggtgtttcattttcgtttttatgggaaaccaagggaaaagcacattgcgatccattcagtgtttaactgtcgtggctcattttctgttcgttagcacttgtgtgacaaaagagctcagatccgacttctcctatgtgtcacttattccaagaacccaactatgcccttaggtagaaagatttgactcgtgtgtctactagccaacaggcagagcagggttgaaaaaaatatcagctcccaaagggcccatgtgtctacatcatcagttactgtcatgcaccacatttgtgtgcagataccaaaagaggaggaaagaagaaaaaaattaatgtgtgggagctgcacgtttacatgttttgagctatgcttcaaacacaactggaaagccatcaatcttcaaaggcctcaaaaatacttttatagtaacaagtgcacgactttagttgggttattcaagatggcacaaaaaggtttccgcagaggtggtatgctgtgcttttggcgcaagtggtggggggatggggtgggggtggaatttttttctcactctaatgacttcctattggaaaggcattgacagccagggacaggagccagggtgggggtagttttgtgggaaagcagaactgaagttagcttaagcataaaaacaaagaaaaatcttcgcttttcatgtatgtggaatccaagaataaccataggctctaccagaccagaagggtaaggatggacactaaaatgaaacaaataccaaggtattccttctgctgcagcctggagaccaccgagagtcgagctggggcacacacacacctggccgggacccggcagggacaaggcgggccgtggcctcctccaccaagtctctctagacaattcagggcctgctttccccagctccatgcatggctggactggtgattccagggtgcagaagggattcatattcccagaacgctttaagtgtacacctgcaggataaagagataccggttacattattaaatgattctagggattcactgggggatatttttgttgcttttactttcatggttagagctacaaagaacagtgattttttttttttctcccttccccattcagaaacattatacattgggccatttttctttctcccaaagaagattcatggatagtcagactgaactgtgtgcaacaggaaaagtcaaaagggaaaaggtagctgatgaggttacatggttacatgttctacatcatgcatagtagcttgaaatctagtctggagaaaactggatcaagattctagcccactggagttgcaaggaatgagaggcaaaaattctaaagatttgggttatattttcaacttgggggacagagagaaatggagagcaggaattacagttccaacaaacatcatgatagtctggtagtcaagacagagattaagtaaaacaggttttactgtttagctgagttcagttaatacaaaatgtacataaaacgttagtcctttgagactgacatgattaatgatcagtgtggtgggaaatgatgtagttattgtacacaagcacttgcaaactctttatccctatttctttaaaacaaaataaggtgaaatacgaagtccttggtctgatataaagcccctattggattcttcggatgcgtaaaagaaattgcctgtttcagccagaagactggtgaaaacacatacatcagactatgttgtgagccaggttgattttttattttattatatgcaggtgagtgttgaaactgttaaaattccaatttgttttcattcagtattagtttagttctaaatatagcaaaccccatccaggtgctatcagatgaccagttactgcttagttaactaggtgtaaagttttacatatacattaatgtcaatagtttattacaagttgtgtaaaatggactctagtttaataatgggggaaaaaagattaggttgctcctgaaactgactgtagagcatgtaaaatgattttactggattctgttcaactgtaatcaatgaaaaagatgtacgttgtagacaaagttgcagaattaaaaaaagaaatctgcttttaatttattctttttgtattaagaatttgtatagtacctttacattttgcaaaacagtgttgtcaacacttattaaagcattttcaaaatgaaa

SEQ ID NO: 5710 - protein, 1039 aa, Homo sapiens
MAVQLVPDSALGLLMMTEGRRCQVHLLDDRKLELLVQPKLLAKELLDLVASHFNLKEKEYFGIAFTDETGHLNWLQLDRRVLEHDFPKKSGPVVLYFCVRFYIESISYLKDNATIELFFLNAKSCIYKELIDVDSEVVFELASYILQEAKGDFSSNEVVRSDLKKLPALPTQALKEHPSLAYCEDRVIEHYKKLNGQTRGQAIVNYMSIVESLPTYGVHYYAVKDKQGIPWWLGLSYKGIFQYDYHDKVKPRKIFQWRQLENLYFREKKFSVEVHDPRRASVTRRTFGHSGIAVHTWYACPALIKSIWAMAISQHQFYLDRKQSKSKIHAARSLSEIAIDLTETGTLKTSKLANMGSKGKIISGSSGSLLSSGSQESDSSQSAKKDMLAALKSRQEALEETLRQRLEELKKLCLREAELTGKLPVEYPLDPGEEPPIVRRRIGTAFKLDEQKILPKGEEAELERLEREFAIQSQITEAARRLASDPNVSKKLKKQRKTSYLNALKKLQEIENAINENRIKSGKKPTQRASLIIDDGNIASEDSSLSDALVLEDEDSQVTSTISPLHSPHKGLPPRPPSHNRPPPPQSLEGLRQMHYHRNDYDKSPIKPKMWSESSLDEPYEKVKKRSSHSHSSSHKRFPSTGSCAEAGGGSNSLQNSPIRGLPHWNSQSSMPSTPDLRVRSPHYVHSTRSVDISPTRLHSLALHFRHRSSSLESQGKLLGSENDTGSPDFYTPRTRSSNGSDPMDDCSSCTSHSSSEHYYPAQMNANYSTLAEDSPSKARQRQRQRQRAAGALGSASSGSMPNLAARGGAGGAGGAGGGVYLHSQSQPSSQYRIKEYPLYIEGGATPVVVRSLESDQEGHYSVKAQFKTSNSYTAGGLFKESWRGGGGDEGDTGRLTPSRSQILRTPSLGREGAHDKGAGRAAVSDELRQWYQRSTASHKEHSRLSHTSSTSSDSGSQYSTSSQSTFVAHSRVTRMPQMCKATSAALPQSQRSSTPSSEIGATPPSSPHHILTWQTGEATENSPILDGSESPPHQSTDE

SEQ ID NO: 5711 - DNA, 1222 bp, Homo sapiens
cccagctcgcagtaccgcatcaaggagtacccgctgtacatcgagggcggcgccacgcccgtggtggtgcgcagcctggagagcgaccaggagggccactacagcgtcaaggctcagttcaagacgtccaactcctacacggcgggcggcctgttcaaggagagctggcgcggcggcggcggcgacgagggcgacacgggccgcctgacgccgtcgcgatcgcagatcctgcggactccgtcgctgggccgcgagggcgcccacgacaagggcgcgggccgtgccgccgtctcagacgagctgcgccagtggtaccagcgttccaccgcctcgcacaaggagcacagccgcctgtcgcacaccagctccacctcctcggacagcggctcgcagtacagcacctcctcccagagcaccttcgtggcgcacagcagggtcaccaggatgccccagatgtgcaaggccacgtcagctgccttacctcaaagccagagaagctcgacaccgtcaagtgaaattggagccacccccccaagcagcccccaccacatcctaacctggcagactgtgggagtcgtagagggtactgttagccccggtccatgcagggggttcagccgagcccaagactcaaagctgctttcctttcaggatttgtagtaacgtaaggtgataatggccaaaagtggttctctctcattaaaccaaccagtaaaagcgtatcctatttttttgcacaaggtgtttcattttcgtttttatgggaaaccaagggaaaagcacattgcgatccattcagtgtttaactgtcgtggctcattttctgttcgttagcacttgtgtgacaaaagagctcagatccgacttctcctatgtgtcacttattccaagaacccaactatgcccttaggtagaaagatttgactcgtgtgtctactagccaacaggcagagcagggttgaaaaaaatatcagctcccaaagggcccatgtgtctacatcatcagttactgtcatgcaccacatttgtgtgcagataccaaaagaggaggaaagaagaaaaaaattaatgtgtgggagctgcacgtttacatgttttgagctatgcttcaaacacaactggaaagccatcaatcttcaaaggcctcaaaaatacttttatagtaacaagtgcacgactttagttgggttattcaagatggcacaaaaaggtttccgcagag

SEQ ID NO: 5712 - protein, 71 aa, Homo sapiens
MPQMCKATSAALPQSQRSSTPSSEIGATPPSSPHHILTWQTVGVVEGTVSPGPCRGFSRAQDSKLLSFQDL

SEQ ID NO: 5713 - DNA, 2045 bp, Homo sapiens
gcacagccagagccagcccagctcgcagtaccgcatcaaggagtacccgctgtacatcgagggcggcgccacgcccgtggtggtgcgcagcctggagagcgaccaggagggccactacagcgtcaaggctcagttcaagacgtccaactcctacacggcgggcggcctgttcaaggagagctggcgcggcggcggcggcgacgagggcgacacgggccgcctgacgccgtcgcgatcgcagatcctgcggactccgtcgctgggccgcgagggcgcccacgacaagggcgcgggccgtgccgccgtctcagacgagctgcgccagtggtaccagcgttccaccgcctcgcacaaggagcacagccgcctgtcgcacaccagctccacctcctcggacagcggctcgcagtacagcacctcctcccagagcaccttcgtggcgcacagcagggtcaccaggatgccccagatgtgcaaggccacgtcagctgccttacctcaaagccagagaagctcgacaccgtcaagtgaaattggagccacccccccaagcagcccccaccacatcctaacctggcagactgggagctacaatgatagctgtttcctggattcctccctctatccagaactagctgatgtccagtggtacgggcaggaaaaagccaagcccgggaccctcgtgtgagccagcccggcctaatctgaccgcctcaacgccattctgagatcacctcactgcctctcatttgccttacccagacgcaccgtcaccctgcaccagctttggccctcagcactttttttctcctgtctccgcattccctcccccttgaaaacctgactgaggagacattctggaaggttccggtcccactgtgtgtcccctggcgctcttgcccatagagagccagacaccaatcctcaatggcaccttggtggcttccctctgccatgacagcccctaggccaggaaccatcaggggggccagccggcatccaattcctgcggataagtagcgttgggagagaacgggaaaggggacttgagttacagggtgacccagaaagacgattcagctgtgtccagcctgccacccatacgtaggccaaccaagcacttcatgaagaggaggcctcgtggcatattcagtttacacctgaaatattccttgatgggacagcttgtggggatggctatgggggaaggggaggttgagaaaggaagttctcgacaccagaaatgcatcggaggaccacaatcagttctatgctgccaaagattaaaaataaataaaaacataaaaaattaagaggggccaagaggaagacattctttctgcaaggaaatttcttttaaattctgaactgctactacacacaagtgaaagtcaaccctatgtaaactggtgtcctctctctagccctctcccttactggcccacttctctctccgtagagagcctgaaaaactgccccaatgccacggtaaaggcgaggaagtcttggctggcgttgctgactcacagtcgccatccatctggacacaaagagagacctgtgggagtcgtagagggtactgttagccccggtccatgcagggggttcagccgagcccaagactcaaagctgctttcctttcaggatttgtagtaacgtaaggtgataatggccaaaagtggttctctctcattaaaccaaccagtaaaagcgtatcctatttttttgcacaaggtgtttcattttcgtttttatgggaaaccaagggaaaagcacattgcgatccattcagtgtttaactgtcgtggctcattttctgttcgttagcacttgtgtgacaaaagagctcagatccgacttctcctatgtgtcacttattccaagaacccaactatgcccttaggtagaaagatttgactcgtgtgtctactagccaacaggcagagcagggttgaaaaaaatatcagctcccaaagggcccatgtgtctacatcatcagttactgtcatgcaccacatttgtgtgcagataccaaaagaggagga

SEQ ID NO: 5714 - protein, 75 aa, Homo sapiens
MPQMCKATSAALPQSQRSSTPSSEIGATPPSSPHHILTWQTGSYNDSCFLDSSLYPELADVQWYGQEKAKPGTLV

SEQ ID NO: 5715 - DNA, 1729 bp, Homo sapiens
gcacagccagagccagcccagctcgcagtaccgcatcaaggagtacccgctgtacatcgagggcggcgccacgcccgtggtggtgcgcagcctggagagcgaccaggagggccactacagcgtcaaggctcagttcaagacgtccaactcctacacggcgggcggcctgttcaaggagagctggcgcggcggcggcggcgacgagggcgacacgggccgcctgacgccgtcgcgatcgcagatcctgcggactccgtcgctgggccgcgagggcgcccacgacaagggcgcgggccgtgccgccgtctcagacgagctgcgccagtggtaccagcgttccaccgcctcgcacaaggagcacagccgcctgtcgcacaccagctccacctcctcggacagcggctcgcagtacagcacctcctcccagagcaccttcgtggcgcacagcagggtcaccaggatgccccagatgtgcaaggccacgtcagctgccttacctcaaagccagagaagctcgacaccgtcaagtgaaattggagccacccccccaagcagcccccaccacatcctaacctggcagactgggagctacaatgatagctgtttcctggattcctccctctatccagaactagctgatgtccagtggtacgggcaggaaaaagccaagcccgggaccctcgtgtgagccagcccggcctaatctgaccgcctcaacgccattctgagatcacctcactgcctctcatttgccttacccagacgcaccgtcaccctgcaccagctttggccctcagcactttttttctcctgtctccgcattccctcccccttgaaaacctgactgaggagacattctggaaggttccggtcccactgtgtgtcccctggcgctcttgcccatagagagccagacaccaatcctcaatggcaccttggtggcttccctctgccatgacagcccctaggccaggaaccatcaggggggccagccggcatccaattcctgcggataagtagcgttgggagagaacgggaaaggggacttgagttacagggtgacccagaaagacgattcagctgtgtccagcctgccacccatacgtaggccaaccaagcacttcatgaagaggaggcctcgtggcatattcagtttacacctgaaatattccttgatgggacagcttgtggggatggctatgggggaaggggaggttgagaaaggaagttctcgacaccagaaatgcatcggaggaccacaatcagttctatgctgccaaagattaaaaataaataaaaacataaaaaattaagaggggccaagaggaagacattctttctgcaaggaaatttcttttaaattctgaactgctactacacacaagtgaaagtcaaccctatgtaaactggtgtcctctctctagccctctcccttactggcccacttctctctccgtagagagcctgaaaaactgccccaatgccacggtaaaggcgaggaagtcttggctggcgttgctgactcacagtcgccatccatctggacacaaagagagacctgtgggagtcgtagagggtactgttagccccggtccatgcagggggttcagccgagcccaagactcaaagctgctttcctttcaggatttgtagtaacgtaaggtgataatggccaaaagtggttctctctcattaaaccaaccagtaaaagcgtatcctatttttttgc

SEQ ID NO: 5716 - protein, 75 aa, Homo sapiens; identical to SEQ ID NO: 5714

SEQ ID NO: 5717 - DNA, 958 bp, Homo sapiens
cagccaggcctgcactgagaaggatatgttcaccttgacagggccctgtgctaatcacgagtctttcctgttcggagcagtgaggcctgagaccctcaacagtgctgtgtgtacagaaggcccccagaatccacacaaaggggccgcctgaaacctagagcatttgtgaaggaggaaaatggaaggaacaactggatgttgtaaatgtttctcatctggccttaaaatccatgaaagctggaaaatcacaaggcatctgtgcatatactggtggattttaatgagagtcctgtgtttggagcaccagaaataaaccagcttcagaagcaaagatctgaacgtctatgacactctttcgagctgacacagtgaagaacatagaaggagaactcacccagtctgccagggtcacagaatgatcatactcaagatcttcctggggagtcaatggcaaatttcactgggctattttacagatgaagaaggaacataaagaaggttctgggaccccgaagtccacggaacacccaccattacctgatctttggagcttgtcatttggccagtggaccctaataaacgtccacggggatgtggggatagaatgccagagcctggctcgctagggcatccaggttcttccttcctctttgccctgctgtctccaggcaccaagaatctcctacagttccccaaagatgaaccccccattatctcaggtcactctgtttcccccgatctttaccaaattcctgactcagagttcctcccatttgcttctgactctcattttattcttacctctcattttattcttatgatgtttaccatttctcttctcctcagtgtccctctctgagtggtaagagtatgttaataagccagtgctgagaccggagcacgaggcaactgctcaatgttggtcattgtcactgttattaaatgtaacttaagggaa

SEQ ID NO: 5718 - protein, 44 aa, Homo sapiens
MEGTTGCCKCFSSGLKIHESWKITRHLCIYWWILMRVLCLEHQK

SEQ ID NO: 5719 - DNA, 1155 bp, Homo sapiens
gctgtatgcaaacatgtcaagctatcaaagggagctgcctttcggtttcattaattttgttgtgtgcagcttccactgaaggcttcagggcacctgatctcttttgtgtgttgagaaagagcaagtgcttggccaggacacagccctttttcttgcaccctgagacatcctaagacactggctgtttcacctgccccagtgtatttgctgtcttcatcagctctctttctccccctgacattcttgcctggcattttgagtcagcctgagtataatccaaaccgaaatgaaatgctgtctggaaatcttaccaaagaagcacagtcccacttcgtgcttccatctccccacatcccaaggaccaccgcctactttaagagaacacagacaattcacctctataaaggcacagccaggaaaaggagtaggcagaggtgacagcagatcatggggcttctcttgaaaggaagacacctcccagtgatgaaccctcatcatccatttactgacatatccttatgtcaccaggatctgaacgtctatgacactctttcgagctgacacagtgaagaacatagaaggagaactcacccagtctgccagggtcacagaatgatcatactcaagatcttcctggggagtcaatggcaaatttcactgggctattttacagatgaagaaggaacataaagaaggttctgggaccccgaagtccacggaacacccaccattacctgatctttggagcttgtcatttggccagtggaccctaataaacgtccacggggatgtggggatagaatgccagagcctggctcgctagggcatccaggttcttccttcctctttgccctgctgtctccaggcaccaagaatctcctacagttccccaaagatgaaccccccattatctcaggtcactctgtttcccccgatctttaccaaattcctgactcagagttcctcccatttgcttctgactctcattttattcttacctctcattttattcttatgatgtttaccatttctcttctcctcagtgtccctctctgagtggtaagagtatgttaataagccagtgctgagaccggagcacgaggcaactgctcaatgttggtcattgtcactgttattaaatgtaacttaagggaa

SEQ ID NO: 5720 - protein, 84 aa, Homo sapiens [sequence omitted]

SEQ ID NO: 5721 - DNA, 460 bp, Homo sapiens
aggggagatgcagtctcaaaggaggggtgccacaccgtaggcaggaactgtccccacacatgatctttcctaagttcgtaaaaggaaccaacacaggagcagctggcattctgcggggttcctctgggaagcatgagatgatcacctggtctctactgtggctcctggaaacgcactttgcttccctattcatataacaggcagacatttgcatggacagggcattcagccttggacttgtcttagtttaaatagtgagaatttgtcctgggctccccacaaaactctgaatcagtgtctggtgccagggccattgtaacagctcaggaacagctgccccagggagcccaaactcacagaacagtctttgtcccttggtgacttgcctatttcaagaccacaggcaggagtccatgttgatattcttctccctctgagacaacagcgcagccagccttgg

SEQ ID NO: 5722 - protein, 45 aa, Homo sapiens
MIFPKFVKGTNTGAAGILRGSSGKHEMITWSLLWLLETHFASLFI

SEQ ID NO: 5723 - DNA, 2172 bp, Homo sapiens
tctgcagccacgagaagcaaagttgacatttctggatcactctccccagacgcgtcacttgcccacaagcgggacacggcagtctcgctgagccagctgtgcagagggacagatggaagaaagctagagatgctgcttcgtgggcgctgaagttgcagaacttgggctggttttctttcttcccatcccccctcctcctgacaaaccacatcttgactcagatggtcgaaagaaaaactctttcagttatttgatatttgggaaccctccaggagaccataacttatttttgagggaggctccttctctccctttgctgggaacacacacacacacacacacacacacacacacacacacacacacacacagctgtacaccatggtggttcaggctgcagtggctccgaatagatcccaaagacttttactgaaaattccttatggatctctgagaaggcgcagcgttgaaaggatgacggagggccgccgatgtcaagtacatcttcttgatgacaggaagctggaactcctagtacagcccaagctgttggccaaggagcttcttgaccttgtggcttctcacttcaatctgaaggaaaaggagtactttggaatagcattcacagatgaaacgggacacttaaactggcttcagctagatcgaagagtattggaacatgacttccctaaaaagtcaggacccgtggttttatacttttgtgtcaggttctatatagaaagcatttcatacctgaaggataatgctaccattgagcttttctttctgaacgcgaagtcctgcatctacaaggagcttattgacgttgacagcgaagtggtgtttgaattagcttcctatattttacaggaggcaaagggagatttttctagcaatgaagttgtgaggagtgacttgaagaagctgccagcccttcccacccaagccctgaaggagcacccttccctggcctactgtgaagacagagtcattgagcactacaagaaactgaacggtcagacaagaggtcaagcaatcgtaaactacatgagcatcgtggagtctctcccaacctacggggttcactattatgcagtgaaggacaagcagggcataccatggtggctgggcctgagctacaaagggatcttccagtatgactaccatgataaagtgaagccaagaaagatattccaatggagacagttggaaaacctgtacttcagagaaaagaagttttccgtggaagttcatgacccacgcagggcttcagtgacaaggaggacgtttgggcacagcggcattgcagtgcacacgtggtatgcatgtccggcattgatcaagtccatctgggctatggccataagccaacaccagttctatctggacagaaagcagagtaagtccaaaatccatgcagcacgcagcctgagtgagatcgccatcgacctgaccgagacggggacgctgaagacctcgaagctggccaacatgggtagcaaggggaagatcatcagcggcagcagcggcagcctgctgtcttcaggtaggcagaggccagctggagggacgccccctgagcatggctgggaccccagaggggacccaggaaggtggggagagctgcagctggggagactgcagggcaagctgctccaaagctggctttgctttccagaccaaggttgggatccaaatgcgaatctgagaaaactgctcccaggaatcaaatagtggaagggaaaaaaaaaaaaaaaagcatcagtagaaccacgcagtgcaagaaggcctgctggtcacacttaagtgtcttcaggtaccccccagagcgtttcacaatccccatggcaagctgtcgggaatgtcaggtccaagggtgaaaagtggaatccgctcatgtgcccacttgtgtgttgtgaatttcaggatctggtgccaggagacactgcattctactcccaggtgggtttctccggcttttaaaaatgcggaatactctctccatcgtgtcgcagggcatgatttctccattcagtgccttttgaaattgcgagtcagagatctggttccgtcgtccgcttccgccagccttggccaagtcattttgtcttttgatgttgggagggacagaggagttccaaggtcctggatctgactgacttaaaaaggggg

SEQ ID NO: 5724 - protein, 450 aa, Homo sapiens
MVVQAAVAPNRSQRLLLKIPYGSLRRRSVERMTEGRRCQVHLLDDRKLELLVQPKLLAKELLDLVASHFNLKEKEYFGIAFTDETGHLNWLQLDRRVLEHDFPKKSGPVVLYFCVRFYIESISYLKDNATIELFFLNAKSCIYKELIDVDSEVVFELASYILQEAKGDFSSNEVVRSDLKKLPALPTQALKEHPSLAYCEDRVIEHYKKLNGQTRGQAIVNYMSIVESLPTYGVHYYAVKDKQGIPWWLGLSYKGIFQYDYHDKVKPRKIFQWRQLENLYFREKKFSVEVHDPRRASVTRRTFGHSGIAVHTWYACPALIKSIWAMAISQHQFYLDRKQSKSKIHAARSLSEIAIDLTETGTLKTSKLANMGSKGKIISGSSGSLLSSGRQRPAGGTPPEHGWDPRGDPGRWGELQLGRLQGKLLQSWLCFPDQGWDPNANLRKLLPGIK

SEQ ID NO: 5725 - DNA, 596 bp, Homo sapiens
attccatgctgcttggcaaaggcacaaaatatgtgcacatatttacatggaatatgagggtaaactagaaaattaagggtaatctaaaatagaaaaaaagaagaaaacaataagttaaaagtatgaaaagacatccagaatgagcaagttactgaggttgtgcctcaactttagcttgagtttcctggcagcaaaggtaaaaaggtgatcttacagctggaaaatcagtgggtgaaaacggagatacagcaactctgtcttggactacaccttaactgaagacgtctatgtaggtgacgaaaactcatggaaggacttgccacaattcaaacatgggcttttggggtttctgagaccaacagaaccaccatatactttgtgggtgtagggattctccctgcatgttgagcctgtcaccctaatgacaaccagctttgcattaactagagtcagccccaaaaatgcatctgttactccagagaaggacaaatccttattattactttataggattttctctactaggggcttccataaagtaaacatgctttcaggaaattaacagagtaattttaagccaaaatccatagcattaa

SEQ ID NO: 5726 - protein, 46 aa, Homo sapiens
MTTSFALTRVSPKNASVTPEKDKSLLLLYRIFSTRGFHKVNMLSGN

SEQ ID NO: 5727 - DNA, 1062 bp, Homo sapiens
ctcggcacgacccaggttccatgctacaggcctctacttgtccagacctgagggtcagattcagatggtgcaaatgtttaagacctgggtcttcaacgagatgaattatcagctatttcatagctgcagtgttggatatgccgagacgataaaagcaacagcaatcagaatcaacagttgaaacgacatggcagacgctgtgaatgctatgaactgctgtgctgagcagcaggattcctgtgtcctggcgcaatgcccatggggattcatgctttcagagggtcacgcctcaggaacacgtagaagggcaagcatttcatctggcagggcactgatttaatctgcacgcatgtttggctgtaaaactagctcctcccccttaccatttttgagtcgctgccggactcaaattccacagattctggaaggtgtccaggaactcgttgatttgtcaaacttatggctacacacagctggaatggagacggactccactgaggagactcatacaggacaggagggaattttaagaggataaccctgagattgaaaacatcaaaccaaacctgaagcactgagaggttgggtaaccagctctggtcactgagttggtgagggatggattcagaagaggtctccaattgtgacaccgcagaggacctgctcttggccactacactctaccagctctgcaagaagcgcttccacacttttcatctcagacccacagagccagtgtgtgcggctgaggtgctcagactggcaggtgaaatgacttcattagtgccctggctcctggtgggatgagagtggaaacccagccttctgagttgaagaactggaacaaacatcagccctgacacattgatgtcagtttacctttgtgagaaacaggaacgaaatgtgaacatctatttcaggtgatgtcataaagcccgactcagaagatggctatgatttcaacagcctgtcggcagcacggatttcagagtaacttacaatcagtaattaatctaaacaacagtgccgtgtgcactccattattaaaacagaaggggaaac

SEQ ID NO: 5728 - protein, 62 aa, Homo sapiens
MDSEEVSNCDTAEDLLLATTLYQLCKKRFHTFHLRPTEPVCAAEVLRLAGEMTSLVPWLLVG

SEQ ID NO: 5729 - DNA, 1136 bp, Homo sapiens
gtgcttttggatgctctgtagccacccggggcccaggaggactgactcggcagcaggattcgtgcatgggaatcggagaccatggcagtgcagctggtgcccgactcagctctcggcctgctgatgatggagtctcactgtgtcgtgcaggctggagggcaatggtgccatcttggatcactgcaatctccaatctctgcttcccgggttcaagcgattctcctgcttcatcctcctgagtagctggggttgcaggatgatgctcattccaagattttctgttttatttctgtcttttgcaatcgttggcctgctttgctgccataaatgagggaattgtggctaagagagcaatctgccggaagcatctcctcatccatcggtggacactaaccacagctataaccgggacaactagagacactgtccaagtcctctgtcaaattcacaacttagcttgcccttaggtgtgaatacagactgaccccagggccggaggggctgctgttgtgagcctttcctgctggaggggcctaaggactcagttccctttatctaagacaaaaccgaatggagacagtaagagcccatcacactccaccctccctccctcaccttcttgcagagctggtagagtgtagtggccaagagcaggtcctctgcggtgtcacaattggagacctcttctgaatccatccctcaccaactcagtgaccagagctggttacccaacctctcagtgcttcaggtttggtttgatgttttcaatctctagaatgcaacagtcgtagagttggtgagaagattatgcagctgtgctgaggaaagagtaagagctcaaacatgtcagctgtcattcaaatgtcactacaatggccttttttcaagtgtgatccacttgcaccaaaattacctgaggtgcttgtgacaaggatcttacagattcagtctccacggaaggttccagaagtgttttagtgatcgaggcaggggctctacagtcagacagacccaacttcaaatcttaccttgcaccttagttagatctgcgtgatgtgcaacaagttaatgcatttagcttcttggagtctttgtttcaataaattaagacattaatatctatcttgtttggcaaa

SEQ ID NO: 5730 - protein, 57 aa, Homo sapiens
MGIGDHGSAAGARLSSRPADDGVSLCRAGWRAMVPSWITAISNLCFPGSSDSPASSS

SEQ ID NO: 5731 - DNA, 1121 bp, Homo sapiens
gtgcttttggatgctctgtagccacccggggcccaggaggactgactcggcagcaggattcgtgcatgggaatcggagaccatggcagtgcagctggtgcccgactcagctctcggcctgctgatgatggagtctcactgtgtcgtgcaggctggagggcaatggtgccatcttggatcactgcaatctccaatctctgcttcccgggttcaagcgattctcctgcttcatcctcctgagtagctggggttgcaggatgatgctcattccaagattttctgttttatttctgtcttttgcaatcgttggcctgctttgctgccataaatgagggaattgtggctaagagagcaatctgccggaagcatctcctcatccatcggtggacactaaccacagctataaccgggacaactagagacactgtccaagtcctctgtcaaattcacaacttagcttgcccttaggtgtgaatacagactgaccccagggccggaggggctgctgttgtgagcctttcctgctggaggggcctaaggactcagttccctttatctaagacaaaaccgaatggagacagtaagagcccatcacactccaccctccctccctcaccttcttgcagagctggtagagtgtagtggccaagagcaggtcctctgcggtgtcacaattggagacctcttctgaatccatccctcaccaactcagtgaccagagctggttacccaacctctcagtgcttcaggtttggtttgatgttttcaatctctagaatgcaacagtcgtagagttggtgagaagattatgcagctgtgctgaggaaagagtaagagctcaaacatgtcagctgtcattcaaatgtcactacaatggccttttttcaagtgtgatccacttgcaccaaaattacctgaggtgcttgtgacaaggatcttacagattcagtctccacggaaggttccagaagtgttttagtgatcgaggcaggggctctacagtcagacagacccaacttcaaatcttaccttgcaccttagttagatctgcgtgatgtgcaacaagttaatgcatttagcttcttggagtctttgtttcaataaattaagacattaatatct

SEQ ID NO: 5732 - protein, 57 aa, Homo sapiens; identical to SEQ ID NO: 5730

SEQ ID NO: 5733 - DNA, 596 bp, Homo sapiens
ggggaaacaaaaggagactgagaggattgcttttgaagggtcatgttgcagcggcttctgctggatactaaaaagcaaattattatcgggggttgtttgtcattcacaggaggaattggattcctttatgtttataaagtcaccttggtatctggaaggagagcagaaactaacagagcctactttacttaggaatgcccctggcgctggttctctctggaggttgagtttccgtggggagagaagagtgcccagcgtgaccaccgttggctgacttcccatgccttattccttgtttcccccgctggggcccagcccaccagccccgcagtgcatgaagccacttatcaccacggttcccagagaggacgggctggcccaagtctgcattgtcacctgctctggggaaaacaaagccctctcccccgccctccccgcagcatgctgggcacagggccagcccgttctatgttttcagtaaattttcaaacatgctggttttggtggcagcttttgcagtgattatctcattaggggcttggccctgaaacaccttatttattgtggattgaaaaaagttcaccttttcaagcaaa

SEQ ID NO: 5734 - protein, 48 aa, Homo sapiens
MFIKSPWYLEGEQKLTEPTLLRNAPGAGSLWRLSFRGERRVPSVTTVG

SEQ ID NO: 5735 - DNA, 847 bp, Homo sapiens
tgccacgtaagacgtgactttgctccccctttgcctgctgccatgattgtggggtctccccatccacgtgaagctgtgatctatggaggtgggacattgatgtagagttgaggacgataactggcttcaggatttctcaagaaaagctttgagagatctacaccttggaaaccccagccctagaggagtgttcttccaagactccacgaacaggaaaaagtcctggatagcagctgagtgccgccatattaaccctttgggatgggccccagaatctgtgtttccatccagttcccaggtgcttttggatgctctgtagccacccggggcccaggaggactgactcggcagcaggattcgtgcatgggaatcggagaccatggcagtgcagctggtgcccgactcagctctcggcctgctgatggacagagccactcatatgaccacggaaggggggacttggagagaagacacattctggtggtggagatggccttttaggctgttgaaaagctgcctctcccatctttgcaagaatctcaggcagcgaaagaagatactgctgtgttcaccaacccgtgaggaggcttcagattgatgtgactaattgtagagcgggaagctcttggctacgtgtcatttgttgagggcgtgtgagttcagggaaagctgcaagggctggaacatgctagagccgaggattagtttatctttagagccaggataaggatgaataaccaaggggcttcaagggtgttatgatgccatttcggttcttagattataaaggctcaccttcaggacagctagattaaaatagtttttaatggaaattaactggataata

SEQ ID NO: 5736 - protein, 79 aa, Homo sapiens
MGPRICVSIQFPGAFGCSVATRGPGGLTRQQDSCMGIGDHGSAAGARLSSRPADGQSHSYDHGRGDLERRHILVVEMAF

SEQ ID NO: 5737 - DNA, 4740 bp, Homo sapiens
atgggacacaattgcaaaatgccaagaactggagctcaggatggagcatggatccaaaagcaggttgtttttgaaggtcaaatggcttcaacgtatgaacaggatgaagtcattgctattgatgatatatctttcagttcaggctgcttgcctgccaatgatggaattttactgtgtcaagaagcattgaatgctgagcgggagctatgccatccagatacagatctctgcagatttgatgctacagatgaagagttgagattgtgtcaggcctgtgggtttgaatttgacatgtgtgagtggacgtcagaagcatctgctggccaaatttcctggatgcgcacaaaagcgagagagatccctgcattcgaatccacacctcagcaggatcaaggaggtgatgatgaaggttattatgtatgggtaggcgctaagcatggtttcactcttaaccatttagacagcagggcttacctaaatagctctgtgtgtcattgcctgggcaagagctgtcatcttcaattctattatgcaatggaaagcagtgtcctgagagtaagactgtataataataaggaagaagaaatattttggacatacaacatatcaactcacagccaatgggtgaaagcagatgtgttaataccagaagatctgaagacatttaagacccaatccagaaagctttgctctgcagacgaattcccttgcactagtggccagtgcatcgccaaagaatctgtctgtgactctcggcaggactgctccgatgagagtgatgaagacccagcaacttgctcaaagcatctcacctgtgactttgagtcgggtttctgcggttgggagccatttctcacagaagattcacactggaagctgatgaaaggattgaataatggagagcaccactttcctgcagctgatcacacagcaaacataaatcatgtttccaagtgtgactttgaagcaaacagctgtgattggtttgaagcaattagtggtgaccattttgactggatacggagctctcagagtgaactttctgctgattttgagcaccaggctccacctcgggatcatagtctcaacgcatctcaagggcattttatgttcattctgaagaaaagcagcagcttgtggcaagttgctaagcttcagagcccaactttcagccagacaggacctggatgcatactttccttctggttctataactatggcctgtcagtgggagcagctgagctgcagctacatatggaaaattctcatgactcaacagtgatttggagagtattatacaatcagggcaaacaatggttggaggcaaccattcagctagggcgcctttcgcagcccttccatttgtcactagataaagtcagtctgggcatttatgatggggtctcagctattgatgacatccgatttgaaaattgtactctccctcttcctgctgagagctgtgaagggctggatcatttctggtgtcgccacaccagggcttgcatagaaaagcttcggttatgtgatctggtggatgactgtggtgatcgtactgatgaagtcaactgtgcacctgagctgcagtgtaactttgaaactggaatctgtaactgggaacaagatgcaaaagatgactttgattggaccaggagccagggtccaactccaacacttaacacagggccaatgaaagataacactctgggcacagctaaaggacactatctctacatagaatcttcagagccacaggcttttcaagacagtgctgccttactcagcccaatccttaatgccactgatacaaaaggctgcaccttccgcttctattaccacatgtttggaaagcgcatttataggttggcaatctaccaacgaatctggagtgactcaaggggacagctgctgtggcagatatttgggaatcaaggcaacagatggattaggaaacacctcaacatttccagcaggcagccctttcagatattggtggaggcttcagtgggagatggcttcactggagatattgcgattgatgatctgtcatttatggactgcaccctctaccctggtaatttgccagcagacctcccaactccaccagaaacgtcagttcctgtaacattacctccacacaactgcacagacaatgaatttatctgcaggtctgatggtcactgcattgaaaaaatgcagaaatgtgattttaaatatgactgccctgacaaatcagatgaagcatcctgtgttatggaagtttgcagctttgagaaaagaagcctgtgtaaatggtatcaaccaatcccagtacatttgcttcaagattcaaacacattcaggtgggggcttgggaacgggatcagcattcatcatggggaagaaaaccacaggccatcagtggatcatacacaaaataccactgatggctggtacctgtatgctgacagttctaatgggaaatttggtgacacggctgacattctcactcctatcatttcactcacgggaccaaaatgtaccttggtgttctggacacatatgaatggggccaccgttggttctctccaggtgctcatcaagaaagataacgttacttctaaattgtgggctcaaactggacagcaaggtgcacagtggaagagagcagaagtgtttttaggcattcgttcacatacacagattgtcttcagagccaaacgtggtatcagttacataggagatgtagcagtggatgatatttccttccaagattgctcccctttgcttagcccagagagaaagtgtactgatcatgaattcatgtgtgctaataagcactgcattgccaaagacaagctgtgtgattttgtgaatgattgtgctgataattcagatgagactactttcatttgccgtacctccagtgggcgctgtgatttcgaatttgatctttgttcctggaagcaggagaaagatgaggactttgactggaacctgaaagctagcagcatccctgcagcaggcacagagccagcagcagatcacactttgggaaattcatctggtcattacatctttataaagagtttgtttcctcagcagcccatgagagctgccagaatttcaagtccagttataagtaagagaagcaaaaactgcaagattatttttcattatcacatgtatggaaatggcattggggcactcaccttaatgcaggtgtcagtcacaaaccaaacgaaggttctacttaacctcactgtagaacaaggcaatttctggcggagagaagaactgtcactgtttggtgatgaagacttccaactcaaatttgaaggtagagttgggaaaggtcagcgtggagacattgcacttgatgacattgtgcttacagaaaattgtctatcactccatgattccgtgcaagaagaactggcagtgcctcttccaacagggcacttcatgtatctggaagctactgcagtgggccttcggggtgacaaagcacacttcaggagtaccatgtggcgagaatccagtgcagcctgcaccatgagcttctggtatttcgtatctgcaaaggccacaggatccattcagattctcatcaaggtggcatgtggcctgagggagttgacttggctagagaaggccccctgtttttcaaaggtgccatctcctgtggctgaaatgatctatggggtttgggtagtagcaaatgtgatagacatttccagaaattccattaatgtttttgcttccccagcacattatacaagcacaacaggaagctgcaattttgaaacaagttcaggaaactggaccacagcctgcagtcttactcaagactctgaggatgacttggactgggccattggcagcagaattcctgccaaagcattaattccagactctgatcacacgccaggtagtggtcagcacttcctgtacgtcaactcatctggctccaaggaaggatccgttgccagaattactacttccaaatccttcccagcaagccttggaatgtgtactgttcggttctggttctacatgattgatcccaggagtatgggaatattaaaggtgtataccattgaagaatcggggctaaacatcctggtgtggtcagtgattggaaataaaagaacgggatggacatatggctctgtgcctctctccagtaacagtccgtttaaggtggcatttgaagctgatttggatggaaatgaggacatctttattgctcttgatgacatctcttttaccccagagtgtgtgactggaggtcctgtcccagtgcagccatcaccctgtgaagctgatcagttttcttgtatctacacactccaatgtgtccctctctcagggaaatgtgatggacatgaagactgcatagatggatctgatgaaatggattgtcctctcagccccacccctccactctgtagtaacatggagttcccgtgctctacagacgagtgtataccttccctcctgctatgcgatggagtgcccgactgccactttaatgaagatgagctcatctgctccaacaaaagctgttctaatggagctctggtgtgtgcctcctccaacagctgtatcccagcccaccagcgctgtgatggttttgccgactgcatggatttccagcttgatgagtccagctgctccggtaccccatttccattcagatattcttgtgatatgaaccagcaacttaacctgcaacacaatgaaaatattaaaacttga

SEQ ID NO: 5738 - protein, 1579 aa, Homo sapiens
MGHNCKMPRTGAQDGAWIQKQVVFEGQMASTYEQDEVIAIDDISFSSGCLPANDGILLCQEALNAERELCHPDTDLCRFDATDEELRLCQACGFEFDMCEWTSEASAGQISWMRTKAREIPAFESTPQQDQGGDDEGYYVWVGAKHGFTLNHLDSRAYLNSSVCHCLGKSCHLQFYYAMESSVLRVRLYNNKEEEIFWTYNISTHSQWVKADVLIPEDLKTFKTQSRKLCSADEFPCTSGQCIAKESVCDSRQDCSDESDEDPATCSKHLTCDFESGFCGWEPFLTEDSHWKLMKGLNNGEHHFPAADHTANINHVSKCDFEANSCDWFEAISGDHFDWIRSSQSELSADFEHQAPPRDHSLNASQGHFMFILKKSSSLWQVAKLQSPTFSQTGPGCILSFWFYNYGLSVGAAELQLHMENSHDSTVIWRVLYNQGKQWLEATIQLGRLSQPFHLSLDKVSLGIYDGVSAIDDIRFENCTLPLPAESCEGLDHFWCRHTRACIEKLRLCDLVDDCGDRTDEVNCAPELQCNFETGICNWEQDAKDDFDWTRSQGPTPTLNTGPMKDNTLGTAKGHYLYIESSEPQAFQDSAALLSPILNATDTKGCTFRFYYHMFGKRIYRLAIYQRIWSDSRGQLLWQIFGNQGNRWIRKHLNISSRQPFQILVEASVGDGFTGDIAIDDLSFMDCTLYPGNLPADLPTPPETSVPVTLPPHNCTDNEFICRSDGHCIEKMQKCDFKYDCPDKSDEASCVMEVCSFEKRSLCKWYQPIPVHLLQDSNTFRWGLGNGISIHHGEENHRPSVDHTQNTTDGWYLYADSSNGKFGDTADILTPIISLTGPKCTLVFWTHMNGATVGSLQVLIKKDNVTSKLWAQTGQQGAQWKRAEVFLGIRSHTQIVFRAKRGISYIGDVAVDDISFQDCSPLLSPERKCTDHEFMCANKHCIAKDKLCDFVNDCADNSDETTFICRTSSGRCDFEFDLCSWKQEKDEDFDWNLKASSIPAAGTEPAADHTLGNSSGHYIFIKSLFPQQPMRAARISSPVISKRSKNCKIIFHYHMYGNGIGALTLMQVSVTNQTKVLLNLTVEQGNFWRREELSLFGDEDFQLKFEGRVGKGQRGDIALDDIVLTENCLSLHDSVQEELAVPLPTGHFMYLEATAVGLRGDKAHFRSTMWRESSAACTMSFWYFVSAKATGSIQILIKVACGLRELTWLEKAPCFSKVPSPVAEMIYGVWVVANVIDISRNSINVFASPAHYTSTTGSCNFETSSGNWTTACSLTQDSEDDLDWAIGSRIPAKALIPDSDHTPGSGQHFLYVNSSGSKEGSVARITTSKSFPASLGMCTVRFWFYMIDPRSMGILKVYTIEESGLNILVWSVIGNKRTGWTYGSVPLSSNSPFKVAFEADLDGNEDIFIALDDISFTPECVTGGPVPVQPSPCEADQFSCIYTLQCVPLSGKCDGHEDCIDGSDEMDCPLSPTPPLCSNMEFPCSTDECIPSLLLCDGVPDCHFNEDELICSNKSCSNGALVCASSNSCIPAHQRCDGFADCMDFQLDESSCSGTPFPFRYSCDMNQQLNLQHNENIKT

SEQ ID NO: 5739 - DNA, 457 bp, Homo sapiens
atcaagtctaatttaccttcacttagtttgggaaacgtttttcctacaaattttgggggcaattataacaattcttcacaggagttagaatagataaagtgtcattctgtcacccaggctggagtgcaatggcatgatcgtagtgtactacaacctcaatttcctgggctcaagtgatccaaccacctttcccctctcaatgggattacagttgagagcaatatttccatataccttgattacaaccctagaaaaatcacaccaggtaacctcagttgagccctgctgagcaggagaaagggagaatccactcaccgaactctgtgctgaaaatgcctccatctacaagaagagatgcgtttttctaattcatgtaaaaattaataaactagctgtatggaatggtgttactctcccacaaacatataaaaaataaagatgcaatcttaaatttata

SEQ ID NO: 5740 - protein, 51 aa, Homo sapiens
MIVVYYNLNFLGSSDPTTFPLSMGLQLRAIFPYTLITTLEKSHQVTSVEPC

SEQ ID NO: 5741 - DNA, 456 bp, Homo sapiens
atgcttgcggaatatggagacttagatcttcagctcggcattgttctggattctgttggaaaaccgagggaagtggtaactgtgcctttgtcaatccagtttacgggaactggagcaacccagagaaaacagagagttctgtctattccttctcaaacccattatatggcacaacatcaggaagcctggagaccctgtcacatcatctcaaatagcagcatcgagaccaagtctgatccaacatgtgtagtttctagaaaattgaagtctccacaatctgatagaaactcatcttctacaatggtaaaaagagaaaggattgtaaatgccagtgtaattataacatttatgaatgaattttcttgcagaatatagagaatgtttatatggaatcagaatcagtaccttatcttcactgaacatctgaatattttaataaaatttctatttaatcaa

SEQ ID NO: 5742 - protein, 124 aa, Homo sapiens
MLAEYGDLDLQLGIVLDSVGKPREVVTVPLSIQFTGTGATQRKQRVLSIPSQTHYMAQHQEAWRPCHIISNSSIETKSDPTCVVSRKLKSPQSDRNSSSTMVKRERIVNASVIITFMNEFSCRI

SEQ ID NO: 5743 - DNA, 414 bp, Homo sapiens
tgccatatcaagtttaatcctcctgctacagacttcacatacgctcagaataatacatggactctcctgggtattggattagcattcctgatgactcacatcacagttgcagtcttgtgttttcttgcaaacagaaaggtaccaataagaggagaaatgtgatgctcagagggtgtggctgacaagctccaggacacaggtaataagtaaaatctagatctcgggtctttcaattgaaactagaaacataggaaacaacaacagaagtcacaacaatttaacagttatttagaggtgtcagtgatttgggatttaaaaatatggaatttaacatttctggtttcaaagtcaatacacagcttccatatgacactatagagtaagtaaaaaataaaagataatttatctgatgta

SEQ ID NO: 5744 - protein, 41 aa, Homo sapiens
MDSPGYWISIPDDSHHSCSLVFSCKQKGTNKRRNVMLRGCG

SEQ ID NO: 5745 - DNA, 474 bp, Homo sapiens
ttggattagcattcctgatgactcacatcacagttgcagtcttgtgttttcttgcaaacagaaaggtaccaataaggaaaaccgagggaagtggtaactgtgcctttgtcaatccagtttacgggaactggagcaacccagagaaaacagagagttctgtctattccttctcaaacccattatatggcacaacatcaggaagcctggagaccctgtcacatcatctcaaatagcagcatcgagaccaagtctgatccaacatgtgtagtttctagaaaattgaagtctccacaatctgatagaaactcatcttctacaatggtaaaaagagaaaggattgtaaatgccagtgtaattataacatttatgaatgaattttcttgcagaatatagagaatgtttatatggaatcagaatcagtaccttatcttcactgaacatctgaatattttaataaaatttctatttaatcaa

SEQ ID NO: 5746 - protein, 71 aa, Homo sapiens
MTHITVAVLCFLANRKVPIRKTEGSGNCAFVNPVYGNWSNPEKTESSVYSFSNPLYGTTSGSLETLSHHLK

SEQ ID NO: 5747 - DNA, 1399 bp, Homo sapiens
aggagctgaagggaccagcttggccgtcagttgcaagggtgtgaggcagaagcaacacaaaagatcttgatatgaagcaattatttttggtcttaaactgctgggactccagatgacccagaccacggtcagcaggcagaagccagagatgacatctcactatattgcccaggctggtcttgaacttctagcctcaagcaatcctcccacctcagcctctgaacgtactggaattacagatggagcaactgagattcttccccaactagactataagttctctgagggataaggaacatgtctggtttcctcatctctctgtcacagcaccctgtgaatgcctagaagacaaatgaaatgggtcagcatctgacatactgcataaatcactgaaccaatattttctaaatgtaacatgcatgatggtacaaaatcacacatagatgaaaatcaactggtctttgaagaactttgattcattagtgagcttgaaaacccaacacaataaacagatagtggaagtggaaggagtatccctaaggatgcatttaaggagaaatgatgtgacagaagatttgaaagcaaaaaagaatctatcaggaagataagaaagcaattattaaacaaaaattaagaagccaatcgccctcccaagtttctaccccttggtaacattactgattcacactagtcaaaagtgctgaataatttgctacatgccattggaaaactatataacttactactaataaaacacctcacttctttttactgtctttcttcatttacccaagtcacctcttttaagagccatctttgatttgcctacaacacattcatctacactgattgcttgtacaagaaaacaatgcaacccagcaatgtcagagactgaaaggttgtcttcttgctgtgtaagatttactgtgaatagagggaggatgtggaaaaacgctacaaccattgctccagggactatctctgccaaacagagatattatactgacgaaatgataatggtgaaatagctgtcagaccaaataattagaatatggagccgtaatacagtaaagtagtcttcatatattttatacagtttgtattgttctataggttgcttggagtttgtgtccagtgaaaatggatttagaacaacctgggatacttagtaataacaacgcacaaacatgtgtatacacaccaaagaagtgtgcattattcaataaatgtgttcctgatatgttgcatgtaaactgattttgtatggtcaaataatatcttaaatgatcaaggaattgattaaagaaatatgagatattagttacaaaaggaaatcattttgaaatacacgtgaaattttaaatcatgtttcatcaataaatatgattattactttttt

SEQ ID NO: 5748 - protein, 59 aa, Homo sapiens
MTQTTVSRQKPEMTSHYIAQAGLELLASSNPPTSASERTGITDGATEILPQLDYKFSEG

SEQ ID NO: 5749 - DNA, 904 bp, Homo sapiens
agttgcaagggtgtgaggcagaagcaacacaaaagatcttgatatgaagcaattatttttggtcttaaactgctgggactccagatgacccagaccacggtcagcaggcagaagccagatgctattgtcaacagaattgccttcaagattccttttctgattgttcattgctgagatgacatctcactatattgcccaggctggtcttgaacttctagcctcaagcaatcctcccacctcagcctctgaacgtactggaattacagatggagcaactgagattcttccccaactagactataagttctctgagggataaggaacatgtctggtttcctcatctctctgtcacagcaccctgtgaatgcctagaagacagtaagaatcaactgaatgtttgtagaaagaataacgatacttacctatagtctaaaggtttagtgatgaaatgaagtccactaacttctctctgcttacttccaccctcaataacatatttcctcaaaccccacagaggaaagacaattcattttttactattgtttaatagagccatgtttgtatgtagcttcctgttccgcttagcccaagacattaagtgggtcaggagtaaactctgccctctgtttttttccattcctttgtcacctgctcaagtggcagcccagagccgcttggcggcttccctgaagatgagcagagtgcagtagattaggcatggcctttctatctatttctactatggagaagctgaaaaagctatatggctggaaaaaaatcaccttggtactaatttgctattttacaatatttgaaaataaagacctgtggtcttcctatgtatttctttttaaacaatgaggggtatggaacatctatgaataaacatcaaggtcttcaagtg

SEQ ID NO: 5750 - protein, 47 aa, Homo sapiens
MTSHYIAQAGLELLASSNPPTSASERTGITDGATEILPQLDYKFSEG

SEQ ID NO: 5751 - DNA, 877 bp, Homo sapiens
aggagctgaagggaccagcttggccgtcagttgcaagggtgtgaggcagaagcaacacaaaagatcttgatatgaagcaattatttttggtcttaaactgctgggactccagatgacccagaccacggtcagcaggcagaagccagagatgacatctcactatattgcccaggctggtcttgaacttctagcctcaagcaatcctcccacctcagcctctgaacgtactggaattacagatggagcaactgagattcttccccaactagactataagttctctgagggataaggaacatgtctggtttcctcatctctctgtcacagcaccctgtgaatgcctagaagacagtaagaatcaactgaatgtttgtagaaagaataacgatacttacctatagtctaaaggtttagtgatgaaatgaagtccactaacttctctctgcttacttccaccctcaataacatatttcctcaaaccccacagaggaaagacaattcattttttactattgtttaatagagccatgtttgtatgtagcttcctgttccgcttagcccaagacattaagtgggtcaggagtaaactctgccctctgtttttttccattcctttgtcacctgctcaagtggcagcccagagccgcttggcggcttccctgaagatgagcagagtgcagtagattaggcatggcctttctatctatttctactatggagaagctgaaaaagctatatggctggaaaaaaatcaccttggtactaatttgctattttacaatatttgaaaataaagacctgtggtcttcctatgtatttctttttaaacaatgaggggtatggaacatctatgaataaacatcaaggtcttcaagtg

SEQ ID NO: 5752 - protein, 59 aa, Homo sapiens; identical to SEQ ID NO: 5748

SEQ ID NO: 5753 - DNA, 685 bp, Homo sapiens
agcagaaagaaatgggcctttctctgcctctgaactttactgcgaacacaacgatgctgcagctcatggagccctcatctaacctgtaggaaagctaacctgagagcacaggctgggaagtgaaactcatcaaccaatgagaagatgagtttctatcagattgtggagacttcaattttctagaaactacacatgttggatcagacttggtctcgatgctgctatttgagatgatgtgacagggtctccaggcttcctgatgttgtgccatataatgggtttgagaaggaatagacagaactctgacgaagaaaaacacatttgaaagggtggaattttaggcattaagataagaaaactctttaaagatcacgcagaatgcagcaaaggtcccaatggattttcactggagtaataactagaacatccctgactcttcttccagcacctacagcccacactgcttgagtttctgacacaagcctagattccatgtatcctggggtcctcaggacttaggcaccactgcctcacctctggtcgggtggggaaatgcaatgaccaatatttcgactactgctttctctggtgctggtttcactaagccttctgtattgaatatagttaggttagacaaaacaaaacaaaaccaatgcctttaagtaaataaaagcattttatataa

SEQ ID NO: 5754 - protein, 34 aa, Homo sapiens
MTNISTTAFSGAGFTKPSVLNIVRLDKTKQNQCL

SEQ ID NO: 5755 - DNA, 2625 bp, Homo sapiens
tggcttcggacctcagactgctgcagccctaaccttcccagggctcagctctttggagctgcccattcctccggctgcgagaaaggacgcgcgccctgcgtcgggcgaagaaaagaagcaaaacttgtcgggagggtttcgtcatcaacctccttcccgcaaacctaaacctcctgccggggccatccctagacagaggaaagttcctgcagagccgaccagccctagtggatctggggcaggcagcggcgctggctgtggaattagatctgttttgaacccagtggagcgcatcgctggggctcggaagtcaccgtccgcgggcaccgggttggcgctgcccgagtggaaccgacagtttgcgagcctcggctgcaagtggcctctcctccccgcggttgttgttcagtgtcgggtgagggctgcgagtgtggcaagttgcaaagagagcctcagaggtccgaagagcgctgcgctcctactcgcgttcgcttcttcctcttctcggttccctactgtgaaatcgcagcgacatttacaaaggcctccgggtcctaccgagaccgatccgcagcgtttggcccggtcgtgcctattgcatcgggagcccccgagcaccggcgaaggactggcgggtggggtagggaggtggcggcggcggcatggcgaggttcccgaaggccgacctggccgctgcaggagttatgttactttgccacttcttcacggaccagtttcagttcgccgatgggaaacccggagaccaaatccttgattggcagtatggagttactcaggccttccctcacacagaggaggaggtggaagttgattcacacgcgtacagccacaggtggaaaagaaacttggactttctcaaggcggtagacacgaaccgagcaagcgtcggccaagactctcctgagcccagaagcttcacagacctgctgctggatgatgggcaggacaataacactcagatcgaggaggatacagaccacaattactatatatctcgaatatatggtccatctgattctgccagccgggatttatgggtgaacatagaccaaatggaaaaagataaagtgaagattcatggaatattgtccaatactcatcggcaagctgcaagagtgaatctgtccttcgattttccattttatggccacttcctacgtgaaatcactgtggcaaccgggggtttcatatacactggagaagtcgtacatcgaatgctaacagccacacagtacatagcacctttaatggcaaatttcgatcccagtgtatccagaaattcaactgtcagatattttgataatggcacagcacttgtggtccagtgggaccatgtacatctccaggataattataacctgggaagcttcacattccaggcaaccctgctcatggatggacgaatcatctttggatacaaagaaattcctgtcttggtcacacagataagttcaaccaatcatccagtgaaagtcggactgtccgatgcatttgtcgttgtccacaggatccaacaaattcccaatgttcgaagaagaacaatttatgaataccaccgagtagagctacaaatgtcaaaaattaccaacatttcggctgtggagatgaccccattacccacatgcctccagtttaacagatgtggcccctgtgtatcttctcagattggcttcaactgcagttggtgtagtaaacttcaaagatgttccagtggatttgatcgtcatcggcaggactgggtggacagtggatgccctgaagagtcaaaagagaagatgtgtgagaatacagaaccagtggaaacttcttctcgaaccaccacaaccgtaggagcgacaaccacccagttcagggtcctaactaccaccagaagagcagtgacttctcagtttcccaccagcctccctacagaagatgataccaagatagcactacatctaaaagataatggagcttctacagatgacagtgcagctgagaagaaagggggaaccctccacgctggcctcatcattggaatcctcatcctggtcctcattgtagccacagccattcttgtgacagtctatatgtatcaccacccaacatcagcagccagcatcttctttattgagagacgcccaagcagatggcctgcgatgaagtttagaagaggctctggacatcctgcctatgctgaagttgaaccagttggagagaaagaaggctttattgtatcagagcagtgctaaaatttctaggacagaacaacaccagtactggtttacaggtgttaagactaaaattttgcctatacctttaagacaaacaaacaaacacacacacaaacaagctctaagctgctgtagcctgaagaagacaagatttctggacaagctcagcccaggaaacaaagggtaaacaaaaaactaaaacttatacaagataccatttacactgaacatagaattccctagtggaatgtcatctatagttcactcggaacatctcccgtggacttatctgaagtatgacaagattataatgcttttggcttaggtgcagggttgcaaagggatcagaaaaaaaaaatcataataaagctttagttcatgagggatcgac

SEQ ID NO: 5756 - protein, 529 aa, Homo sapiens; identical to SEQ ID NO: 756

SEQ ID NO: 5757 - DNA, 2478 bp, Homo sapiens
tggcttcggacctcagactgctgcagccctaaccttcccagggctcagctctttggagctgcccattcctccggctgcgagaaaggacgcgcgccctgcgtcgggcgaagaaaagaagcaaaacttgtcgggagggtttcgtcatcaacctccttcccgcaaacctaaacctcctgccggggccatccctagacagaggaaagttcctgcagagccgaccagccctagtggatctggggcaggcagcggcgctggctgtggaattagatctgttttgaacccagtggagcgcatcgctggggctcggaagtcaccgtccgcgggcaccgggttggcgctgcccgagtggaaccgacagtttgcgagcctcggctgcaagtggcctctcctccccgcggttgttgttcagtgtcgggtgagggctgcgagtgtggcaagttgcaaagagagcctcagaggtccgaagagcgctgcgctcctactcgcgttcgcttcttcctcttctcggttccctactgtgaaatcgcagcgacatttacaaaggcctccgggtcctaccgagaccgatccgcagcgtttggcccggtcgtgcctattgcatcgggagcccccgagcaccggcgaaggactggcgggtggggtagggaggtggcggcggcggcatggcgaggttcccgaaggccgacctggccgctgcaggagttatgttactttgccacttcttcacggaccagtttcagttcgccgatgggaaacccggagaccaaatccttgattggcagtatggagttactcaggccttccctcacacagaggaggaggtggaagttgattcacacgcgtacagccacaggtggaaaagaaacttggactttctcaaggcggtagacacgaaccgagcaagcgtcggccaagactctcctgagcccagaagcttcacagacctgctgctggatgatgggcaggacaataacactcagatcgagagagtgaatctgtccttcgattttccattttatggccacttcctacgtgaaatcactgtggcaaccgggggtttcatatacactggagaagtcgtacatcgaatgctaacagccacacagtacatagcacctttaatggcaaatttcgatcccagtgtatccagaaattcaactgtcagatattttgataatggcacagcacttgtggtccagtgggaccatgtacatctccaggataattataacctgggaagcttcacattccaggcaaccctgctcatggatggacgaatcatctttggatacaaagaaattcctgtcttggtcacacagataagttcaaccaatcatccagtgaaagtcggactgtccgatgcatttgtcgttgtccacaggatccaacaaattcccaatgttcgaagaagaacaatttatgaataccaccgagtagagctacaaatgtcaaaaattaccaacatttcggctgtggagatgaccccattacccacatgcctccagtttaacagatgtggcccctgtgtatcttctcagattggcttcaactgcagttggtgtagtaaacttcaaagatgttccagtggatttgatcgtcatcggcaggactgggtggacagtggatgccctgaagagtcaaaagagaagatgtgtgagaatacagaaccagtggaaacttcttctcgaaccaccacaaccgtaggagcgacaaccacccagttcagggtcctaactaccaccagaagagcagtgacttctcagtttcccaccagcctccctacagaagatgataccaagatagcactacatctaaaagataatggagcttctacagatgacagtgcagctgagaagaaagggggaaccctccacgctggcctcatcattggaatcctcatcctggtcctcattgtagccacagccattcttgtgacagtctatatgtatcaccacccaacatcagcagccagcatcttctttattgagagacgcccaagcagatggcctgcgatgaagtttagaagaggctctggacatcctgcctatgctgaagttgaaccagttggagagaaagaaggctttattgtatcagagcagtgctaaaatttctaggacagaacaacaccagtactggtttacaggtgttaagactaaaattttgcctatacctttaagacaaacaaacaaacacacacacaaacaagctctaagctgctgtagcctgaagaagacaagatttctggacaagctcagcccaggaaacaaagggtaaacaaaaaactaaaacttatacaagataccatttacactgaacatagaattccctagtggaatgtcatctatagttcactcggaacatctcccgtggacttatctgaagtatgacaagattataatgcttttggcttaggtgcagggttgcaaagggatcagaaaaaaaaaatcataataaagctttagttcatgagggatcgac

SEQ ID NO: 5758 - protein, 480 aa, Homo sapiens
MARFPKADLAAAGVMLLCHFFTDQFQFADGKPGDQILDWQYGVTQAFPHTEEEVEVDSHAYSHRWKRNLDFLKAVDTNRASVGQDSPEPRSFTDLLLDDGQDNNTQIERVNLSFDFPFYGHFLREITVATGGFIYTGEVVHRMLTATQYIAPLMANFDPSVSRNSTVRYFDNGTALVVQWDHVHLQDNYNLGSFTFQATLLMDGRIIFGYKEIPVLVTQISSTNHPVKVGLSDAFVVVHRIQQIPNVRRRTIYEYHRVELQMSKITNISAVEMTPLPTCLQFNRCGPCVSSQIGFNCSWCSKLQRCSSGFDRHRQDWVDSGCPEESKEKMCENTEPVETSSRTTTTVGATTTQFRVLTTTRRAVTSQFPTSLPTEDDTKIALHLKDNGASTDDSAAEKKGGTLHAGLIIGILILVLIVATAILVTVYMYHHPTSAASIFFIERRPSRWPAMKFRRGSGHPAYAEVEPVGEKEGFIVSEQC

SEQ ID NO: 5759 - DNA, 2786 bp, Homo sapiens
tggcttcggacctcagactgctgcagccctaaccttcccagggctcagctctttggagctgcccattcctccggctgcgagaaaggacgcgcgccctgcgtcgggcgaagaaaagaagcaaaacttgtcgggagggtttcgtcatcaacctccttcccgcaaacctaaacctcctgccggggccatccctagacagaggaaagttcctgcagagccgaccagccctagtggatctggggcaggcagcggcgctggctgtggaattagatctgttttgaacccagtggagcgcatcgctggggctcggaagtcaccgtccgcgggcaccgggttggcgctgcccgagtggaaccgacagtttgcgagcctcggctgcaagtggcctctcctccccgcggttgttgttcagtgtcgggtgagggctgcgagtgtggcaagttgcaaagagagcctcagaggtccgaagagcgctgcgctcctactcgcgttcgcttcttcctcttctcggttccctactgtgaaatcgcagcgacatttacaaaggcctccgggtcctaccgagaccgatccgcagcgtttggcccggtcgtgcctattgcatcgggagcccccgagcaccggcgaaggactggcgggtggggtagggaggtggcggcggcggcatggcgaggttcccgaaggccgacctggccgctgcaggagttatgttactttgccacttcttcacggaccagtttcagttcgccgatgggaaacccggagaccaaatccttgattggcagtatggagttactcaggccttccctcacacagaggaggaggtggaagttgattcacacgcgtacagccacaggtggaaaagaaacttggactttctcaaggcggtagacacgaaccgagcaagcgtcggccaagactctcctgagcccagaagcttcacagacctgctgctggatgatgggcaggacaataacactcagatcgaggaggatacagaccacaattactatatatctcgaatatatggtccatctgattctgccagccgggatttatgggtgaacatagaccaaatggaaaaagataaagtgaagattcatggaatattgtccaatactcatcggcaagctgcaagagtgaatctgtccttcgattttccattttatggccacttcctacgtgaaatcactgtggcaaccgggggtttcatatacactggagaagtcgtacatcgaatgctaacagccacacagtacatagcacctttaatggcaaatttcgatcccagtgtatccagaaattcaactgtcagatattttgataatggcacagcacttgtggtccagtgggaccatgtacatctccaggataattataacctgggaagcttcacattccaggcaaccctgctcatggatggacgaatcatctttggatacaaagaaattcctgtcttggtcacacagataagttcaaccaatcatccagtgaaagtcggactgtccgatgcatttgtcgttgtccacaggatccaacaaattcccaatgttcgaagaagaacaatttatgaataccaccgagtagagctacaaatgtcaaaaattaccaacatttcggctgtggagatgaccccattacccacatgcctccagtttaacagatgtggcccctgtgtatcttctcagattggcttcaactgcagttggtgtagtaaacttcaaagatgttccagtggatttgatcgtcatcggcaggactgggtggacagtggatgccctgaagagtcaaaagagaagatgtgtgagaatacagaaccagtggaaacttcttctcgaaccaccacaaccgtaggagcgacaaccacccagttcagggtcctaactaccaccagaagagcagtgacttctcagtttcccaccagcctccctacagaagatgataccaagatagcactacatctaaaagataatggagcttctacagatgacagtgcagctgagaagaaagggggaaccctccacgctggcctcatcattggaatcctcatcctggtcctcattgtagccacagccattcttgtgacagtctatatgtatcaccacccaacatcagcagccagcatcttctttattgagagacgcccaagcagatggcctgcgatgaagtttagaagaggctctggacatcctgcctatgctgaagttgaaccagttggagagaaagaaggctttattgtatcagagcagtgctaaaatttctaggacagaacaacaccagtactggtttacaggtgttaagactaaaattttgcctatacctttaagacaaacaaacaaacacacacacaaacaagctctaagctgctgtagcctgaagaagacaagatttctggacaagctcagcccaggaaacaaagggtaaacaaaaaactaaaacttatacaagataccatttacactgaacatagaattccctagtggaatgtcatctatagttcactcggaacatctcccgtggacttatctgaagtatgacaagattataatgcttttggcttaggtgcagggttgcaaagggatcagaaaaaaaaaatcataataaagctttagttcatgagggatcgacacctttggttcaaatgttctctgatgtctcaaagataactgttttccaaagcctgaaccctttcactcaaaagagcaatgatgaatgtctcaagattgctaagaaaaacagcccatgcaagagtgagaacaaacacaaaataagagattttctacattttc

SEQ ID NO: 5760 - protein, 529 aa, Homo sapiens; identical to SEQ ID NO: 756

SEQ ID NO: 5761 - DNA, 4105 bp, Homo sapiens
tggcttcggacctcagactgctgcagccctaaccttcccagggctcagctctttggagctgcccattcctccggctgcgagaaaggacgcgcgccctgcgtcgggcgaagaaaagaagcaaaacttgtcgggagggtttcgtcatcaacctccttcccgcaaacctaaacctcctgccggggccatccctagacagaggaaagttcctgcagagccgaccagccctagtggatctggggcaggcagcggcgctggctgtggaattagatctgttttgaacccagtggagcgcatcgctggggctcggaagtcaccgtccgcgggcaccgggttggcgctgcccgagtggaaccgacagtttgcgagcctcggctgcaagtggcctctcctccccgcggttgttgttcagtgtcgggtgagggctgcgagtgtggcaagttgcaaagagagcctcagaggtccgaagagcgctgcgctcctactcgcgttcgcttcttcctcttctcggttccctactgtgaaatcgcagcgacatttacaaaggcctccgggtcctaccgagaccgatccgcagcgtttggcccggtcgtgcctattgcatcgggagcccccgagcaccggcgaaggactggcgggtggggtagggaggtggcggcggcggcatggcgaggttcccgaaggccgacctggccgctgcaggagttatgttactttgccacttcttcacggaccagtttcagttcgccgatgggaaacccggagaccaaatccttgattggcagtatggagttactcaggccttccctcacacagaggaggaggtggaagttgattcacacgcgtacagccacaggtggaaaagaaacttggactttctcaaggcggtagacacgaaccgagcaagcgtcggccaagactctcctgagcccagaagcttcacagacctgctgctggatgatgggcaggacaataacactcagatcgaggaggatacagaccacaattactatatatctcgaatatatggtccatctgattctgccagccgggatttatgggtgaacatagaccaaatggaaaaagataaagtgaagattcatggaatattgtccaatactcatcggcaagctgcaagagtgaatctgtccttcgattttccattttatggccacttcctacgtgaaatcactgtggcaaccgggggtttcatatacactggagaagtcgtacatcgaatgctaacagccacacagtacatagcacctttaatggcaaatttcgatcccagtgtatccagaaattcaactgtcagatattttgataatggcacagcacttgtggtccagtgggaccatgtacatctccaggataattataacctgggaagcttcacattccaggcaaccctgctcatggatggacgaatcatctttggatacaaagaaattcctgtcttggtcacacagataagttcaaccaatcatccagtgaaagtcggactgtccgatgcatttgtcgttgtccacaggatccaacaaattcccaatgttcgaagaagaacaatttatgaataccaccgagtagagctacaaatgtcaaaaattaccaacatttcggctgtggagatgaccccattacccacatgcctccagtttaacagatgtggcccctgtgtatcttctcagattggcttcaactgcagttggtgtagtaaacttcaaagatgttccagtggatttgatcgtcatcggcaggactgggtggacagtggatgccctgaagagtcaaaagagaagatgtgtgagaatacagaaccagtggaaacttcttctcgaaccaccacaaccgtaggagcgacaaccacccagttcagggtcctaactaccaccagaagagcagtgacttctcagtttcccaccagcctccctacagaagatgataccaagatagcactacatctaaaagataatggagcttctacagatgacagtgcagctgagaagaaagggggaaccctccacgctggcctcatcattggaatcctcatcctggtcctcattgtagccacagccattcttgtgacagtctatatgtatcaccacccaacatcagcagccagcatcttctttattgagagacgcccaagcagatggcctgcgatgaagtttagaagaggctctggacatcctgcctatgctgaagttgaaccagttggagagaaagaaggctttattgtatcagagcagtgctaaaatttctaggacagaacaacaccagtactggtttacaggtgttaagactaaaattttgcctatacctttaagacaaacaaacaaacacacacacaaacaagctctaagctgctgtagcctgaagaagacaagatttctggacaagctcagcccaggaaacaaagggtaaacaaaaaactaaaacttatacaagataccatttacactgaacatagaattccctagtggaatgtcatctatagttcactcggaacatctcccgtggacttatctgaagtatgacaagattataatgcttttggcttaggtgcagggttgcaaagggatcagaaaaaaaaaatcataataaagctttagttcatgagggatcgacacctttggttcaaatgttctctgatgtctcaaagataactgttttccaaagcctgaaccctttcactcaaaagagcaatgatgaatgtctcaagattgctaagaaaaacagcccatgcaagagtgagaacaaacacaaaataagagattttctacattttcaaaacagatgtgtggcaaaaggatgttgtttttctggtctagatccatctgtaccaacaagttcatcactttacagaacgaatctttttatccgtacaggaggttcaaaccatgtctgcctcttcctttgtaatgaatgacctttctatgagctgtgacaaaatttccgaacaattaactaaggatttgggaagagggggtggcaaacggggctttctgttttcctgcctcagcatgaaaacatctgatttatgctttatggaagccttacctccaatccccaactgttaagtcccatgaaaccacagttgctctgggctgatggaaacaaaaggaaacagtatgaagagttccttaatcatttttgaaacaaaaatgttaagggattttaaacatatgattatttttaattttatgccttttcagtactaaacacccatttcattgctgattcctgtctaagaagccattcacgtcagcatggcgatagaaagaatgaaaaaaccctgctgaatcatacagtaattttctttaaagcacatagtagttacataaatatatatatataaatatatttttgtttataactaacacaaggcaggatcttgtgactctaagagtgcgttttgtcatcaaggcaaaacagatgcaagatgcatcactgcattacttccatagagttgtaaaataatccttaatattagaatatttttctgtcacttagcaaaagtggttcagttcattgccgcgcccatcatgttcttgactatttgatccactttttcgtttatgtcaaccccttccctctctggctaaataaagtggatgcagaaagctccttaaatggagatatcgattgccttggaatcacaatcctgattttgaaaattcctcatgaatgaagaaaggaatggcatcccttgagaaggaaagtggttaatatacatactgagctcctaaagtttaaattcaggtactgagtgtacaatttcaccaacattctaacccatgaaacttttacactctgtgccaagaaactgttggcttttgtaaggtacagtgctcaacatttgcagattcaggtctcaagaagcagagatgtctcataagcagcattttcccaacagtttagcatctgtacacatctgccttggtcatcagtccactcacagagtaccatactttatcatcacaagtgtctgacgtgaacgaatgccattttctattccatatattttgctttacaattttaagtatttgatgaagatggtaactttttcctaacttagttaactattaaaaaaaattttgaaaagcaa

SEQ ID NO: 5762 - protein, 529 aa, Homo sapiens; identical to SEQ ID NO: 756

SEQ ID NO: 5763 - DNA, 1178 bp, Homo sapiens
tcccaggaccactgaacattcagagggctggaggcagagaaaaacttcccctactcaagaaaaagaagctatttttgtcaagttaaatgagcctgaacctgcagagctgaattggcagatgaatattgctaattggtgcagtttcttcggtgcaggaaagagtttccaatcagaccggcaattcattggccacatgaagaacagccagttgtaaggggtaaaataaattggagaagagaacatccacatggattaagtcccaagctcaccctttgttagtgagaatgtagtcacgtggccatacctactacaaggtctatttctggcatctctttccacagcacaggcagccttgcagaatgaaaagtatttctcccacctgccctggcctctgccctggctctgaaagaggcaggctgtgaatgatggttgtcagtgtctggagttttcactgaaaaacagtcccctgaaatggaaagacacacagaggggagtgatctcatcgccactgatttttcccaactttcagttttgtatctccatggtggaactcgatacagcagcatccctcagtggttccagcccagaagtgcaaggggaagccggctgcctgttcatgaattctgtagctcaaaaagcagaggccgagaaagcaaaatttcaaacctttgtcagaaagggtgagaccttgctcagcacgatagctgagaacagcttcctccttcaatgctggtctctctatactgacagttgacagctgatgatcccacattctcagtcatgcgaatgacctcacctgagcaccagtttgtaacggatgtttaagaggaaagcaagggaattaaatgctgcacaggaatttggcacttctgtatagaaatagaaaaactaaatgaaacttatagtaccttccactcaactaagattcttgtgaagcaaagtatatctgggaaaatatagtaatatggttattttgtgttcatagtgtgtgactctacttataagcactttttaatcattataatcaatcactttaaagatcttagagggaacttattaatcaaaatttaagccttctttaaaaaaaaaaaacttcccatatactaattttgcacagaagcaaaagattagattgggattctgcctgttgtggagagacaaagacaagagtgctccag

SEQ ID NO: 5764 - protein, 31 aa, Homo sapiens; identical to SEQ ID NO: 1448

SEQ ID NO: 5765 - DNA, 2801 bp, Homo sapiens
gttgcagtgagccaagattgtgccattgcactccagcctgggtgacagagcgagacttcgtctcagaaaaaaaaaaaaaagtaaggtggatatgtgcagtggctcaggctagccagcctgcaggaccacctttgggaggccagagcaggaagatcccttgaggctggtccctaactcctgacctcaagtgatccgcccgcctcagcctctcaaggtgctgggattacagacatgagccaccacacccggcaaatgtactgtattttagttgttgataaatgtgaaaataaatagaacagggaaaggggataaatagtgggtgaagcggtggaggctgcaattttcagcaggacagggagggcagggtccacggcaaaagtgacagttgggccctagaggaattagaatgtgaggtgaggctgggggacggaacctgtggagcacagaggctactttgaaaccatggaggtgcagcgtgtcgtggaggaggagtgtatcctctgaagcacgccgatctccagagattccttccttactccctctttgctccagccagtggaagtatggctggtgtgagagtttaccttctgaccagaactgtctcaagaatttaggaattcttgttgcaagaatgttgcaagtgcttgtaataagtagaagaggaatagaaggaaggaattaagagctggaagctccctggtggggattctgagcttgtataacacagttaacattgttccccttgaggatattcttcatttatcagcatcatgcagaatgtcaccattcaggagttgaattgtgaattcaattaagtagtgatttgggtgttcctaggtagatatactcacaatatggtagagttgaaaaaatgatggagataaaaacaattttggagggaagtggtctgaaaatacagagcaaagttcttgttttccatttagttaccaggtattttgtaaaccttatgcatgacctttgtatttacagaacaaatgaagcatccattaacttcgaatgatcagatgctagggtgtgaggaattttcaggccaaaatgcactgggttattgtctcctattgacagtgtgatattacagataacctctaggagatcctgaacatattcaggctaaaccaggcaaacaaacattcaggatgttaccagtgtggaaaacccctaggaggtaagtatggcagggaatcagtctgagaaagagggtaaatcgaatgaagctattttggttataaaagtgctgcgaatgtatgagagtacttcaaaactactctctatgctacaaaagccaataagtttagttatgcagttccttttgtgtcattacatttcaatagagtttatttagttttgtttctgtttcacctatgaaatgtgtattagtcaggattctccagagaaacagaaccaatagaatatatgtagatatataaaaagggatttgttataaggaattagattgtgcaattttggaggctgaaaagtcccaccatctgccgtggaaaactggtggtatagtttcagtctaagcccaaaggcctgagaaccaggagaacccgtggtgtaagtcctgacttctgagacccaagaaccaggagctatgatgtccaatgtcccagggcaggagaacatgcatgtcccagatcaacatgagagagataattcacctttcctctttgttctctgtaggccttcaatagattggctagtgcccacctacattgctgagggcagtctctttattcagtctactgattcgaatgttaatttcttctgcagacattctcacaaacacacccaggaataatgttttaccagctacctggctatctgtttagcccagtcaaattgacacatgaaactaaccatcacaaaactcaactcttattttaagatagcagctttaaaaaaatttactatacacatttaattaaatttattttcagtttacctctcagttgtactacttactagctgtgttacaatgagtacaacatttagggtttctgcaccttgatttagttctctagaaaatggtgagtactactattgtctacatcacagaattattttgaggattaaataaaattaaaattataagggctgaggacattacatggcatataatacataattattacatattagctataattattactgttgtgtcatcattattataattaccatcattttctcacagaagcatttcagggctgttattacaaaactctttcccttgtgtttccaatatgccaactatttcaatcaagaaaattaatagcctatggaaagacagtggcctttgtcatcactacgattgattctattaaatgtattaaaagtaatggcaaaaaccccaattacttttgcaccagcataaaatcactaggtgcatgaattttgcataattcttttaatttctcagaaccttgatgtttctcatttgttcaaccaggtagatattattaatcccttcaaagagatgtgaagaacaaagttcagaaatgttaaggacggtaaacgatatcatatttaagggcttggcacttcgttgactcgataaatagtagctactactttgagctattattccctttcatgaaaatcctcctactaaaactatgtgcttcttccaacagagacagccaaaattaagactgatggagaaatttcccccagcaataccacttaaaaatatgtattttttactttaattgcctggtattaagttttctgcaggaatacaaataaaattgcttgtatggctttgagaaactacagtt

SEQ ID NO: 5766 - protein, 68 aa, Homo sapiens
MMSNVPGQENMHVPDQHERDNSPFLFVLCRPSIDWLVPTYIAEGSLFIQSTDSNVNFFCRHSHKHTQE

SEQ ID NO: 5767 - DNA, 543 bp, Homo sapiens
agtcaccaaccctctacttggtcctttgcaatcctttccagaccttctgtggtctcctgtcacacagggctcacctggggggaccctgatggccagattctcttgaacagtctctagggacatattgggtattgctataccttcatccattgaacagttttccagtggctccataatatgtgatatcacaacagattgaatgcagaaacagaacaaatgaagcatccattaacttcgaatgatcagatgctagggtgtgaggaattttcaggccaaaatgcactgggttattgtctcctattgacagtgtgatattacagataacctctaggagatcctgaacatattcaggctaaaccaggcaaacaaacattcaggatgttaccagtgtggaaaacccctaggagagacagccaaaattaagactgatggagaaatttcccccagcaataccacttaaaaatatgtattttttactttaattgcctggtattaagttttctgcaggaatacaaataaaattgcttgtatggctttgagaaa

SEQ ID NO: 5768 - protein, 31 aa, Homo sapiens
MKHPLTSNDQMLGCEEFSGQNALGYCLLLTV

SEQ ID NO: 5769 - DNA, 2926 bp, Homo sapiens
gtggatggcgcggatggcgcggcctccacctgcgggcagtggagagagcggcgagaggaagaatattccccgcgagccgggataaggggccccttcggctcggttgacccaggtcagatcctcccgccgaccttcggcccgccctctacaggcggcccagttcttcccctgctcggctgcccctgcccgcccctcgagggagcgcccgtagccagcgcccccgtaaagaaataaggaggcgcccggcttcccgcccaggcccagggccccagtgcagcctggacacagtattcaaagttttggcgtctgagcattgttatgcgttattttcaagctttgctaacggtttttaaacctttgagatgtttccattaattggaaaaacaatcatctttgataactttcctgatccttctgatacatgggaaatcactgagacaattggcaaaggaacttatgggaaagtttttaaagtattgaataagaaaaatggccaaaaagcagcagtcaaaattcttgatccaattcacgatattgacgaagagattgaagcagaatataacatcttaaaagcactttctgaccaccctaatgtggtcagattctatgggatatactttaagaaggataaagtaaatggagacaagctgtggttggttcttgagctctgcagtggaggatcagtgactgaccttgtgaaaggatttctgaagaggggtgaaagaatgagtgagcctctaattgcctatattttacatgaagcactaatgggacttcaacatttgcataacaacaaaactatccacagagatgtgaaaggcaataacattctattgaccacggaaggtggagtgaaactagtagattttggtgtgtctgcacagctcaccagtacccggcaccgtcggaacacatccgtaggaacaccgttttggatggctcctgaggtgattgcatgtgaacagcaattggataccacttatgacgccagatgtgacacttggtccctgggtatcacggccattgagctgggtgatggagatcctccactagctgaccttcatcccatgagagcactcttcaaaataccaaggtcagatgactaacattgggtccagtatctgcagcccgatttacttcctccagccaccaagtgttcatcatgctcttcatggagacgttcagatatattccaacaagttgggagcagaagatcctggaatattattctgcttcttctgagacattgtatttgttcagtagttgcatttccctggtctaagtaaaagagctttctcttgataatcagtgtgtctttctctcttttgctaggatttgatttcagaaaatagcagttcctcccaccctttatccattccccaatgagtcagtgaggcatcagagtccatagcctgtgcaagtgttttgctttgctttacctaccaatctagtaattttttactacttgctaagatttccctttgttcagaactttaaaataatattattaagaaaattatatataaaatttatccagaaaataatggttttaaacatgttagtattttgaatatgttaatataaaacaataaatttagaagaataacctcttttggtgccatgaaagcacttgactatttatgtggccccccactccttcatgtgtgtttcaacagattttcccctactatcctataaactaatttctttaaacactattttctatgagtggtggttagtcccttgatgtttcagataactaatgtgaaaagactgcctatatttattaaaggtgttatttttaaatatctttttaaggattttgccttaattataatgcagtgcacagccagagcctgtggtgacagggttccaaaacattagaatatttggcatctaactaaattattataagactaaaacatttgaattcatttttaattttgcctttgaatttcttgtcctatctagatgttccaaattataataccttggctatatatcatcctttacatactgcttattttgttaagtggagaaacaacattatggaaaagaatggaaaacctctatactaaatccaagacatttcattaattttgaagaaagcaggaaaaaaatctgtagtttctaattcctattgtcattcagtatgtaaggtgaagttctgtactgccttagctgttttaactgtggattaaaccatcatatttagtctgatgttattactcttgatgataatgccacatgaaggaaggatgacactgttgatagatattgtacctaggtaacaggcaatgtgcaaagtaattctagaaactgcatcatcttagttatttcttaattatgtctaccagcagtggaattccaagaatactgactatggtaatatggagaaaaagggaatctgaaaagctacccagttctgagtgttctgaaataatccaaactttgttattcaaagcaagccaataaatctcataaaaggaaattttcaggaggacaagaaacaaaacaacatttctggagaaaagaattacttcttttaatgtgcaaattagcaatcttcaaattgtcctaaggattgtgaaatgagcttagtcctgatctggggtagatgagtagctgcacttttctttaatgagcctgtacaaactgtacattaatttcattataagctatttaaggagtaatgcagaactgaagacaaagtatttccatttcactaatgaaaacaaagagctgttagaattaacataaagcagcacttcagcaaattcaactatcatggttgatcaatgttgcttgattacagagttagatcagcctcattttcaaatgatgttcctttgtattcaacgaatgtgccaaaaaatatatttgttcagcttaaactgaaaggaattaataaaattgttaaagttgt

SEQ ID NO: 5770 - protein, 247 aa, Homo sapiens
MFPLIGKTIIFDNFPDPSDTWEITETIGKGTYGKVFKVLNKKNGQKAAVKILDPIHDIDEEIEAEYNILKALSDHPNVVRFYGIYFKKDKVNGDKLWLVLELCSGGSVTDLVKGFLKRGERMSEPLIAYILHEALMGLQHLHNNKTIHRDVKGNNILLTTEGGVKLVDFGVSAQLTSTRHRRNTSVGTPFWMAPEVIACEQQLDTTYDARCDTWSLGITAIELGDGDPPLADLHPMRALFKIPRSDD

SEQ ID NO: 5771 - DNA, 5786 bp, Homo sapiens
gtggatggcgcggatggcgcggcctccacctgcgggcagtggagagagcggcgagaggaagaatattccccgcgagccgggataaggggccccttcggctcggttgacccaggtcagatcctcccgccgaccttcggcccgccctctacaggcggcccagttcttcccctgctcggctgcccctgcccgcccctcgagggagcgcccgtagccagcgcccccgtaaagaaataaggaggcgcccggcttcccgcccaggcccagggccccagtgcagcctggacacagtattcaaagttttggcgtctgagcattgttatgcgttattttcaagctttgctaacggtttttaaacctttgagatgtttccattaattggaaaaacaatcatctttgataactttcctgatccttctgatacatgggaaatcactgagacaattggcaaaggaacttatgggaaagtttttaaagtattgaataagaaaaatggccaaaaagcagcagtcaaaattcttgatccaattcacgatattgacgaagagattgaagcagaatataacatcttaaaagcactttctgaccaccctaatgtggtcagattctatgggatatactttaagaaggataaagtaaatggagacaagctgtggttggttcttgagctctgcagtggaggatcagtgactgaccttgtgaaaggatttctgaagaggggtgaaagaatgagtgagcctctaattgcctatattttacatgaagcactaatgggacttcaacatttgcataacaacaaaactatccacagagatgtgaaaggcaataacattctattgaccacggaaggtggagtgaaactagtagattttggtgtgtctgcacagctcaccagtacccggcaccgtcggaacacatccgtaggaacaccgttttggatggctcctgaggtgattgcatgtgaacagcaattggataccacttatgacgccagatgtgacacttggtccctgggtatcacggccattgagctgggtgatggagatcctccactagctgaccttcatcccatgagagcactcttcaaaataccaaggaatccacccccaaaactaaggcagcctgagctatggtcagcagaattcaatgacttcataagcaagtgcttgactaaagattatgaaaagcgtccaacagtgtcagaacttttacagcataaattcattactcaaattgagggcaaagatgtgatgctacaaaaacaactaacggaattcattggcatccatcaatgcatgggaggcacagaaaaggccagacgtgaacgtattcacacgaagaaagggaacttcaaccgacctctaatatccaatctgaaggatgtagatgatttagcaaccctagaaattttggatgagaatacagtctcagagcaacttgagaagtgttattccagagatcagatctacgtctatgtgggagacatactcattgctcttaacccttttcagagtctgggtctttactccacaaagcattccaaactatatattggatcaaagagaactgccagtcctcctcacatttttgcaatggctgacttaggatatcaatctatgataacatataattcagatcagtgcattgttatttctggagaaagtggtgctggaaagactgaaaatgctcatcttttagttcagcagctgacagtgcttggaaaggctaataacagaaccttgcaagagaagattttacaagtgaacaatttggtagaagcctttggcaatgcctgcactattataaatgacaattctagcagatttggaaaatacttagaaatgaaattcacctcttctggagcggtagtgggagcacagatttctgaatatctcctggaaaaatcccgagttatccaccaagctattggagaaaaaaattttcatattttttactacatttatgctggtttggctgaaaagaagaaactagcccattacaaactgcctgaaaataagcctcccaggtacctacaaaatgaccacctcagaacagtacaagacatcatgaataatagtttctataaatcccagtatgaattaattgagcaatgtttcaaagtcataggttttacaatggagcaacttggtagtatatacagcatactcgctgcaatcttgaatgttggcaacattgaattttcttctgtggcaactgaacaccagattgacaagagccacatttctaatcatacagccctggagaactgtgcttctttgctttgcattcgggcagatgagctacaagaagctctcacctcccactgtgtggtcactagaggagaaacaattatacgacccaatactgtagaaaaagctaccgatgtcagggatgccatggctaaaactttatatggacgtctctttagttggatagtcaattgcattaacagtttgttgaagcatgactcatcaccaagtgggaatggtgatgagctgagcattggcattcttgatatatttggctttgaaaatttcaaaaaaaattccttcgagcagctgtgcattaacattgcaaatgaacaaattcagtattattataatcaacatgtgtttgcatgggaacagaatgaatacctaaatgaagatgtggatgctagagttattgaatatgaggataactggcccctcttagatatgtttctgcaaaagccaatgggtttactttccctacttgatgaagaaagtagatttcccaaggccactgaccagactcttgtagaaaaatttgaaggtaacctgaaatcacaatacttctggagacccaaaagaatggaacttagttttggaattcaccattatgcaggaaaggtcctctataatgcaagtggattcttagccaaaaacagagacactcttcctactgacattgtgctacttttgaggtcatccgacaacagtgtaattaggcaactagtcaaccaccctctgaccaaaacaggtaatctgccacattctaaaactaaaaatgttataaactatcaaatgaggacttcagaaaaattaatcaacctggcaaagggcgacactggagaagccacacgtcatgccagagagacaaccaacatgaaaacacaaacggttgcatcatattttagatattccctgatggatttgttgtctaaaatggtggtgggccaacctcattttgtccgttgcatcaaaccaaatagtgagcgtcaggcaagaaaatatgacaaagagaaagttctgctacagcttcggtacacaggaattctggaaacagcaagaattcgaagactaggattctcccatcggatactttttgctaactttataaagcggtactaccttctctgctacaagtcgagcgaggagccccgcatgagccctgacacctgtgccaccattttggaaaaagctggtctcgataactgggctcttggaaaaacaaaagtgttccttaagtattatcacgtggagcagttaaatctaatgcgaaaggaagctattgacaagcttattttgattcaagcttgtgtcagagcattcttgtgttcaagaagataccaaaaaatacaggagaaaaggaaagaaagcgctataataatacagtcagctgcaagaggacaccttgtcaggaaacaaagaaaagaaattgttgacatgaaaaacacagcagtaacaaccattcaaacttctgatcaggaattcgactacaagaaaaactttgaaaatacaagggaatctttcgtgaagaaacaagcagaaaatgcaatctctgctaatgaaagattcatttcagctccaaataataaaggaagtgtatctgtagtgaagacttccactttcaaacctgaagaggaaaccaccaatgctgtggagagtaacaacagagtgtatcagactccaaaaaaaatgaataatgtgtatgaggaagaggttaagcaagaattctaccttgtagggccagaagtaagccccaaacagaagtctgtcaaagacctggaagagaacagcaatctaaggaaagtggagaaagaggaagctatgatccagagttactatcagaggtacacagaggagaggaattgtgaagagtcaaaagcagcatatctagaaaggaaggccatatcagaaaggccaagctacccagtgccttggttagctgaaaatgagacttcctttaaaaaaactttggaacctacacttagccaaaggtcaatttatcaaaatgcaaacagcatggaaaaagaaaagaagacatctgtagttacccagcgtgcaccgatatgcagccaggaggaaggcagaggccgtctgaggcatgagacagtcaaagagaggcaagttgaaccagtgacacaggcccaggaggaagaagataaagcagcggtattcattcagagcaaataccggggttacaagagaaggcagcagttgaggaaggacaagatgtcttcttttaagcatcagaggattgtcacaacaccaacagaagtagcaagaaacactcataatttgtattcctatcccacaaaacatgaggaaatcaataacatcaagaagaaggataacaaagactcgaaagcaacttcagaaagagaagcatgtggtttggcaattttttcaaaacagatatcaaagttatctgaagaatatttcattctgcagaaaaaattgaatgaaatgattttgtcacagcaactgaagtcactttatctgggtgtctcgcaccataagccaattaatagacgagtttcttctcagcagtgcctctcaggtgtctgtaaaggagaggagccaaaaatattgagacccccaagacgaccccggaaacccaaaacattaaataaccctgaagactccacatactattatctacttcataagtcaatccaagaagaaaaacgaagaccaaggaaagacagtcagggaaaattattagatttggaagatttctattataaggaatttttgcccagtcgttctggaccaaaggaacatagccctagtttaagagaacgaagaccacagcaagaactccagaatcaatgtattaaggctaatgaaaggtgctgggcggcggagagccccgagaaggaggaggagagagagccagcagccaacccctacgacttcaggaggctcctgcgcaaaacctcccagcgccggcgcctcgtccagcagtcctaaccgttcaacgaggcagtcaccgccgtcggaaggcgctggagcctgcggggcagcaggggccaagcaggcactctggggctggcaccagcaggcactgaagctgcggccctgatctccgcagaggctgcctgctgcgctcggccctcaagtgcccgggccggccttcgtgctccgaaacaagagacctgggagccctcgggaaacctcccccgacgctctctctcggaactcccgcaccctcctttctcaccagcccgccagttgtggcaaccctgtccttgttcccctaatctatcactttgttctttttttttgtgactcctgtggactccactgcgcctgggatctcgccaacccctctctcatttggggtgactgaattcacagatttttttttttattggaaacggcttttcttggccaacagaacacttgctagcggttgaatcttagagaaaaaagcccgggaggggtggggagaatttcgaagatgtatttcatctcaagcttgctctttctcttcctttggttattaaggtcactaaataaaggaagtgccttggaaaacccgtg

SEQ ID NO: 5772 - protein, 1616 aa, Homo sapiens
MFPLIGKTIIFDNFPDPSDTWEITETIGKGTYGKVFKVLNKKNGQKAAVKILDPIHDIDEEIEAEYNILKALSDHPNVVRFYGIYFKKDKVNGDKLWLVLELCSGGSVTDLVKGFLKRGERMSEPLIAYILHEALMGLQHLHNNKTIHRDVKGNNILLTTEGGVKLVDFGVSAQLTSTRHRRNTSVGTPFWMAPEVIACEQQLDTTYDARCDTWSLGITAIELGDGDPPLADLHPMRALFKIPRNPPPKLRQPELWSAEFNDFISKCLTKDYEKRPTVSELLQHKFITQIEGKDVMLQKQLTEFIGIHQCMGGTEKARRERIHTKKGNFNRPLISNLKDVDDLATLEILDENTVSEQLEKCYSRDQIYVYVGDILIALNPFQSLGLYSTKHSKLYIGSKRTASPPHIFAMADLGYQSMITYNSDQCIVISGESGAGKTENAHLLVQQLTVLGKANNRTLQEKILQVNNLVEAFGNACTIINDNSSRFGKYLEMKFTSSGAVVGAQISEYLLEKSRVIHQAIGEKNFHIFYYIYAGLAEKKKLAHYKLPENKPPRYLQNDHLRTVQDIMNNSFYKSQYELIEQCFKVIGFTMEQLGSIYSILAAILNVGNIEFSSVATEHQIDKSHISNHTALENCASLLCIRADELQEALTSHCVVTRGETIIRPNTVEKATDVRDAMAKTLYGRLFSWIVNCINSLLKHDSSPSGNGDELSIGILDIFGFENFKKNSFEQLCINIANEQIQYYYNQHVFAWEQNEYLNEDVDARVIEYEDNWPLLDMFLQKPMGLLSLLDEESRFPKATDQTLVEKFEGNLKSQYFWRPKRMELSFGIHHYAGKVLYNASGFLAKNRDTLPTDIVLLLRSSDNSVIRQLVNHPLTKTGNLPHSKTKNVINYQMRTSEKLINLAKGDTGEATRHARETTNMKTQTVASYFRYSLMDLLSKMVVGQPHFVRCIKPNSERQARKYDKEKVLLQLRYTGILETARIRRLGFSHRILFANFIKRYYLLCYKSSEEPRMSPDTCATILEKAGLDNWALGKTKVFLKYYHVEQLNLMRKEAIDKLILIQACVRAFLCSRRYQKIQEKRKESAIIIQSAARGHLVRKQRKEIVDMKNTAVTTIQTSDQEFDYKKNFENTRESFVKKQAENAISANERFISAPNNKGSVSVVKTSTFKPEEETTNAVESNNRVYQTPKKMNNVYEEEVKQEFYLVGPEVSPKQKSVKDLEENSNLRKVEKEEAMIQSYYQRYTEERNCEESKAAYLERKAISERPSYPVPWLAENETSFKKTLEPTLSQRSIYQNANSMEKEKKTSVVTQRAPICSQEEGRGRLRHETVKERQVEPVTQAQEEEDKAAVFIQSKYRGYKRRQQLRKDKMSSFKHQRIVTTPTEVARNTHNLYSYPTKHEEINNIKKKDNKDSKATSEREACGLAIFSKQISKLSEEYFILQKKLNEMILSQQLKSLYLGVSHHKPINRRVSSQQCLSGVCKGEEPKILRPPRRPRKPKTLNNPEDSTYYYLLHKSIQEEKRRPRKDSQGKLLDLEDFYYKEFLPSRSGPKEHSPSLRERRPQQELQNQCIKANERCWAAESPEKEEEREPAANPYDFRRLLRKTSQRRRLVQQS

SEQ ID NO: 5773 - DNA, 347 bp, Homo sapiens
gttttattagcatttgagtattttatttctttttgaatgtttcattgcttttcctgaagtggcattgtcttagtctgtttggctcatcatgtagtaatttgtgcctctcccagattacccattttgctgatgtcaccaaatcttgaatccctccagttcagtgtcagcagggaacaaaatttccagtctcttaacctgggtgtgtgtgtgtgtgtgtgtgtgtgtctgtgtgtgtactgctcaggcaggcttctgaatgttgatattttgcatatgtgataagagggtttcgagtcttttgattaaagacttccaaatgaccccttgctttttgccctgctcccctc

SEQ ID NO: 5774 - protein, 49 aa, Homo sapiens
MSPNLESLQFSVSREQNFQSLNLGVCVCVCVCLCVYCSGRLLNVDILHM

SEQ ID NO: 5775 - DNA, 1626 bp, Homo sapiens
atcgcgggccagaggcggagccgccgccctgccgcgactttcagactccgaccatggcctcgcgctggtggcggtggcggcgcggctgctcctggaagccggcggcgcggagccccgggcccggctcccccggccgtgcgggaccgttggggccgagcgccgctgccgaagtccgcgcgcaggttcataggcggaagggacttgacttgtctcagataccctatattaatcttgtgaagcatttaacatctgcctgtccaaatgtatgtcgtatatcacggtttcatcacacaaccccagacagtaaaacacacagtggtgaaaaatacaccgatcctttcaaactcggttggagagacttgaaaggtctgtatgaggacattagaaaggaactgcttatatcaacatcagaacttaaggaaatgtctgagtactactttgatgggaaagggaaagcctttcgaccaattattgtggcgctaatggcccgagcatgcaatattcatcataacaactcccgacatgtgcaagccagccagcgcgccatagccttaattgcagaaatgatccacactgctagtctggttcacgatgacgttattgacgatgcaagttctcgaagaggaaaacacacagttaataagatctggggtgaaaagaaggctgttcttgctggagatttaattctttctgcagcatctatagctctggcacgaattggaaatacaactgttatatctattttaacccaagttattgaagatttggtgcgtggtgaatttcttcagctcgggtcaaaagaaaatgagaatgaaagatttgcacactaccttgagaagacattcaagaagaccgccagcctgatagccaacagttgtaaagcagtctctgttctaggatgtcccgacccagtggtgcatgagatcgcctatcagtacggaaaaaatgtaggaatagcttttcagctaatagatgatgtattggacttcacctcgtgttctgaccagatgggcaaaccaacatcagctgatctgaagctcgggttagccactggtcctgtcctgtttgcctgtcagcagttcccagaaatgaatgctatgatcatgcgacggttcagtttgcctggagatgtagacagagctcgacagtatgtactacagagtgatggtgtgcaacaaacaacctacctcgcccagcagtactgccatgaagcaataagagagatcagtaaacttcgaccatccccagaaagagatgccctcattcagctttcagaaattgtactcacaagagataaatgacaactctttctgttctttctggcagctatcttaccagactgtgcctaaagaattttgtggaatacactttgtttgcttcatgtgcagataaccaaaaatcattttaaaagatatcaaacttattgatgggcaatttatttttttttattgcaaaagttttttcagaaaactttttaaatgtaattaataaaccacctgaatctgtcattctagtcctataaattataatcaaggtatcttgatggttatatgtggtattgtttacactgttaatatccacatgtaaggccattacacaaataaataaccaatgttaaaattcaaa

SEQ ID NO: 5776 - protein, 415 aa, Homo sapiens; identical to SEQ ID NO: 760

SEQ ID NO: 5777 - DNA, 1425 bp, Homo sapiens
agaggcggagccgccgccctgccgcgactttcagactccgaccatggcctcgcgctggtggcggtggcggcgcggctgctcctggaagccggcggcgcggagccccgggcccggctcccccggccgtgcgggaccgttggggccgagcgccgctgccgaagtccgcgcgcaggttcataggcggaagggacttgacttgtctcagataccctatattaatcttgtgaagcatttaacatctgcctgtccaaatgtatgtcgtatatcacggtttcatcacacaaccccagacagtaaaacacacagtggtgaaaaatacaccgatcctttcaaactcggttggagagacttgaaaggtctgtatgaggacattagaaaggaactgcttatatcaacatcagaacttaaggaaatgtctgagtactactttgatgggaaagggaaagcctttcgaccaattattgtggcgctaatggcccgagcatgcaatattcatcataacaactcccgacatgtgcaagccagccagcgcgccatagccttaattgcagaaatgatccacactgctagtctggttcacgatgacgttattgacgatgcaagttctcgaagaggaaaacacacagttaataagatctggggtgaaaagaaggctgttcttgctggagatttaattctttctgcagcatctatagctctggcacgaattggaaatacaactgttatatctattttaacccaagttattgaagatttggtgcgtggtgaatttcttcagctcgggtcaaaagaaaatgagaatgaaagatttgcacactaccttgagaagacattcaagaagaccgccagcctgatagccaacagttgtaaagcagtatttcccagaaatgaatgctatgatcatgcgacggttcagtttgcctggagatgtagacagagctcgacagtatgtactacagagtgatggtgtgcaacaaacaacctacctcgcccagcagtactgccatgaagcaataagagagatcagtaaacttcgaccatccccagaaagagatgccctcattcagctttcagaaattgtactcacaagagataaatgacaactctttctgttctttctggcagctatcttaccagactgtgcctaaagaattttgtggaatacactttgtttgcttcatgtgcagataaccaaaaatcattttaaaagatatcaaacttattgatgggcaatttatttttttttattgcaaaagttttttcagaaaactttttaaatgtaattaataaaccacctgaatctgtcattctagtcctataaattataatcaaggtatcttgatggttatatgtggtattgtttacactgttaatatccacatgtaaggccattacacaaataaataaccaatgttaaaattcaaa

SEQ ID NO: 5778 - protein, 306 aa, Homo sapiens
MASRWWRWRRGCSWKPAARSPGPGSPGRAGPLGPSAAAEVRAQVHRRKGLDLSQIPYINLVKHLTSACPNVCRISRFHHTTPDSKTHSGEKYTDPFKLGWRDLKGLYEDIRKELLISTSELKEMSEYYFDGKGKAFRPIIVALMARACNIHHNNSRHVQASQRAIALIAEMIHTASLVHDDVIDDASSRRGKHTVNKIWGEKKAVLAGDLILSAASIALARIGNTTVISILTQVIEDLVRGEFLQLGSKENENERFAHYLEKTFKKTASLIANSCKAVFPRNECYDHATVQFAWRCRQSSTVCTTE

SEQ ID NO: 5779 - DNA, 815 bp, Homo sapiens
tatctgtgtctgaagcaggaggcttgagatgatttttatggacacaccaagaaataactgcattcagaaacaggtctctgttctaggatgtcccgacccagtggtgcatgagatcgcctatcagtacggaaaaaatgtaggaatagcttttcagctaatagatgatgtattggacttcacctcgtgttctgaccagatgggcaaaccaacatcagctgatctgaagctcgggttagccactggtcctgtcctgtttgcctgtcagcagttcccagaaatgaatgctatgatcatgcgacggttcagtttgcctggagatgtagacagagctcgacagtatgtactacagagtgatggtgtgcaacaaacaacctacctcgcccagcagtactgccatgaagcaataagagagatcagtaaacttcgaccatccccagaaagagatgccctcattcagctttcagaaattgtactcacaagagataaatgacaactctttctgttctttctggcagctatcttaccagactgtgcctaaagaattttgtggaatacactttgtttgcttcatgtgcagataaccaaaaatcattttaaaagatatcaaacttattgatgggcaatttatttttttttattgcaaaagttttttcagaaaactttttaaatgtaattaataaaccacctgaatctgtcattctagtcctataaattataatcaaggtatcttgatggttatatgtggtattgtttacactgttaatatccacatgtaaggccattacacaaataaataaccaatgttaaaattcaaa

SEQ ID NO: 5780 - protein, 153 aa, Homo sapiens
MIFMDTPRNNCIQKQVSVLGCPDPVVHEIAYQYGKNVGIAFQLIDDVLDFTSCSDQMGKPTSADLKLGLATGPVLFACQQFPEMNAMIMRRFSLPGDVDRARQYVLQSDGVQQTTYLAQQYCHEAIREISKLRPSPERDALIQLSEIVLTRDK

SEQ ID NO: 5781 - DNA, 957 bp, Homo sapiens
ggctagtctcaaactcctgacctcaggtgatccgcccacctcggcctcccagagtgctgggattacaggcgtgtgccaccacgcctggccagaaccatgttgttttaaagatgtactttattcctcctgcctctcttaactcagtgttggactaggataaaacatcagaataaacaaggactaatgtcttctcctcccatacaccaccacagtgcctaggcatagacggtggatgtctcttagctcagcttttgttgccacagtttactgctcccccacatcatctagacacttagtttcatttttgttgtttcttgttatttcctattgttacaaactagtgttagaacacttgtttctcccaagagaaataaatagattttctcagattttctctctttttttgttagttcccagaaatgaatgctatgatcatgcgacggttcagtttgcctggagatgtagacagagctcgacagtatgtactacagagtgatggtgtgcaacaaacaacctacctcgcccagcagtactgccatgaagcaataagagagatcagtaaacttcgaccatccccagaaagagatgccctcattcagctttcagaaattgtactcacaagagataaatgacaactctttctgttctttctggcagctatcttaccagactgtgcctaaagaattttgtggaatacactttgtttgcttcatgtgcagataaccaaaaatcattttaaaagatatcaaacttattgatgggcaatttatttttttttattgcaaaagttttttcagaaaactttttaaatgtaattaataaaccacctgaatctgtcattctagtcctataaattataatcaaggtatcttgatggttatatgtggtattgtttacactgttaatatccacatgtaaggccattacacaaataaataaccaatgttaaaattcaaa

SEQ ID NO: 5782 - protein, 87 aa, Homo sapiens [sequence omitted]

SEQ ID NO: 5783 - DNA, 3511 bp, Homo sapiens
gtcatttttattgttttgtttactgtaagttcctttttgtttgttttttttaattacatcttcaacactttatgtttaaatcttaattgttgatgtattcttagaaaatcgaatctttaggatctaggctttccctcatcccgtgcttatgttttactagcaataatgcaaaattttagcttgctttctacattaaaaaactaattatgaatataaacctttttaaaaatactcaattagattttctactggttggggattctttttccattttttcaacttgtaaaatgtaaataacagagtagaaaatctgcacacagaagcagacctaatactaccaactttacttttctcttcatcaaaacaaacaataatcaacaaagaaacaaaaatctgtccacaggagactgaatttttagggaaccaaagctgtttcaagccaaaatcaggggcatgaatgagcagagtgaagagtgatcaaaccattaacgtaatgttactcatatcattactgcagtccaaatgacaaaagtgacatagatttattttagattgttaacatttgtcccgatctgaaccttggaataaggaaactactcctataatccttataaaaagagacattgtctcctaacaccctgcattcattaatttgtagtacttccagatacccttatttttagctcattttgttatttttaaatgattcttgagtagcataaactttaacacaccaagcttttatttctaatcattgcatgttttattatagtgcatgctgtacttaagttagagctttcttaaattctgttaacttataagtttccatctagacttatttttgattcaaatcaatcatatgaatctttttagttgctgatagtccaactccaccgccaccacctccaccagatgacattcccatgtttgatgactctccacctcccccaccaccaccaccagtggattatgaagatgaggaggctgcagtagttcagtataatgatccatatgcagatggggatcctgcttgggcccccaagaattatattgagaaagttgttgcaatatatgattatacaaaagacaaggatgatgagctgtcatttatggagggtgcaatcatttatgttataaagaagaatgatgatggctggtatgaaggagtctgcaatcgagtgactggtctgttccctgggaactatgttgaatcaatcatgcactatactgattaatttttttttttcttttgaagtagattcttattactcagtcatactgtgggactattatggttaacagaactgtcttaatatgttttaaaatgtgcccatattttcagaacatgctgttttattggtaaattgaatgtctacctgtaagcataaatctttgaggcagtttatgtattgctgaatagcaatttatacaagaagctgtccataactgattatgcttatgtacttacttacacatttttaactttatgaccagcctaaatattctgggggaagtggggtataatatttaacgaatcatgattcagattgtaccattacatgtttcagtgcagcatggttactaacgctatgtcagactaatattaaaatcagaaaatttaaatgctggtgctggtcagactttttttgttagattctctcatttaaaaaaaatactgtttgtttaaagcatgcataaaaatttatgtattgaaatatacttaaaaattcaagatgcttcccatttgtgtaatatttacctggaggactcgtacttaggtgtcttaacgtgaattgagtctccaaggtctccatgtgaaacaagcaaaaagagaattatctgtaatgttgtaatttgtacctaagttttttaatgagtgaaatttgcattataaactttttccattcataaatacataagtgaaccaaaggtttttgtcctttccttcactgatttgctttaaaaaaaataaaagataatgatttattgcagaattatgattctattttctcaatatgttaacttggaaaaaaattttagccttatcttaatctgtcccaacagcaatgtgacggatttttgcagattcaaaatctgcaatggttatttacaagtcaatctactgaattccttttttaaataatcttttgaaactaagaaaatgtgtcaaattgtgtgcattcattctgtaggtaaaattcttaaggattgccatgtcagtccttcagttgtacagtgaactgttgtacactggttcaatgaaaggaagttaaaagtaccttttacatattgtaaaagtggatacagttgatttgtgagtaggcactctttaatccattacctggcactagcaacattagaattttaaaataaaataattgggaaagaaggtgggtcatgtattaatcagtgaacagagatttacctaaccaacagacttggattgtcttttgacataatcaaaatgcaacacatgcactttgtgtgtctcctcttaattgaagggagggctgagggatgttttctcttcttgtcttgtgtataattctctattgcttaggatattaaagtagagcactcaagtgtgggtttctgtgttattgaggatttgtttggaattcaaattacagttatgtactggatgctacagacttataacagcatagtgaatggtaagactagtgcaaaacagttatttctgaaaattaaagaccattattgctaccaaatcaatgtgactatttcatatgcattttgcctttgttaattttaaacaaacaaagtatcattagtgatcagctagctaccttctactttccatttttcaagtggattgttctcttaatttgtatataacctgttgtctaaattttatgtacagtcttttataataaaccattctcctatatgaaattttggatactgttaaaatataactcatgtggacttcaatgcagacttcacatttttctgacctttactcctacggtaaatcaagacaaaccatttgaattttaacattggttatttatttgtgtaatggccttacatgtggatattaacagtgtaaacaataccacatataaccatcaagataccttgattataatttataggactagaatgacagattcaggtggtttattaattacatttaaaaagttttctgaaaaaacttttgcaataaaaaaaaataaattgcccatcaataagtttgatatcttttaaaatgatttttggttatctgcacatgaagcaaacaaagtgtattccacaaaattctttaggcacagtctggtaagatagctgccagaaagaacagaaagagttgtcatttatctcttgtgagtacaatttctgaaagctgaatgagggcatctctttctggggatggtcgaagtttactgatctctcttattgcttcatggcagtactgctgggcgaggtaggttgtttgttgcacaccatcactctataagatacagaacaaaacagaacagatgcctgtcac

SEQ ID NO: 5784 - protein, 103 aa, Homo sapiens
MFDDSPPPPPPPPVDYEDEEAAVVQYNDPYADGDPAWAPKNYIEKVVAIYDYTKDKDDELSFMEGAIIYVIKKNDDGWYEGVCNRVTGLFPGNYVESIMHYTD

SEQ ID NO: 5785 - DNA, 2905 bp, Homo sapiens
cagcagccccgggctcagctcctggttcccagtatggcacaatgaccaggcagatatctcgacacaactctactacttcttcgacatcttctggtggatacagacgaactccctctgtgactgctcaattttctgctcagcctcatgttaatggaggtccactttattctcaaaattcaatttctattgctccaccccctccccctatgcctcagttgactccacagatacctctcacaggcttcgtggccagggtgcaggaaaacattgctgatagtccaactccaccgccaccacctccaccagatgacattcccatgtttgatgactctccacctcccccaccaccaccaccagtggattatgaagatgaggaggctgcagtagttcagtataatgatccatatgcagatggggatcctgcttgggcccccaagaattatattgagaaagttgttgcaatatatgattatacaaaagacaaggatgatgagctgtcatttatggagggtgcaatcatttatgttataaagaagaatgatgatggctggtatgaaggagtctgcaatcgagtgactggtctgttccctgggaactatgttgaatcaatcatgcactatactgattaatttttttttttcttttgaagtagattcttattactcagtcatactgtgggactattatggttaacagaactgtcttaatatgttttaaaatgtgcccatattttcagaacatgctgttttattggtaaattgaatgtctacctgtaagcataaatctttgaggcagtttatgtattgctgaatagcaatttatacaagaagctgtccataactgattatgcttatgtacttacttacacatttttaactttatgaccagcctaaatattctgggggaagtggggtataatatttaacgaatcatgattcagattgtaccattacatgtttcagtgcagcatggttactaacgctatgtcagactaatattaaaatcagaaaatttaaatgctggtgctggtcagactttttttgttagattctctcatttaaaaaaaatactgtttgtttaaagcatgcataaaaatttatgtattgaaatatacttaaaaattcaagatgcttcccatttgtgtaatatttacctggaggactcgtacttaggtgtcttaacgtgaattgagtctccaaggtctccatgtgaaacaagcaaaaagagaattatctgtaatgttgtaatttgtacctaagttttttaatgagtgaaatttgcattataaactttttccattcataaatacataagtgaaccaaaggtttttgtcctttccttcactgatttgctttaaaaaaaataaaagataatgatttattgcagaattatgattctattttctcaatatgttaacttggaaaaaaattttagccttatcttaatctgtcccaacagcaatgtgacggatttttgcagattcaaaatctgcaatggttatttacaagtcaatctactgaattccttttttaaataatcttttgaaactaagaaaatgtgtcaaattgtgtgcattcattctgtaggtaaaattcttaaggattgccatgtcagtccttcagttgtacagtgaactgttgtacactggttcaatgaaaggaagttaaaagtaccttttacatattgtaaaagtggatacagttgatttgtgagtaggcactctttaatccattacctggcactagcaacattagaattttaaaataaaataattgggaaagaaggtgggtcatgtattaatcagtgaacagagatttacctaaccaacagacttggattgtcttttgacataatcaaaatgcaacacatgcactttgtgtgtctcctcttaattgaagggagggctgagggatgttttctcttcttgtcttgtgtataattctctattgcttaggatattaaagtagagcactcaagtgtgggtttctgtgttattgaggatttgtttggaattcaaattacagttatgtactggatgctacagacttataacagcatagtgaatggtaagactagtgcaaaacagttatttctgaaaattaaagaccattattgctaccaaatcaatgtgactatttcatatgcattttgcctttgttaattttaaacaaacaaagtatcattagtgatcagctagctaccttctactttccatttttcaagtggattgttctcttaatttgtatataacctgttgtctaaattttatgtacagtcttttataataaaccattctcctatatgaaattttggatactgttaaaatataactcatgtggacttcaatgcagacttcacatttttctgacctttactcctacggtaaatcaagacaaaccatttgaattttaacattggttatttatttgtgtaatggccttacatgtggatattaacagtgtaaacaataccacatataaccatcaagataccttgattataatttataggactagaatgacagattcaggtggtttattaattacatttaaaaagttttctgaaaaaacttttgcaataaaaaaaaataaattgcccatcaataagtttgatatcttttaaaatgatttttggttatctgcacatgaagcaaacaaagtgtattccacaaaattctttaggcacagtctggtaagatagctgccagaaagaacagaaagagttgtcatttatctcttgtgagtacaatttctgaaagctgaatgagggcatctctttctggggatggtcgaagtttactgatctctcttattgcttcatggcagtactgctgggcgaggtaggttgtttgttgcacaccatcactctataagatacagaacaaaacagaacagatgcctgtcac

SEQ ID NO: 5786 - protein, 195 aa, Homo sapiens
MTRQISRHNSTTSSTSSGGYRRTPSVTAQFSAQPHVNGGPLYSQNSISIAPPPPPMPQLTPQIPLTGFVARVQENIADSPTPPPPPPPDDIPMFDDSPPPPPPPPVDYEDEEAAVVQYNDPYADGDPAWAPKNYIEKVVAIYDYTKDKDDELSFMEGAIIYVIKKNDDGWYEGVCNRVTGLFPGNYVESIMHYTD

SEQ ID NO: 5787 - DNA, 2783 bp, Homo sapiens
gtatccgggctgtgaggtgctcggagcctcggcggaccttgctgcctctgtctctttaacgcgagaggaagcgatgcagaggggtggaaaatggcagagctgcagatacctctcacaggcttcgtggccagggtgcaggaaaacattgctgatagtccaactccaccgccaccacctccaccagatgacattcccatgtttgatgactctccacctcccccaccaccaccaccagtggattatgaagatgaggaggctgcagtagttcagtataatgatccatatgcagatggggatcctgcttgggcccccaagaattatattgagaaagttgttgcaatatatgattatacaaaagacaaggatgatgagctgtcatttatggagggtgcaatcatttatgttataaagaagaatgatgatggctggtatgaaggagtctgcaatcgagtgactggtctgttccctgggaactatgttgaatcaatcatgcactatactgattaatttttttttttcttttgaagtagattcttattactcagtcatactgtgggactattatggttaacagaactgtcttaatatgttttaaaatgtgcccatattttcagaacatgctgttttattggtaaattgaatgtctacctgtaagcataaatctttgaggcagtttatgtattgctgaatagcaatttatacaagaagctgtccataactgattatgcttatgtacttacttacacatttttaactttatgaccagcctaaatattctgggggaagtggggtataatatttaacgaatcatgattcagattgtaccattacatgtttcagtgcagcatggttactaacgctatgtcagactaatattaaaatcagaaaatttaaatgctggtgctggtcagactttttttgttagattctctcatttaaaaaaaatactgtttgtttaaagcatgcataaaaatttatgtattgaaatatacttaaaaattcaagatgcttcccatttgtgtaatatttacctggaggactcgtacttaggtgtcttaacgtgaattgagtctccaaggtctccatgtgaaacaagcaaaaagagaattatctgtaatgttgtaatttgtacctaagttttttaatgagtgaaatttgcattataaactttttccattcataaatacataagtgaaccaaaggtttttgtcctttccttcactgatttgctttaaaaaaaataaaagataatgatttattgcagaattatgattctattttctcaatatgttaacttggaaaaaaattttagccttatcttaatctgtcccaacagcaatgtgacggatttttgcagattcaaaatctgcaatggttatttacaagtcaatctactgaattccttttttaaataatcttttgaaactaagaaaatgtgtcaaattgtgtgcattcattctgtaggtaaaattcttaaggattgccatgtcagtccttcagttgtacagtgaactgttgtacactggttcaatgaaaggaagttaaaagtaccttttacatattgtaaaagtggatacagttgatttgtgagtaggcactctttaatccattacctggcactagcaacattagaattttaaaataaaataattgggaaagaaggtgggtcatgtattaatcagtgaacagagatttacctaaccaacagacttggattgtcttttgacataatcaaaatgcaacacatgcactttgtgtgtctcctcttaattgaagggagggctgagggatgttttctcttcttgtcttgtgtataattctctattgcttaggatattaaagtagagcactcaagtgtgggtttctgtgttattgaggatttgtttggaattcaaattacagttatgtactggatgctacagacttataacagcatagtgaatggtaagactagtgcaaaacagttatttctgaaaattaaagaccattattgctaccaaatcaatgtgactatttcatatgcattttgcctttgttaattttaaacaaacaaagtatcattagtgatcagctagctaccttctactttccatttttcaagtggattgttctcttaatttgtatataacctgttgtctaaattttatgtacagtcttttataataaaccattctcctatatgaaattttggatactgttaaaatataactcatgtggacttcaatgcagacttcacatttttctgacctttactcctacggtaaatcaagacaaaccatttgaattttaacattggttatttatttgtgtaatggccttacatgtggatattaacagtgtaaacaataccacatataaccatcaagataccttgattataatttataggactagaatgacagattcaggtggtttattaattacatttaaaaagttttctgaaaaaacttttgcaataaaaaaaaataaattgcccatcaataagtttgatatcttttaaaatgatttttggttatctgcacatgaagcaaacaaagtgtattccacaaaattctttaggcacagtctggtaagatagctgccagaaagaacagaaagagttgtcatttatctcttgtgagtacaatttctgaaagctgaatgagggcatctctttctggggatggtcgaagtttactgatctctcttattgcttcatggcagtactgctgggcgaggtaggttgtttgttgcacaccatcactctataagatacagaacaaaacagaacagatgcctgtcac

SEQ ID NO: 5788 - protein, 138 aa, Homo sapiens
MAELQIPLTGFVARVQENIADSPTPPPPPPPDDIPMFDDSPPPPPPPPVDYEDEEAAVVQYNDPYADGDPAWAPKNYIEKVVAIYDYTKDKDDELSFMEGAIIYVIKKNDDGWYEGVCNRVTGLFPGNYVESIMHYTD

SEQ ID NO: 5789 - DNA, 3890 bp, Homo sapiens
acaataccaggcgggagggcgggtaggcggtttgtatccgggctgtgaggtgctcggagcctcggcggaccttgctgcctctgtctctttaacgcgagaggaagcgatgcagaggggtggaaaatggcagagctgcagatgttactagaggaggagatcccgtctggcaagagggcgctgatcgagagttaccagaacctgactcgggtggcagactactgtgaaaacaactacatacagagacatggttttgctgtgttgctgtgtctgctctcaaactcctggcctcaggctacagacaagagaaaagctttagaggagaccaaagcctatacaacccaatctctagctagtgttgcttatcaaataaatgcattggccaacaatgtactccagttgctggatatccaagcctctcagcttcggagaatggagtcttccatcaatcatatctcacagactgtggatattcataaggagaaagtggcacgaagagagattggtattttgacaacaaataagaatacatcaagaactcacaaaataatagcacctgcgaatatggagcgccctgtaaggtatattcggaaacctatcgattacacagttctggatgatgtgggccatggtgtcaagtggctaaaagccaagcatggaaataaccagcctgcaagaactggcacactgtcgagaacaaatcctcctactcagaaaccgccaagtcctcccatgtcaggccggggaacactgggacggaatactccttataaaaccctggaacctgttaaacccccaacagttcctaatgactatatgaccagtcctgctaggcttggaagtcagcatagtccaggcaggacagcatctttaaatcagagaccaaggacacacagtggaagtagtggaggaagtggaagtcgagaaaacagtggtagcagtagtattggcattcccattgctgtgcctacaccttcgccacccactattggaccagaaaacatttctgtccctcctccttctggagctccaccagcaccacctctggcaccacttctcccagtgagcactgtgatagcagccccgggctcagctcctggttcccagtatggcacaatgaccaggcagatatctcgacacaactctactacttcttcgacatcttctggtggatacagacgaactccctctgtgactgctcaattttctgctcagcctcatgttaatggaggtccactttattctcaaaattcaattgctgatagtccaactccaccgccaccacctccaccagatgacattcccatgtttgatgactctccacctcccccaccaccaccaccagtggattatgaagatgaggaggctgcagtagttcagtataatgatccatatgcagatggggatcctgcttgggcccccaagaattatattgagaaagttgttgcaatatatgattatacaaaagacaaggatgatgagctgtcatttatggagggtgcaatcatttatgttataaagaagaatgatgatggctggtatgaaggagtctgcaatcgagtgactggtctgttccctgggaactatgttgaatcaatcatgcactatactgattaatttttttttttcttttgaagtagattcttattactcagtcatactgtgggactattatggttaacagaactgtcttaatatgttttaaaatgtgcccatattttcagaacatgctgttttattggtaaattgaatgtctacctgtaagcataaatctttgaggcagtttatgtattgctgaatagcaatttatacaagaagctgtccataactgattatgcttatgtacttacttacacatttttaactttatgaccagcctaaatattctgggggaagtggggtataatatttaacgaatcatgattcagattgtaccattacatgtttcagtgcagcatggttactaacgctatgtcagactaatattaaaatcagaaaatttaaatgctggtgctggtcagactttttttgttagattctctcatttaaaaaaaatactgtttgtttaaagcatgcataaaaatttatgtattgaaatatacttaaaaattcaagatgcttcccatttgtgtaatatttacctggaggactcgtacttaggtgtcttaacgtgaattgagtctccaaggtctccatgtgaaacaagcaaaaagagaattatctgtaatgttgtaatttgtacctaagttttttaatgagtgaaatttgcattataaactttttccattcataaatacataagtgaaccaaaggtttttgtcctttccttcactgatttgctttaaaaaaaataaaagataatgatttattgcagaattatgattctattttctcaatatgttaacttggaaaaaaattttagccttatcttaatctgtcccaacagcaatgtgacggatttttgcagattcaaaatctgcaatggttatttacaagtcaatctactgaattccttttttaaataatcttttgaaactaagaaaatgtgtcaaattgtgtgcattcattctgtaggtaaaattcttaaggattgccatgtcagtccttcagttgtacagtgaactgttgtacactggttcaatgaaaggaagttaaaagtaccttttacatattgtaaaagtggatacagttgatttgtgagtaggcactctttaatccattacctggcactagcaacattagaattttaaaataaaataattgggaaagaaggtgggtcatgtattaatcagtgaacagagatttacctaaccaacagacttggattgtcttttgacataatcaaaatgcaacacatgcactttgtgtgtctcctcttaattgaagggagggctgagggatgttttctcttcttgtcttgtgtataattctctattgcttaggatattaaagtagagcactcaagtgtgggtttctgtgttattgaggatttgtttggaattcaaattacagttatgtactggatgctacagacttataacagcatagtgaatggtaagactagtgcaaaacagttatttctgaaaattaaagaccattattgctaccaaatcaatgtgactatttcatatgcattttgcctttgttaattttaaacaaacaaagtatcattagtgatcagctagctaccttctactttccatttttcaagtggattgttctcttaatttgtatataacctgttgtctaaattttatgtacagtcttttataataaaccattctcctatatgaaattttggatactgttaaaatataactcatgtggacttcaatgcagacttcacatttttctgacctttactcctacggtaaatcaagacaaaccatttgaattttaacattggttatttatttgtgtaatggccttacatgtggatattaacagtgtaaacaataccacatataaccatcaagataccttgattataatttataggactagaatgacagattcaggtggtttattaattacatttaaaaagttttctgaaaaaacttttgcaataaaaaaaaataaattgcccatcaataagtttgatatcttttaaaatgatttttggttatctgcacatgaagcaaacaaagtgtattccacaaaattctttaggcacagtctggtaagatagctgccagaaagaacagaaagagttgtcatttatctcttgtgagtacaatttctgaaagctgaatgagggcatctctttctggggatggtcgaagtttactgatctctcttattgcttcatggcagtactgctgggcgaggtaggttgtttgttgcacaccatcactctataagatacagaacaaaacagaacagatgcctgtcac

SEQ ID NO: 5790 - protein, 496 aa, Homo sapiens
MAELQMLLEEEIPSGKRALIESYQNLTRVADYCENNYIQRHGFAVLLCLLSNSWPQATDKRKALEETKAYTTQSLASVAYQINALANNVLQLLDIQASQLRRMESSINHISQTVDIHKEKVARREIGILTTNKNTSRTHKIIAPANMERPVRYIRKPIDYTVLDDVGHGVKWLKAKHGNNQPARTGTLSRTNPPTQKPPSPPMSGRGTLGRNTPYKTLEPVKPPTVPNDYMTSPARLGSQHSPGRTASLNQRPRTHSGSSGGSGSRENSGSSSIGIPIAVPTPSPPTIGPENISVPPPSGAPPAPPLAPLLPVSTVIAAPGSAPGSQYGTMTRQISRHNSTTSSTSSGGYRRTPSVTAQFSAQPHVNGGPLYSQNSIADSPTPPPPPPPDDIPMFDDSPPPPPPPPVDYEDEEAAVVQYNDPYADGDPAWAPKNYIEKVVAIYDYTKDKDDELSFMEGAIIYVIKKNDDGWYEGVCNRVTGLFPGNYVESIMHYTD

SEQ ID NO: 5791 - DNA, 3958 bp, Homo sapiens
gagtgaggaggaaggggaggaggtgccgtcccacaataccaggcgggagggcgggtaggcggtttgtatccgggctgtgaggtgctcggagcctcggcggaccttgctgcctctgtctctttaacgcgagaggaagcgatgcagaggggtggaaaatggcagagctgcagatgttactagaggaggagatcccgtctggcaagagggcgctgatcgagagttaccagaacctgactcgggtggcagactactgtgaaaacaactacatacaggctacagacaagagaaaagctttagaggagaccaaagcctatacaacccaatctctagctagtgttgcttatcaaataaatgcattggccaacaatgtactccagttgctggatatccaagcctctcagcttcggagaatggagtcttccatcaatcatatctcacagactgtggatattcataaggagaaagtggcacgaagagagattggtattttgacaacaaataagaatacatcaagaactcacaaaataatagcacctgcgaatatggagcgccctgtaaggtatattcggaaacctatcgattacacagttctggatgatgtgggccatggtgtcaagtggctaaaagccaagcatggaaataaccagcctgcaagaactggcacactgtcgagaacaaatcctcctactcagaaaccgccaagtcctcccatgtcaggccggggaacactgggacggaatactccttataaaaccctggaacctgttaaacccccaacagttcctaatgactatatgaccagtcctgctaggcttggaagtcagcatagtccaggcaggacagcatctttaaatcagagaccaaggacacacagtggaagtagtggaggaagtggaagtcgagaaaacagtggtagcagtagtattggcattcccattgctgtgcctacaccttcgccacccactattggaccagaaaacatttctgtccctcctccttctggagctccaccagcaccacctctggcaccacttctcccagtgagcactgtgatagcagccccgggctcagctcctggttcccagtatggcacaatgaccaggcagatatctcgacacaactctactacttcttcgacatcttctggtggatacagacgaactccctctgtgactgctcaattttctgctcagcctcatgttaatggaggtccactttattctcaaaattcaatttctattgctccaccccctccccctatgcctcagttgactccacagatacctctcacaggcttcgtggccagggtgcaggaaaacattgctgatagtccaactccaccgccaccacctccaccagatgacattcccatgtttgatgactctccacctcccccaccaccaccaccagtggattatgaagatgaggaggctgcagtagttcagtataatgatccatatgcagatggggatcctgcttgggcccccaagaattatattgagaaagttgttgcaatatatgattatacaaaagacaaggatgatgagctgtcatttatggagggtgcaatcatttatgttataaagaagaatgatgatggctggtatgaaggagtctgcaatcgagtgactggtctgttccctgggaactatgttgaatcaatcatgcactatactgattaatttttttttttcttttgaagtagattcttattactcagtcatactgtgggactattatggttaacagaactgtcttaatatgttttaaaatgtgcccatattttcagaacatgctgttttattggtaaattgaatgtctacctgtaagcataaatctttgaggcagtttatgtattgctgaatagcaatttatacaagaagctgtccataactgattatgcttatgtacttacttacacatttttaactttatgaccagcctaaatattctgggggaagtggggtataatatttaacgaatcatgattcagattgtaccattacatgtttcagtgcagcatggttactaacgctatgtcagactaatattaaaatcagaaaatttaaatgctggtgctggtcagactttttttgttagattctctcatttaaaaaaaatactgtttgtttaaagcatgcataaaaatttatgtattgaaatatacttaaaaattcaagatgcttcccatttgtgtaatatttacctggaggactcgtacttaggtgtcttaacgtgaattgagtctccaaggtctccatgtgaaacaagcaaaaagagaattatctgtaatgttgtaatttgtacctaagttttttaatgagtgaaatttgcattataaactttttccattcataaatacataagtgaaccaaaggtttttgtcctttccttcactgatttgctttaaaaaaaataaaagataatgatttattgcagaattatgattctattttctcaatatgttaacttggaaaaaaattttagccttatcttaatctgtcccaacagcaatgtgacggatttttgcagattcaaaatctgcaatggttatttacaagtcaatctactgaattccttttttaaataatcttttgaaactaagaaaatgtgtcaaattgtgtgcattcattctgtaggtaaaattcttaaggattgccatgtcagtccttcagttgtacagtgaactgttgtacactggttcaatgaaaggaagttaaaagtaccttttacatattgtaaaagtggatacagttgatttgtgagtaggcactctttaatccattacctggcactagcaacattagaattttaaaataaaataattgggaaagaaggtgggtcatgtattaatcagtgaacagagatttacctaaccaacagacttggattgtcttttgacataatcaaaatgcaacacatgcactttgtgtgtctcctcttaattgaagggagggctgagggatgttttctcttcttgtcttgtgtataattctctattgcttaggatattaaagtagagcactcaagtgtgggtttctgtgttattgaggatttgtttggaattcaaattacagttatgtactggatgctacagacttataacagcatagtgaatggtaagactagtgcaaaacagttatttctgaaaattaaagaccattattgctaccaaatcaatgtgactatttcatatgcattttgcctttgttaattttaaacaaacaaagtatcattagtgatcagctagctaccttctactttccatttttcaagtggattgttctcttaatttgtatataacctgttgtctaaattttatgtacagtcttttataataaaccattctcctatatgaaattttggatactgttaaaatataactcatgtggacttcaatgcagacttcacatttttctgacctttactcctacggtaaatcaagacaaaccatttgaattttaacattggttatttatttgtgtaatggccttacatgtggatattaacagtgtaaacaataccacatataaccatcaagataccttgattataatttataggactagaatgacagattcaggtggtttattaattacatttaaaaagttttctgaaaaaacttttgcaataaaaaaaaataaattgcccatcaataagtttgatatcttttaaaatgatttttggttatctgcacatgaagcaaacaaagtgtattccacaaaattctttaggcacagtctggtaagatagctgccagaaagaacagaaagagttgtcatttatctcttgtgagtacaatttctgaaagctgaatgagggcatctctttctggggatggtcgaagtttactgatctctcttattgcttcatggcagtactgctgggcgaggtaggttgtttgttgcacaccatcactctataagatacagaacaaaacagaacagatgcctgtcac

SEQ ID NO: 5792 - protein, 508 aa, Homo sapiens; identical to SEQ ID NO: 768

SEQ ID NO: 5793 - DNA, 3802 bp, Homo sapiens
gggggctggagagagtgaggaggaaggggaggaggtgccgtcccacaataccaggcgggagggcgggtaggcggtttgtatccgggctgtgaggtgctcggagcctcggcggaccttgctgcctctgtctctttaacgcgagaggaagcgatgcagaggggtggaaaatggcagagctgcagatgttactagaggaggagatcccgtctggcaagagggcgctgatcgagagttaccagaacctgactcgggtggcagactactgtgaaaacaactacatacaggctacagacaagagaaaagctttagaggagaccaaagcctatacaacccaatctctagctagtgttgcttatcaaataaatgcattggccaacaatgtactccagttgctggatatccaagcctctcagcttcggagaatggagtcttccatcaatcatatctcacagactgtggatattcataaggagaaagtggcacgaagagagattggtattttgacaacaaataagaatacatcaagaactcacaaaataatagcacctgcgaatatggagcgccctgtaaggtatattcggaaacctatcgattacacagttctggatgatgtgggccatggtgtcaagtggctaaaagccaagcatggaaataaccagcctgcaagaactggcacactgtcgagaacaaatcctcctactcagaaaccgccaagtcctcccatgtcaggccggggaacactgggacggaatactccttataaaaccctggaacctgttaaacccccaacagttcctaatgactatatgaccagtcctgctaggcttggaagtcagcatagtccaggcaggacagcatctttaaatcagagaccaaggacacacagtggaagtagtggaggaagtggaagtcgagaaaacagtggtagcagtagtattggcattcccattgctgtgcctacaccttcgccacccactattggaccagcagccccgggctcagctcctggttcccagtatggcacaatgaccaggcagatatctcgacacaactctactacttcttcgacatcttctggtggatacagacgaactccctctgtgactgctcaattttctgctcagcctcatgttaatggaggtccactttattctcaaaattcaattgctgatagtccaactccaccgccaccacctccaccagatgacattcccatgtttgatgactctccacctcccccaccaccaccaccagtggattatgaagatgaggaggctgcagtagttcagtataatgatccatatgcagatggggatcctgcttgggcccccaagaattatattgagaaagttgttgcaatatatgattatacaaaagacaaggatgatgagctgtcatttatggagggtgcaatcatttatgttataaagaagaatgatgatggctggtatgaaggagtctgcaatcgagtgactggtctgttccctgggaactatgttgaatcaatcatgcactatactgattaatttttttttttcttttgaagtagattcttattactcagtcatactgtgggactattatggttaacagaactgtcttaatatgttttaaaatgtgcccatattttcagaacatgctgttttattggtaaattgaatgtctacctgtaagcataaatctttgaggcagtttatgtattgctgaatagcaatttatacaagaagctgtccataactgattatgcttatgtacttacttacacatttttaactttatgaccagcctaaatattctgggggaagtggggtataatatttaacgaatcatgattcagattgtaccattacatgtttcagtgcagcatggttactaacgctatgtcagactaatattaaaatcagaaaatttaaatgctggtgctggtcagactttttttgttagattctctcatttaaaaaaaatactgtttgtttaaagcatgcataaaaatttatgtattgaaatatacttaaaaattcaagatgcttcccatttgtgtaatatttacctggaggactcgtacttaggtgtcttaacgtgaattgagtctccaaggtctccatgtgaaacaagcaaaaagagaattatctgtaatgttgtaatttgtacctaagttttttaatgagtgaaatttgcattataaactttttccattcataaatacataagtgaaccaaaggtttttgtcctttccttcactgatttgctttaaaaaaaataaaagataatgatttattgcagaattatgattctattttctcaatatgttaacttggaaaaaaattttagccttatcttaatctgtcccaacagcaatgtgacggatttttgcagattcaaaatctgcaatggttatttacaagtcaatctactgaattccttttttaaataatcttttgaaactaagaaaatgtgtcaaattgtgtgcattcattctgtaggtaaaattcttaaggattgccatgtcagtccttcagttgtacagtgaactgttgtacactggttcaatgaaaggaagttaaaagtaccttttacatattgtaaaagtggatacagttgatttgtgagtaggcactctttaatccattacctggcactagcaacattagaattttaaaataaaataattgggaaagaaggtgggtcatgtattaatcagtgaacagagatttacctaaccaacagacttggattgtcttttgacataatcaaaatgcaacacatgcactttgtgtgtctcctcttaattgaagggagggctgagggatgttttctcttcttgtcttgtgtataattctctattgcttaggatattaaagtagagcactcaagtgtgggtttctgtgttattgaggatttgtttggaattcaaattacagttatgtactggatgctacagacttataacagcatagtgaatggtaagactagtgcaaaacagttatttctgaaaattaaagaccattattgctaccaaatcaatgtgactatttcatatgcattttgcctttgttaattttaaacaaacaaagtatcattagtgatcagctagctaccttctactttccatttttcaagtggattgttctcttaatttgtatataacctgttgtctaaattttatgtacagtcttttataataaaccattctcctatatgaaattttggatactgttaaaatataactcatgtggacttcaatgcagacttcacatttttctgacctttactcctacggtaaatcaagacaaaccatttgaattttaacattggttatttatttgtgtaatggccttacatgtggatattaacagtgtaaacaataccacatataaccatcaagataccttgattataatttataggactagaatgacagattcaggtggtttattaattacatttaaaaagttttctgaaaaaacttttgcaataaaaaaaaataaattgcccatcaataagtttgatatcttttaaaatgatttttggttatctgcacatgaagcaaacaaagtgtattccacaaaattctttaggcacagtctggtaagatagctgccagaaagaacagaaagagttgtcatttatctcttgtgagtacaatttctgaaagctgaatgagggcatctctttctggggatggtcgaagtttactgatctctcttattgcttcatggcagtactgctgggcgaggtaggttgtttgttgcacaccatcactctataagatacagaacaaaacagaacagatgcctgtcac

SEQ ID NO: 5794 - protein, 452 aa, Homo sapiens; identical to SEQ ID NO: 764

SEQ ID NO: 5795 - DNA, 3901 bp, Homo sapiens
tcaggcggctgcacgaagggggtggaggggggctggagagagtgaggaggaaggggaggaggtgccgtcccacaataccaggcgggagggcgggtaggcggtttgtatccgggctgtgaggtgctcggagcctcggcggaccttgctgcctctgtctctttaacgcgagaggaagcgatgcagaggggtggaaaatggcagagctgcagatgttactagaggaggagatcccgtctggcaagagggcgctgatcgagagttaccagaacctgactcgggtggcagactactgtgaaaacaactacatacaggctacagacaagagaaaagctttagaggagaccaaagcctatacaacccaatctctagctagtgttgcttatcaaataaatgcattggccaacaatgtactccagttgctggatatccaagcctctcagcttcggagaatggagtcttccatcaatcatatctcacagactgtggatattcataaggagaaagtggcacgaagagagattggtattttgacaacaaataagaatacatcaagaactcacaaaataatagcacctgcgaatatggagcgccctgtaaggtatattcggaaacctatcgattacacagttctggatgatgtgggccatggtgtcaagcatggaaataaccagcctgcaagaactggcacactgtcgagaacaaatcctcctactcagaaaccgccaagtcctcccatgtcaggccggggaacactgggacggaatactccttataaaaccctggaacctgttaaacccccaacagttcctaatgactatatgaccagtcctgctaggcttggaagtcagcatagtccaggcaggacagcatctttaaatcagagaccaaggacacacagtggaagtagtggaggaagtggaagtcgagaaaacagtggtagcagtagtattggcattcccattgctgtgcctacaccttcgccacccactattggaccagcagccccgggctcagctcctggttcccagtatggcacaatgaccaggcagatatctcgacacaactctactacttcttcgacatcttctggtggatacagacgaactccctctgtgactgctcaattttctgctcagcctcatgttaatggaggtccactttattctcaaaattcaatttctattgctccaccccctccccctatgcctcagttgactccacagatacctctcacaggcttcgtggccagggtgcaggaaaacattgctgatagtccaactccaccgccaccacctccaccagatgacattcccatgtttgatgactctccacctcccccaccaccaccaccagtggattatgaagatgaggaggctgcagtagttcagtataatgatccatatgcagatggggatcctgcttgggcccccaagaattatattgagaaagttgttgcaatatatgattatacaaaagacaaggatgatgagctgtcatttatggagggtgcaatcatttatgttataaagaagaatgatgatggctggtatgaaggagtctgcaatcgagtgactggtctgttccctgggaactatgttgaatcaatcatgcactatactgattaatttttttttttcttttgaagtagattcttattactcagtcatactgtgggactattatggttaacagaactgtcttaatatgttttaaaatgtgcccatattttcagaacatgctgttttattggtaaattgaatgtctacctgtaagcataaatctttgaggcagtttatgtattgctgaatagcaatttatacaagaagctgtccataactgattatgcttatgtacttacttacacatttttaactttatgaccagcctaaatattctgggggaagtggggtataatatttaacgaatcatgattcagattgtaccattacatgtttcagtgcagcatggttactaacgctatgtcagactaatattaaaatcagaaaatttaaatgctggtgctggtcagactttttttgttagattctctcatttaaaaaaaatactgtttgtttaaagcatgcataaaaatttatgtattgaaatatacttaaaaattcaagatgcttcccatttgtgtaatatttacctggaggactcgtacttaggtgtcttaacgtgaattgagtctccaaggtctccatgtgaaacaagcaaaaagagaattatctgtaatgttgtaatttgtacctaagttttttaatgagtgaaatttgcattataaactttttccattcataaatacataagtgaaccaaaggtttttgtcctttccttcactgatttgctttaaaaaaaataaaagataatgatttattgcagaattatgattctattttctcaatatgttaacttggaaaaaaattttagccttatcttaatctgtcccaacagcaatgtgacggatttttgcagattcaaaatctgcaatggttatttacaagtcaatctactgaattccttttttaaataatcttttgaaactaagaaaatgtgtcaaattgtgtgcattcattctgtaggtaaaattcttaaggattgccatgtcagtccttcagttgtacagtgaactgttgtacactggttcaatgaaaggaagttaaaagtaccttttacatattgtaaaagtggatacagttgatttgtgagtaggcactctttaatccattacctggcactagcaacattagaattttaaaataaaataattgggaaagaaggtgggtcatgtattaatcagtgaacagagatttacctaaccaacagacttggattgtcttttgacataatcaaaatgcaacacatgcactttgtgtgtctcctcttaattgaagggagggctgagggatgttttctcttcttgtcttgtgtataattctctattgcttaggatattaaagtagagcactcaagtgtgggtttctgtgttattgaggatttgtttggaattcaaattacagttatgtactggatgctacagacttataacagcatagtgaatggtaagactagtgcaaaacagttatttctgaaaattaaagaccattattgctaccaaatcaatgtgactatttcatatgcattttgcctttgttaattttaaacaaacaaagtatcattagtgatcagctagctaccttctactttccatttttcaagtggattgttctcttaatttgtatataacctgttgtctaaattttatgtacagtcttttataataaaccattctcctatatgaaattttggatactgttaaaatataactcatgtggacttcaatgcagacttcacatttttctgacctttactcctacggtaaatcaagacaaaccatttgaattttaacattggttatttatttgtgtaatggccttacatgtggatattaacagtgtaaacaataccacatataaccatcaagataccttgattataatttataggactagaatgacagattcaggtggtttattaattacatttaaaaagttttctgaaaaaacttttgcaataaaaaaaaataaattgcccatcaataagtttgatatcttttaaaatgatttttggttatctgcacatgaagcaaacaaagtgtattccacaaaattctttaggcacagtctggtaagatagctgccagaaagaacagaaagagttgtcatttatctcttgtgagtacaatttctgaaagctgaatgagggcatctctttctggggatggtcgaagtttactgatctctcttattgcttcatggcagtactgctgggcgaggtaggttgtttgttgcacaccatcactctataagatacagaacaaaacagaacagatgcctgtcac

SEQ ID NO: 5796 - protein, 476 aa, Homo sapiens; identical to SEQ ID NO: 766

SEQ ID NO: 5797 - DNA, 3814 bp, Homo sapiens
tcaggcggctgcacgaagggggtggaggggggctggagagagtgaggaggaaggggaggaggtgccgtcccacaataccaggcgggagggcgggtaggcggtttgtatccgggctgtgaggtgctcggagcctcggcggaccttgctgcctctgtctctttaacgcgagaggaagcgatgcagaggggtggaaaatggcagagctgcagatgttactagaggaggagatcccgtctggcaagagggcgctgatcgagagttaccagaacctgactcgggtggcagactactgtgaaaacaactacatacaggctacagacaagagaaaagctttagaggagaccaaagcctatacaacccaatctctagctagtgttgcttatcaaataaatgcattggccaacaatgtactccagttgctggatatccaagcctctcagcttcggagaatggagtcttccatcaatcatatctcacagactgtggatattcataaggagaaagtggcacgaagagagattggtattttgacaacaaataagaatacatcaagaactcacaaaataatagcacctgcgaatatggagcgccctgtaaggtatattcggaaacctatcgattacacagttctggatgatgtgggccatggtgtcaagcatggaaataaccagcctgcaagaactggcacactgtcgagaacaaatcctcctactcagaaaccgccaagtcctcccatgtcaggccggggaacactgggacggaatactccttataaaaccctggaacctgttaaacccccaacagttcctaatgactatatgaccagtcctgctaggcttggaagtcagcatagtccaggcaggacagcatctttaaatcagagaccaaggacacacagtggaagtagtggaggaagtggaagtcgagaaaacagtggtagcagtagtattggcattcccattgctgtgcctacaccttcgccacccactattggaccagcagccccgggctcagctcctggttcccagtatggcacaatgaccaggcagatatctcgacacaactctactacttcttcgacatcttctggtggatacagacgaactccctctgtgactgctcaattttctgctcagcctcatgttaatggaggtccactttattctcaaaattcaattgctgatagtccaactccaccgccaccacctccaccagatgacattcccatgtttgatgactctccacctcccccaccaccaccaccagtggattatgaagatgaggaggctgcagtagttcagtataatgatccatatgcagatggggatcctgcttgggcccccaagaattatattgagaaagttgttgcaatatatgattatacaaaagacaaggatgatgagctgtcatttatggagggtgcaatcatttatgttataaagaagaatgatgatggctggtatgaaggagtctgcaatcgagtgactggtctgttccctgggaactatgttgaatcaatcatgcactatactgattaatttttttttttcttttgaagtagattcttattactcagtcatactgtgggactattatggttaacagaactgtcttaatatgttttaaaatgtgcccatattttcagaacatgctgttttattggtaaattgaatgtctacctgtaagcataaatctttgaggcagtttatgtattgctgaatagcaatttatacaagaagctgtccataactgattatgcttatgtacttacttacacatttttaactttatgaccagcctaaatattctgggggaagtggggtataatatttaacgaatcatgattcagattgtaccattacatgtttcagtgcagcatggttactaacgctatgtcagactaatattaaaatcagaaaatttaaatgctggtgctggtcagactttttttgttagattctctcatttaaaaaaaatactgtttgtttaaagcatgcataaaaatttatgtattgaaatatacttaaaaattcaagatgcttcccatttgtgtaatatttacctggaggactcgtacttaggtgtcttaacgtgaattgagtctccaaggtctccatgtgaaacaagcaaaaagagaattatctgtaatgttgtaatttgtacctaagttttttaatgagtgaaatttgcattataaactttttccattcataaatacataagtgaaccaaaggtttttgtcctttccttcactgatttgctttaaaaaaaataaaagataatgatttattgcagaattatgattctattttctcaatatgttaacttggaaaaaaattttagccttatcttaatctgtcccaacagcaatgtgacggatttttgcagattcaaaatctgcaatggttatttacaagtcaatctactgaattccttttttaaataatcttttgaaactaagaaaatgtgtcaaattgtgtgcattcattctgtaggtaaaattcttaaggattgccatgtcagtccttcagttgtacagtgaactgttgtacactggttcaatgaaaggaagttaaaagtaccttttacatattgtaaaagtggatacagttgatttgtgagtaggcactctttaatccattacctggcactagcaacattagaattttaaaataaaataattgggaaagaaggtgggtcatgtattaatcagtgaacagagatttacctaaccaacagacttggattgtcttttgacataatcaaaatgcaacacatgcactttgtgtgtctcctcttaattgaagggagggctgagggatgttttctcttcttgtcttgtgtataattctctattgcttaggatattaaagtagagcactcaagtgtgggtttctgtgttattgaggatttgtttggaattcaaattacagttatgtactggatgctacagacttataacagcatagtgaatggtaagactagtgcaaaacagttatttctgaaaattaaagaccattattgctaccaaatcaatgtgactatttcatatgcattttgcctttgttaattttaaacaaacaaagtatcattagtgatcagctagctaccttctactttccatttttcaagtggattgttctcttaatttgtatataacctgttgtctaaattttatgtacagtcttttataataaaccattctcctatatgaaattttggatactgttaaaatataactcatgtggacttcaatgcagacttcacatttttctgacctttactcctacggtaaatcaagacaaaccatttgaattttaacattggttatttatttgtgtaatggccttacatgtggatattaacagtgtaaacaataccacatataaccatcaagataccttgattataatttataggactagaatgacagattcaggtggtttattaattacatttaaaaagttttctgaaaaaacttttgcaataaaaaaaaataaattgcccatcaataagtttgatatcttttaaaatgatttttggttatctgcacatgaagcaaacaaagtgtattccacaaaattctttaggcacagtctggtaagatagctgccagaaagaacagaaagagttgtcatttatctcttgtgagtacaatttctgaaagctgaatgagggcatctctttctggggatggtcgaagtttactgatctctcttattgcttcatggcagtactgctgggcgaggtaggttgtttgttgcacaccatcactctataagatacagaacaaaacagaacagatgcctgtcac

SEQ ID NO: 5798 - protein, 447 aa, Homo sapiens
MAELQMLLEEEIPSGKRALIESYQNLTRVADYCENNYIQATDKRKALEETKAYTTQSLASVAYQINALANNVLQLLDIQASQLRRMESSINHISQTVDIHKEKVARREIGILTTNKNTSRTHKIIAPANMERPVRYIRKPIDYTVLDDVGHGVKHGNNQPARTGTLSRTNPPTQKPPSPPMSGRGTLGRNTPYKTLEPVKPPTVPNDYMTSPARLGSQHSPGRTASLNQRPRTHSGSSGGSGSRENSGSSSIGIPIAVPTPSPPTIGPAAPGSAPGSQYGTMTRQISRHNSTTSSTSSGGYRRTPSVTAQFSAQPHVNGGPLYSQNSIADSPTPPPPPPPDDIPMFDDSPPPPPPPPVDYEDEEAAVVQYNDPYADGDPAWAPKNYIEKVVAIYDYTKDKDDELSFMEGAIIYVIKKNDDGWYEGVCNRVTGLFPGNYVESIMHYTD

SEQ ID NO: 5799 - DNA, 2321 bp, Homo sapiens
cagcagccccgggctcagctcctggttcccagtatggcacaatgaccaggcagatatctcgacacaactctactacttcttcgacatcttctggtggatacagacgaactccctctgtgactgctcaattttctgctcagcctcatgttaatggaggtccactttattctcaaaattcaatttctattgctccaccccctccccctatgcctcagttgactccacagatacctctcacaggcttcgtggccagggtgcaggaaaacattgctgatagtccaactccaccgccaccacctccaccagatgacattcccatgtttgatgactctccacctcccccaccaccaccaccagtggattatgaagatgaggaggctgcagtagttcagtataatgatccatatgcagatggggatcctgcttgggcccccaagaattatattgagaaagttgttgcaatatatgattatacaaaagacaaggatgatgagctgtcatttatggagggtgcaatcatttatgttataaagaagaatgatgatggctggtatgaaggagtctgcaatcgagtgactggtctgttccctgggaactatgttgaatcaatcatgcactatactgattaatttttttttttcttttgaagtagattcttattactcagtcatactgtgggactattatggttaacagaactgtcttaatatgttttaaaatgtgcccatattttcagaacatgctgttttattggtaaattgaatgtctacctgtaagcataaatctttgaggcagtttatgtattgctgaatagcaatttatacaagaagctgtccataactgattatgcttatgtacttacttacacatttttaactttatgaccagcctaaatattctgggggaagtggggtataatatttaacgaatcatgattcagattgtaccattacatgtttcagtgcagcatggttactaacgctatgtcagactaatattaaaatcagaaaatttaaatgctggtgctggtcagactttttttgttagattctctcatttaaaaaaaatactgtttgtttaaagcatgcataaaaatttatgtattgaaatatacttaaaaattcaagatgcttcccatttgtgtaatatttacctggaggactcgtacttaggtgtcttaacgtgaattgagtctccaaggtctccatgtgaaacaagcaaaaagagaattatctgtaatgttgtaatttgtacctaagttttttaatgagtgaaatttgcattataaactttttccattcataaatacataagtgaaccaaaggtttttgtcctttccttcactgatttgctttaaaaaaaataaaagataatgatttattgcagaattatgattctattttctcaatatgttaacttggaaaaaaattttagccttatcttaatctgtcccaacagcaatgtgacggatttttgcagattcaaaatctgcaatggttatttacaagtcaatctactgaattccttttttaaataatcttttgaaactaagaaaatgtgtcaaattgtgtgcattcattctgtaggtaaaattcttaaggattgccatgtcagtccttcagttgtacagtgaactgttgtacactggttcaatgaaaggaagttaaaagtaccttttacatattgtaaaagtggatacagttgatttgtgagtaggcactctttaatccattacctggcactagcaacattagaattttaaaataaaataattgggaaagaaggtgggtcatgtattaatcagtgaacagagatttacctaaccaacagacttggattgtcttttgacataatcaaaatgcaacacatgcactttgtgtgtctcctcttaattgaagggagggctgagggatgttttctcttcttgtcttgtgtataattctctattgcttaggatattaaagtagagcactcaagtgtgggtttctgtgttattgaggatttgtttggaattcaaattacagttatgtactggatgctacagacttataacagcatagtgaatggtaagactagtgcaaaacagttatttctgaaaattaaagaccattattgctaccaaatcaatgtgactatttcatatgcattttgcctttgttaattttaaacaaacaaagtatcattagtgatcagctagctaccttctactttccatttttcaagtggattgttctcttaatttgtatataacctgttgtctaaattttatgtacagtcttttataataaaccattctcctatatgaaattttggatactgtt

SEQ ID NO: 5800 - protein, 195 aa, Homo sapiens; identical to SEQ ID NO: 5786

SEQ ID NO: 5801 - DNA, 2199 bp, Homo sapiens
gtatccgggctgtgaggtgctcggagcctcggcggaccttgctgcctctgtctctttaacgcgagaggaagcgatgcagaggggtggaaaatggcagagctgcagatacctctcacaggcttcgtggccagggtgcaggaaaacattgctgatagtccaactccaccgccaccacctccaccagatgacattcccatgtttgatgactctccacctcccccaccaccaccaccagtggattatgaagatgaggaggctgcagtagttcagtataatgatccatatgcagatggggatcctgcttgggcccccaagaattatattgagaaagttgttgcaatatatgattatacaaaagacaaggatgatgagctgtcatttatggagggtgcaatcatttatgttataaagaagaatgatgatggctggtatgaaggagtctgcaatcgagtgactggtctgttccctgggaactatgttgaatcaatcatgcactatactgattaatttttttttttcttttgaagtagattcttattactcagtcatactgtgggactattatggttaacagaactgtcttaatatgttttaaaatgtgcccatattttcagaacatgctgttttattggtaaattgaatgtctacctgtaagcataaatctttgaggcagtttatgtattgctgaatagcaatttatacaagaagctgtccataactgattatgcttatgtacttacttacacatttttaactttatgaccagcctaaatattctgggggaagtggggtataatatttaacgaatcatgattcagattgtaccattacatgtttcagtgcagcatggttactaacgctatgtcagactaatattaaaatcagaaaatttaaatgctggtgctggtcagactttttttgttagattctctcatttaaaaaaaatactgtttgtttaaagcatgcataaaaatttatgtattgaaatatacttaaaaattcaagatgcttcccatttgtgtaatatttacctggaggactcgtacttaggtgtcttaacgtgaattgagtctccaaggtctccatgtgaaacaagcaaaaagagaattatctgtaatgttgtaatttgtacctaagttttttaatgagtgaaatttgcattataaactttttccattcataaatacataagtgaaccaaaggtttttgtcctttccttcactgatttgctttaaaaaaaataaaagataatgatttattgcagaattatgattctattttctcaatatgttaacttggaaaaaaattttagccttatcttaatctgtcccaacagcaatgtgacggatttttgcagattcaaaatctgcaatggttatttacaagtcaatctactgaattccttttttaaataatcttttgaaactaagaaaatgtgtcaaattgtgtgcattcattctgtaggtaaaattcttaaggattgccatgtcagtccttcagttgtacagtgaactgttgtacactggttcaatgaaaggaagttaaaagtaccttttacatattgtaaaagtggatacagttgatttgtgagtaggcactctttaatccattacctggcactagcaacattagaattttaaaataaaataattgggaaagaaggtgggtcatgtattaatcagtgaacagagatttacctaaccaacagacttggattgtcttttgacataatcaaaatgcaacacatgcactttgtgtgtctcctcttaattgaagggagggctgagggatgttttctcttcttgtcttgtgtataattctctattgcttaggatattaaagtagagcactcaagtgtgggtttctgtgttattgaggatttgtttggaattcaaattacagttatgtactggatgctacagacttataacagcatagtgaatggtaagactagtgcaaaacagttatttctgaaaattaaagaccattattgctaccaaatcaatgtgactatttcatatgcattttgcctttgttaattttaaacaaacaaagtatcattagtgatcagctagctaccttctactttccatttttcaagtggattgttctcttaatttgtatataacctgttgtctaaattttatgtacagtcttttataataaaccattctcctatatgaaattttggatactgtt

SEQ ID NO: 5802 - protein, 138 aa, Homo sapiens; identical to SEQ ID NO: 5788

SEQ ID NO: 5803 - DNA, 3306 bp, Homo sapiens
acaataccaggcgggagggcgggtaggcggtttgtatccgggctgtgaggtgctcggagcctcggcggaccttgctgcctctgtctctttaacgcgagaggaagcgatgcagaggggtggaaaatggcagagctgcagatgttactagaggaggagatcccgtctggcaagagggcgctgatcgagagttaccagaacctgactcgggtggcagactactgtgaaaacaactacatacagagacatggttttgctgtgttgctgtgtctgctctcaaactcctggcctcaggctacagacaagagaaaagctttagaggagaccaaagcctatacaacccaatctctagctagtgttgcttatcaaataaatgcattggccaacaatgtactccagttgctggatatccaagcctctcagcttcggagaatggagtcttccatcaatcatatctcacagactgtggatattcataaggagaaagtggcacgaagagagattggtattttgacaacaaataagaatacatcaagaactcacaaaataatagcacctgcgaatatggagcgccctgtaaggtatattcggaaacctatcgattacacagttctggatgatgtgggccatggtgtcaagtggctaaaagccaagcatggaaataaccagcctgcaagaactggcacactgtcgagaacaaatcctcctactcagaaaccgccaagtcctcccatgtcaggccggggaacactgggacggaatactccttataaaaccctggaacctgttaaacccccaacagttcctaatgactatatgaccagtcctgctaggcttggaagtcagcatagtccaggcaggacagcatctttaaatcagagaccaaggacacacagtggaagtagtggaggaagtggaagtcgagaaaacagtggtagcagtagtattggcattcccattgctgtgcctacaccttcgccacccactattggaccagaaaacatttctgtccctcctccttctggagctccaccagcaccacctctggcaccacttctcccagtgagcactgtgatagcagccccgggctcagctcctggttcccagtatggcacaatgaccaggcagatatctcgacacaactctactacttcttcgacatcttctggtggatacagacgaactccctctgtgactgctcaattttctgctcagcctcatgttaatggaggtccactttattctcaaaattcaattgctgatagtccaactccaccgccaccacctccaccagatgacattcccatgtttgatgactctccacctcccccaccaccaccaccagtggattatgaagatgaggaggctgcagtagttcagtataatgatccatatgcagatggggatcctgcttgggcccccaagaattatattgagaaagttgttgcaatatatgattatacaaaagacaaggatgatgagctgtcatttatggagggtgcaatcatttatgttataaagaagaatgatgatggctggtatgaaggagtctgcaatcgagtgactggtctgttccctgggaactatgttgaatcaatcatgcactatactgattaatttttttttttcttttgaagtagattcttattactcagtcatactgtgggactattatggttaacagaactgtcttaatatgttttaaaatgtgcccatattttcagaacatgctgttttattggtaaattgaatgtctacctgtaagcataaatctttgaggcagtttatgtattgctgaatagcaatttatacaagaagctgtccataactgattatgcttatgtacttacttacacatttttaactttatgaccagcctaaatattctgggggaagtggggtataatatttaacgaatcatgattcagattgtaccattacatgtttcagtgcagcatggttactaacgctatgtcagactaatattaaaatcagaaaatttaaatgctggtgctggtcagactttttttgttagattctctcatttaaaaaaaatactgtttgtttaaagcatgcataaaaatttatgtattgaaatatacttaaaaattcaagatgcttcccatttgtgtaatatttacctggaggactcgtacttaggtgtcttaacgtgaattgagtctccaaggtctccatgtgaaacaagcaaaaagagaattatctgtaatgttgtaatttgtacctaagttttttaatgagtgaaatttgcattataaactttttccattcataaatacataagtgaaccaaaggtttttgtcctttccttcactgatttgctttaaaaaaaataaaagataatgatttattgcagaattatgattctattttctcaatatgttaacttggaaaaaaattttagccttatcttaatctgtcccaacagcaatgtgacggatttttgcagattcaaaatctgcaatggttatttacaagtcaatctactgaattccttttttaaataatcttttgaaactaagaaaatgtgtcaaattgtgtgcattcattctgtaggtaaaattcttaaggattgccatgtcagtccttcagttgtacagtgaactgttgtacactggttcaatgaaaggaagttaaaagtaccttttacatattgtaaaagtggatacagttgatttgtgagtaggcactctttaatccattacctggcactagcaacattagaattttaaaataaaataattgggaaagaaggtgggtcatgtattaatcagtgaacagagatttacctaaccaacagacttggattgtcttttgacataatcaaaatgcaacacatgcactttgtgtgtctcctcttaattgaagggagggctgagggatgttttctcttcttgtcttgtgtataattctctattgcttaggatattaaagtagagcactcaagtgtgggtttctgtgttattgaggatttgtttggaattcaaattacagttatgtactggatgctacagacttataacagcatagtgaatggtaagactagtgcaaaacagttatttctgaaaattaaagaccattattgctaccaaatcaatgtgactatttcatatgcattttgcctttgttaattttaaacaaacaaagtatcattagtgatcagctagctaccttctactttccatttttcaagtggattgttctcttaatttgtatataacctgttgtctaaattttatgtacagtcttttataataaaccattctcctatatgaaattttggatactgtt

SEQ ID NO: 5804 - protein, 496 aa, Homo sapiens; identical to SEQ ID NO: 5790

SEQ ID NO: 5805 - DNA, 3374 bp, Homo sapiens
gagtgaggaggaaggggaggaggtgccgtcccacaataccaggcgggagggcgggtaggcggtttgtatccgggctgtgaggtgctcggagcctcggcggaccttgctgcctctgtctctttaacgcgagaggaagcgatgcagaggggtggaaaatggcagagctgcagatgttactagaggaggagatcccgtctggcaagagggcgctgatcgagagttaccagaacctgactcgggtggcagactactgtgaaaacaactacatacaggctacagacaagagaaaagctttagaggagaccaaagcctatacaacccaatctctagctagtgttgcttatcaaataaatgcattggccaacaatgtactccagttgctggatatccaagcctctcagcttcggagaatggagtcttccatcaatcatatctcacagactgtggatattcataaggagaaagtggcacgaagagagattggtattttgacaacaaataagaatacatcaagaactcacaaaataatagcacctgcgaatatggagcgccctgtaaggtatattcggaaacctatcgattacacagttctggatgatgtgggccatggtgtcaagtggctaaaagccaagcatggaaataaccagcctgcaagaactggcacactgtcgagaacaaatcctcctactcagaaaccgccaagtcctcccatgtcaggccggggaacactgggacggaatactccttataaaaccctggaacctgttaaacccccaacagttcctaatgactatatgaccagtcctgctaggcttggaagtcagcatagtccaggcaggacagcatctttaaatcagagaccaaggacacacagtggaagtagtggaggaagtggaagtcgagaaaacagtggtagcagtagtattggcattcccattgctgtgcctacaccttcgccacccactattggaccagaaaacatttctgtccctcctccttctggagctccaccagcaccacctctggcaccacttctcccagtgagcactgtgatagcagccccgggctcagctcctggttcccagtatggcacaatgaccaggcagatatctcgacacaactctactacttcttcgacatcttctggtggatacagacgaactccctctgtgactgctcaattttctgctcagcctcatgttaatggaggtccactttattctcaaaattcaatttctattgctccaccccctccccctatgcctcagttgactccacagatacctctcacaggcttcgtggccagggtgcaggaaaacattgctgatagtccaactccaccgccaccacctccaccagatgacattcccatgtttgatgactctccacctcccccaccaccaccaccagtggattatgaagatgaggaggctgcagtagttcagtataatgatccatatgcagatggggatcctgcttgggcccccaagaattatattgagaaagttgttgcaatatatgattatacaaaagacaaggatgatgagctgtcatttatggagggtgcaatcatttatgttataaagaagaatgatgatggctggtatgaaggagtctgcaatcgagtgactggtctgttccctgggaactatgttgaatcaatcatgcactatactgattaatttttttttttcttttgaagtagattcttattactcagtcatactgtgggactattatggttaacagaactgtcttaatatgttttaaaatgtgcccatattttcagaacatgctgttttattggtaaattgaatgtctacctgtaagcataaatctttgaggcagtttatgtattgctgaatagcaatttatacaagaagctgtccataactgattatgcttatgtacttacttacacatttttaactttatgaccagcctaaatattctgggggaagtggggtataatatttaacgaatcatgattcagattgtaccattacatgtttcagtgcagcatggttactaacgctatgtcagactaatattaaaatcagaaaatttaaatgctggtgctggtcagactttttttgttagattctctcatttaaaaaaaatactgtttgtttaaagcatgcataaaaatttatgtattgaaatatacttaaaaattcaagatgcttcccatttgtgtaatatttacctggaggactcgtacttaggtgtcttaacgtgaattgagtctccaaggtctccatgtgaaacaagcaaaaagagaattatctgtaatgttgtaatttgtacctaagttttttaatgagtgaaatttgcattataaactttttccattcataaatacataagtgaaccaaaggtttttgtcctttccttcactgatttgctttaaaaaaaataaaagataatgatttattgcagaattatgattctattttctcaatatgttaacttggaaaaaaattttagccttatcttaatctgtcccaacagcaatgtgacggatttttgcagattcaaaatctgcaatggttatttacaagtcaatctactgaattccttttttaaataatcttttgaaactaagaaaatgtgtcaaattgtgtgcattcattctgtaggtaaaattcttaaggattgccatgtcagtccttcagttgtacagtgaactgttgtacactggttcaatgaaaggaagttaaaagtaccttttacatattgtaaaagtggatacagttgatttgtgagtaggcactctttaatccattacctggcactagcaacattagaattttaaaataaaataattgggaaagaaggtgggtcatgtattaatcagtgaacagagatttacctaaccaacagacttggattgtcttttgacataatcaaaatgcaacacatgcactttgtgtgtctcctcttaattgaagggagggctgagggatgttttctcttcttgtcttgtgtataattctctattgcttaggatattaaagtagagcactcaagtgtgggtttctgtgttattgaggatttgtttggaattcaaattacagttatgtactggatgctacagacttataacagcatagtgaatggtaagactagtgcaaaacagttatttctgaaaattaaagaccattattgctaccaaatcaatgtgactatttcatatgcattttgcctttgttaattttaaacaaacaaagtatcattagtgatcagctagctaccttctactttccatttttcaagtggattgttctcttaatttgtatataacctgttgtctaaattttatgtacagtcttttataataaaccattctcctatatgaaattttggatactgtt

SEQ ID NO: 5806 - protein, 508 aa, Homo sapiens; identical to SEQ ID NO: 768

SEQ ID NO: 5807 - DNA, 3293 bp, Homo sapiens
gagtgaggaggaaggggaggaggtgccgtcccacaataccaggcgggagggcgggtaggcggtttgtatccgggctgtgaggtgctcggagcctcggcggaccttgctgcctctgtctctttaacgcgagaggaagcgatgcagaggggtggaaaatggcagagctgcagatgttactagaggaggagatcccgtctggcaagagggcgctgatcgagagttaccagaacctgactcgggtggcagactactgtgaaaacaactacatacaggctacagacaagagaaaagctttagaggagaccaaagcctatacaacccaatctctagctagtgttgcttatcaaataaatgcattggccaacaatgtactccagttgctggatatccaagcctctcagcttcggagaatggagtcttccatcaatcatatctcacagactgtggatattcataaggagaaagtggcacgaagagagattggtattttgacaacaaataagaatacatcaagaactcacaaaataatagcacctgcgaatatggagcgccctgtaaggtatattcggaaacctatcgattacacagttctggatgatgtgggccatggtgtcaagtggctaaaagccaagcatggaaataaccagcctgcaagaactggcacactgtcgagaacaaatcctcctactcagaaaccgccaagtcctcccatgtcaggccggggaacactgggacggaatactccttataaaaccctggaacctgttaaacccccaacagttcctaatgactatatgaccagtcctgctaggcttggaagtcagcatagtccaggcaggacagcatctttaaatcagagaccaaggacacacagtggaagtagtggaggaagtggaagtcgagaaaacagtggtagcagtagtattggcattcccattgctgtgcctacaccttcgccacccactattggaccagcagccccgggctcagctcctggttcccagtatggcacaatgaccaggcagatatctcgacacaactctactacttcttcgacatcttctggtggatacagacgaactccctctgtgactgctcaattttctgctcagcctcatgttaatggaggtccactttattctcaaaattcaatttctattgctccaccccctccccctatgcctcagttgactccacagatacctctcacaggcttcgtggccagggtgcaggaaaacattgctgatagtccaactccaccgccaccacctccaccagatgacattcccatgtttgatgactctccacctcccccaccaccaccaccagtggattatgaagatgaggaggctgcagtagttcagtataatgatccatatgcagatggggatcctgcttgggcccccaagaattatattgagaaagttgttgcaatatatgattatacaaaagacaaggatgatgagctgtcatttatggagggtgcaatcatttatgttataaagaagaatgatgatggctggtatgaaggagtctgcaatcgagtgactggtctgttccctgggaactatgttgaatcaatcatgcactatactgattaatttttttttttcttttgaagtagattcttattactcagtcatactgtgggactattatggttaacagaactgtcttaatatgttttaaaatgtgcccatattttcagaacatgctgttttattggtaaattgaatgtctacctgtaagcataaatctttgaggcagtttatgtattgctgaatagcaatttatacaagaagctgtccataactgattatgcttatgtacttacttacacatttttaactttatgaccagcctaaatattctgggggaagtggggtataatatttaacgaatcatgattcagattgtaccattacatgtttcagtgcagcatggttactaacgctatgtcagactaatattaaaatcagaaaatttaaatgctggtgctggtcagactttttttgttagattctctcatttaaaaaaaatactgtttgtttaaagcatgcataaaaatttatgtattgaaatatacttaaaaattcaagatgcttcccatttgtgtaatatttacctggaggactcgtacttaggtgtcttaacgtgaattgagtctccaaggtctccatgtgaaacaagcaaaaagagaattatctgtaatgttgtaatttgtacctaagttttttaatgagtgaaatttgcattataaactttttccattcataaatacataagtgaaccaaaggtttttgtcctttccttcactgatttgctttaaaaaaaataaaagataatgatttattgcagaattatgattctattttctcaatatgttaacttggaaaaaaattttagccttatcttaatctgtcccaacagcaatgtgacggatttttgcagattcaaaatctgcaatggttatttacaagtcaatctactgaattccttttttaaataatcttttgaaactaagaaaatgtgtcaaattgtgtgcattcattctgtaggtaaaattcttaaggattgccatgtcagtccttcagttgtacagtgaactgttgtacactggttcaatgaaaggaagttaaaagtaccttttacatattgtaaaagtggatacagttgatttgtgagtaggcactctttaatccattacctggcactagcaacattagaattttaaaataaaataattgggaaagaaggtgggtcatgtattaatcagtgaacagagatttacctaaccaacagacttggattgtcttttgacataatcaaaatgcaacacatgcactttgtgtgtctcctcttaattgaagggagggctgagggatgttttctcttcttgtcttgtgtataattctctattgcttaggatattaaagtagagcactcaagtgtgggtttctgtgttattgaggatttgtttggaattcaaattacagttatgtactggatgctacagacttataacagcatagtgaatggtaagactagtgcaaaacagttatttctgaaaattaaagaccattattgctaccaaatcaatgtgactatttcatatgcattttgcctttgttaattttaaacaaacaaagtatcattagtgatcagctagctaccttctactttccatttttcaagtggattgttctcttaatttgtatataacctgttgtctaaattttatgtacagtcttttataataaaccattctcctatatgaaattttggatactgtt

SEQ ID NO: 5808 - protein, 481 aa, Homo sapiens; identical to SEQ ID NO: 762

SEQ ID NO: 5809 - DNA, 3218 bp, Homo sapiens
gggggctggagagagtgaggaggaaggggaggaggtgccgtcccacaataccaggcgggagggcgggtaggcggtttgtatccgggctgtgaggtgctcggagcctcggcggaccttgctgcctctgtctctttaacgcgagaggaagcgatgcagaggggtggaaaatggcagagctgcagatgttactagaggaggagatcccgtctggcaagagggcgctgatcgagagttaccagaacctgactcgggtggcagactactgtgaaaacaactacatacaggctacagacaagagaaaagctttagaggagaccaaagcctatacaacccaatctctagctagtgttgcttatcaaataaatgcattggccaacaatgtactccagttgctggatatccaagcctctcagcttcggagaatggagtcttccatcaatcatatctcacagactgtggatattcataaggagaaagtggcacgaagagagattggtattttgacaacaaataagaatacatcaagaactcacaaaataatagcacctgcgaatatggagcgccctgtaaggtatattcggaaacctatcgattacacagttctggatgatgtgggccatggtgtcaagtggctaaaagccaagcatggaaataaccagcctgcaagaactggcacactgtcgagaacaaatcctcctactcagaaaccgccaagtcctcccatgtcaggccggggaacactgggacggaatactccttataaaaccctggaacctgttaaacccccaacagttcctaatgactatatgaccagtcctgctaggcttggaagtcagcatagtccaggcaggacagcatctttaaatcagagaccaaggacacacagtggaagtagtggaggaagtggaagtcgagaaaacagtggtagcagtagtattggcattcccattgctgtgcctacaccttcgccacccactattggaccagcagccccgggctcagctcctggttcccagtatggcacaatgaccaggcagatatctcgacacaactctactacttcttcgacatcttctggtggatacagacgaactccctctgtgactgctcaattttctgctcagcctcatgttaatggaggtccactttattctcaaaattcaattgctgatagtccaactccaccgccaccacctccaccagatgacattcccatgtttgatgactctccacctcccccaccaccaccaccagtggattatgaagatgaggaggctgcagtagttcagtataatgatccatatgcagatggggatcctgcttgggcccccaagaattatattgagaaagttgttgcaatatatgattatacaaaagacaaggatgatgagctgtcatttatggagggtgcaatcatttatgttataaagaagaatgatgatggctggtatgaaggagtctgcaatcgagtgactggtctgttccctgggaactatgttgaatcaatcatgcactatactgattaatttttttttttcttttgaagtagattcttattactcagtcatactgtgggactattatggttaacagaactgtcttaatatgttttaaaatgtgcccatattttcagaacatgctgttttattggtaaattgaatgtctacctgtaagcataaatctttgaggcagtttatgtattgctgaatagcaatttatacaagaagctgtccataactgattatgcttatgtacttacttacacatttttaactttatgaccagcctaaatattctgggggaagtggggtataatatttaacgaatcatgattcagattgtaccattacatgtttcagtgcagcatggttactaacgctatgtcagactaatattaaaatcagaaaatttaaatgctggtgctggtcagactttttttgttagattctctcatttaaaaaaaatactgtttgtttaaagcatgcataaaaatttatgtattgaaatatacttaaaaattcaagatgcttcccatttgtgtaatatttacctggaggactcgtacttaggtgtcttaacgtgaattgagtctccaaggtctccatgtgaaacaagcaaaaagagaattatctgtaatgttgtaatttgtacctaagttttttaatgagtgaaatttgcattataaactttttccattcataaatacataagtgaaccaaaggtttttgtcctttccttcactgatttgctttaaaaaaaataaaagataatgatttattgcagaattatgattctattttctcaatatgttaacttggaaaaaaattttagccttatcttaatctgtcccaacagcaatgtgacggatttttgcagattcaaaatctgcaatggttatttacaagtcaatctactgaattccttttttaaataatcttttgaaactaagaaaatgtgtcaaattgtgtgcattcattctgtaggtaaaattcttaaggattgccatgtcagtccttcagttgtacagtgaactgttgtacactggttcaatgaaaggaagttaaaagtaccttttacatattgtaaaagtggatacagttgatttgtgagtaggcactctttaatccattacctggcactagcaacattagaattttaaaataaaataattgggaaagaaggtgggtcatgtattaatcagtgaacagagatttacctaaccaacagacttggattgtcttttgacataatcaaaatgcaacacatgcactttgtgtgtctcctcttaattgaagggagggctgagggatgttttctcttcttgtcttgtgtataattctctattgcttaggatattaaagtagagcactcaagtgtgggtttctgtgttattgaggatttgtttggaattcaaattacagttatgtactggatgctacagacttataacagcatagtgaatggtaagactagtgcaaaacagttatttctgaaaattaaagaccattattgctaccaaatcaatgtgactatttcatatgcattttgcctttgttaattttaaacaaacaaagtatcattagtgatcagctagctaccttctactttccatttttcaagtggattgttctcttaatttgtatataacctgttgtctaaattttatgtacagtcttttataataaaccattctcctatatgaaattttggatactgtt

SEQ ID NO: 5810 - protein, 452 aa, Homo sapiens; identical to SEQ ID NO: 764

SEQ ID NO: 5811 - DNA, 3317 bp, Homo sapiens
tcaggcggctgcacgaagggggtggaggggggctggagagagtgaggaggaaggggaggaggtgccgtcccacaataccaggcgggagggcgggtaggcggtttgtatccgggctgtgaggtgctcggagcctcggcggaccttgctgcctctgtctctttaacgcgagaggaagcgatgcagaggggtggaaaatggcagagctgcagatgttactagaggaggagatcccgtctggcaagagggcgctgatcgagagttaccagaacctgactcgggtggcagactactgtgaaaacaactacatacaggctacagacaagagaaaagctttagaggagaccaaagcctatacaacccaatctctagctagtgttgcttatcaaataaatgcattggccaacaatgtactccagttgctggatatccaagcctctcagcttcggagaatggagtcttccatcaatcatatctcacagactgtggatattcataaggagaaagtggcacgaagagagattggtattttgacaacaaataagaatacatcaagaactcacaaaataatagcacctgcgaatatggagcgccctgtaaggtatattcggaaacctatcgattacacagttctggatgatgtgggccatggtgtcaagcatggaaataaccagcctgcaagaactggcacactgtcgagaacaaatcctcctactcagaaaccgccaagtcctcccatgtcaggccggggaacactgggacggaatactccttataaaaccctggaacctgttaaacccccaacagttcctaatgactatatgaccagtcctgctaggcttggaagtcagcatagtccaggcaggacagcatctttaaatcagagaccaaggacacacagtggaagtagtggaggaagtggaagtcgagaaaacagtggtagcagtagtattggcattcccattgctgtgcctacaccttcgccacccactattggaccagcagccccgggctcagctcctggttcccagtatggcacaatgaccaggcagatatctcgacacaactctactacttcttcgacatcttctggtggatacagacgaactccctctgtgactgctcaattttctgctcagcctcatgttaatggaggtccactttattctcaaaattcaatttctattgctccaccccctccccctatgcctcagttgactccacagatacctctcacaggcttcgtggccagggtgcaggaaaacattgctgatagtccaactccaccgccaccacctccaccagatgacattcccatgtttgatgactctccacctcccccaccaccaccaccagtggattatgaagatgaggaggctgcagtagttcagtataatgatccatatgcagatggggatcctgcttgggcccccaagaattatattgagaaagttgttgcaatatatgattatacaaaagacaaggatgatgagctgtcatttatggagggtgcaatcatttatgttataaagaagaatgatgatggctggtatgaaggagtctgcaatcgagtgactggtctgttccctgggaactatgttgaatcaatcatgcactatactgattaatttttttttttcttttgaagtagattcttattactcagtcatactgtgggactattatggttaacagaactgtcttaatatgttttaaaatgtgcccatattttcagaacatgctgttttattggtaaattgaatgtctacctgtaagcataaatctttgaggcagtttatgtattgctgaatagcaatttatacaagaagctgtccataactgattatgcttatgtacttacttacacatttttaactttatgaccagcctaaatattctgggggaagtggggtataatatttaacgaatcatgattcagattgtaccattacatgtttcagtgcagcatggttactaacgctatgtcagactaatattaaaatcagaaaatttaaatgctggtgctggtcagactttttttgttagattctctcatttaaaaaaaatactgtttgtttaaagcatgcataaaaatttatgtattgaaatatacttaaaaattcaagatgcttcccatttgtgtaatatttacctggaggactcgtacttaggtgtcttaacgtgaattgagtctccaaggtctccatgtgaaacaagcaaaaagagaattatctgtaatgttgtaatttgtacctaagttttttaatgagtgaaatttgcattataaactttttccattcataaatacataagtgaaccaaaggtttttgtcctttccttcactgatttgctttaaaaaaaataaaagataatgatttattgcagaattatgattctattttctcaatatgttaacttggaaaaaaattttagccttatcttaatctgtcccaacagcaatgtgacggatttttgcagattcaaaatctgcaatggttatttacaagtcaatctactgaattccttttttaaataatcttttgaaactaagaaaatgtgtcaaattgtgtgcattcattctgtaggtaaaattcttaaggattgccatgtcagtccttcagttgtacagtgaactgttgtacactggttcaatgaaaggaagttaaaagtaccttttacatattgtaaaagtggatacagttgatttgtgagtaggcactctttaatccattacctggcactagcaacattagaattttaaaataaaataattgggaaagaaggtgggtcatgtattaatcagtgaacagagatttacctaaccaacagacttggattgtcttttgacataatcaaaatgcaacacatgcactttgtgtgtctcctcttaattgaagggagggctgagggatgttttctcttcttgtcttgtgtataattctctattgcttaggatattaaagtagagcactcaagtgtgggtttctgtgttattgaggatttgtttggaattcaaattacagttatgtactggatgctacagacttataacagcatagtgaatggtaagactagtgcaaaacagttatttctgaaaattaaagaccattattgctaccaaatcaatgtgactatttcatatgcattttgcctttgttaattttaaacaaacaaagtatcattagtgatcagctagctaccttctactttccatttttcaagtggattgttctcttaatttgtatataacctgttgtctaaattttatgtacagtcttttataataaaccattctcctatatgaaattttggatactgtt

SEQ ID NO: 5812 - protein, 476 aa, Homo sapiens; identical to SEQ ID NO: 766

SEQ ID NO: 5813 - DNA, 3230 bp, Homo sapiens
tcaggcggctgcacgaagggggtggaggggggctggagagagtgaggaggaaggggaggaggtgccgtcccacaataccaggcgggagggcgggtaggcggtttgtatccgggctgtgaggtgctcggagcctcggcggaccttgctgcctctgtctctttaacgcgagaggaagcgatgcagaggggtggaaaatggcagagctgcagatgttactagaggaggagatcccgtctggcaagagggcgctgatcgagagttaccagaacctgactcgggtggcagactactgtgaaaacaactacatacaggctacagacaagagaaaagctttagaggagaccaaagcctatacaacccaatctctagctagtgttgcttatcaaataaatgcattggccaacaatgtactccagttgctggatatccaagcctctcagcttcggagaatggagtcttccatcaatcatatctcacagactgtggatattcataaggagaaagtggcacgaagagagattggtattttgacaacaaataagaatacatcaagaactcacaaaataatagcacctgcgaatatggagcgccctgtaaggtatattcggaaacctatcgattacacagttctggatgatgtgggccatggtgtcaagcatggaaataaccagcctgcaagaactggcacactgtcgagaacaaatcctcctactcagaaaccgccaagtcctcccatgtcaggccggggaacactgggacggaatactccttataaaaccctggaacctgttaaacccccaacagttcctaatgactatatgaccagtcctgctaggcttggaagtcagcatagtccaggcaggacagcatctttaaatcagagaccaaggacacacagtggaagtagtggaggaagtggaagtcgagaaaacagtggtagcagtagtattggcattcccattgctgtgcctacaccttcgccacccactattggaccagcagccccgggctcagctcctggttcccagtatggcacaatgaccaggcagatatctcgacacaactctactacttcttcgacatcttctggtggatacagacgaactccctctgtgactgctcaattttctgctcagcctcatgttaatggaggtccactttattctcaaaattcaattgctgatagtccaactccaccgccaccacctccaccagatgacattcccatgtttgatgactctccacctcccccaccaccaccaccagtggattatgaagatgaggaggctgcagtagttcagtataatgatccatatgcagatggggatcctgcttgggcccccaagaattatattgagaaagttgttgcaatatatgattatacaaaagacaaggatgatgagctgtcatttatggagggtgcaatcatttatgttataaagaagaatgatgatggctggtatgaaggagtctgcaatcgagtgactggtctgttccctgggaactatgttgaatcaatcatgcactatactgattaatttttttttttcttttgaagtagattcttattactcagtcatactgtgggactattatggttaacagaactgtcttaatatgttttaaaatgtgcccatattttcagaacatgctgttttattggtaaattgaatgtctacctgtaagcataaatctttgaggcagtttatgtattgctgaatagcaatttatacaagaagctgtccataactgattatgcttatgtacttacttacacatttttaactttatgaccagcctaaatattctgggggaagtggggtataatatttaacgaatcatgattcagattgtaccattacatgtttcagtgcagcatggttactaacgctatgtcagactaatattaaaatcagaaaatttaaatgctggtgctggtcagactttttttgttagattctctcatttaaaaaaaatactgtttgtttaaagcatgcataaaaatttatgtattgaaatatacttaaaaattcaagatgcttcccatttgtgtaatatttacctggaggactcgtacttaggtgtcttaacgtgaattgagtctccaaggtctccatgtgaaacaagcaaaaagagaattatctgtaatgttgtaatttgtacctaagttttttaatgagtgaaatttgcattataaactttttccattcataaatacataagtgaaccaaaggtttttgtcctttccttcactgatttgctttaaaaaaaataaaagataatgatttattgcagaattatgattctattttctcaatatgttaacttggaaaaaaattttagccttatcttaatctgtcccaacagcaatgtgacggatttttgcagattcaaaatctgcaatggttatttacaagtcaatctactgaattccttttttaaataatcttttgaaactaagaaaatgtgtcaaattgtgtgcattcattctgtaggtaaaattcttaaggattgccatgtcagtccttcagttgtacagtgaactgttgtacactggttcaatgaaaggaagttaaaagtaccttttacatattgtaaaagtggatacagttgatttgtgagtaggcactctttaatccattacctggcactagcaacattagaattttaaaataaaataattgggaaagaaggtgggtcatgtattaatcagtgaacagagatttacctaaccaacagacttggattgtcttttgacataatcaaaatgcaacacatgcactttgtgtgtctcctcttaattgaagggagggctgagggatgttttctcttcttgtcttgtgtataattctctattgcttaggatattaaagtagagcactcaagtgtgggtttctgtgttattgaggatttgtttggaattcaaattacagttatgtactggatgctacagacttataacagcatagtgaatggtaagactagtgcaaaacagttatttctgaaaattaaagaccattattgctaccaaatcaatgtgactatttcatatgcattttgcctttgttaattttaaacaaacaaagtatcattagtgatcagctagctaccttctactttccatttttcaagtggattgttctcttaatttgtatataacctgttgtctaaattttatgtacagtcttttataataaaccattctcctatatgaaattttggatactgtt

SEQ ID NO: 5814 - protein, 447 aa, Homo sapiens; identical to SEQ ID NO: 5798

SEQ ID NO: 5815 - DNA, 2927 bp, Homo sapiens
gtcatttttattgttttgtttactgtaagttcctttttgtttgttttttttaattacatcttcaacactttatgtttaaatcttaattgttgatgtattcttagaaaatcgaatctttaggatctaggctttccctcatcccgtgcttatgttttactagcaataatgcaaaattttagcttgctttctacattaaaaaactaattatgaatataaacctttttaaaaatactcaattagattttctactggttggggattctttttccattttttcaacttgtaaaatgtaaataacagagtagaaaatctgcacacagaagcagacctaatactaccaactttacttttctcttcatcaaaacaaacaataatcaacaaagaaacaaaaatctgtccacaggagactgaatttttagggaaccaaagctgtttcaagccaaaatcaggggcatgaatgagcagagtgaagagtgatcaaaccattaacgtaatgttactcatatcattactgcagtccaaatgacaaaagtgacatagatttattttagattgttaacatttgtcccgatctgaaccttggaataaggaaactactcctataatccttataaaaagagacattgtctcctaacaccctgcattcattaatttgtagtacttccagatacccttatttttagctcattttgttatttttaaatgattcttgagtagcataaactttaacacaccaagcttttatttctaatcattgcatgttttattatagtgcatgctgtacttaagttagagctttcttaaattctgttaacttataagtttccatctagacttatttttgattcaaatcaatcatatgaatctttttagttgctgatagtccaactccaccgccaccacctccaccagatgacattcccatgtttgatgactctccacctcccccaccaccaccaccagtggattatgaagatgaggaggctgcagtagttcagtataatgatccatatgcagatggggatcctgcttgggcccccaagaattatattgagaaagttgttgcaatatatgattatacaaaagacaaggatgatgagctgtcatttatggagggtgcaatcatttatgttataaagaagaatgatgatggctggtatgaaggagtctgcaatcgagtgactggtctgttccctgggaactatgttgaatcaatcatgcactatactgattaatttttttttttcttttgaagtagattcttattactcagtcatactgtgggactattatggttaacagaactgtcttaatatgttttaaaatgtgcccatattttcagaacatgctgttttattggtaaattgaatgtctacctgtaagcataaatctttgaggcagtttatgtattgctgaatagcaatttatacaagaagctgtccataactgattatgcttatgtacttacttacacatttttaactttatgaccagcctaaatattctgggggaagtggggtataatatttaacgaatcatgattcagattgtaccattacatgtttcagtgcagcatggttactaacgctatgtcagactaatattaaaatcagaaaatttaaatgctggtgctggtcagactttttttgttagattctctcatttaaaaaaaatactgtttgtttaaagcatgcataaaaatttatgtattgaaatatacttaaaaattcaagatgcttcccatttgtgtaatatttacctggaggactcgtacttaggtgtcttaacgtgaattgagtctccaaggtctccatgtgaaacaagcaaaaagagaattatctgtaatgttgtaatttgtacctaagttttttaatgagtgaaatttgcattataaactttttccattcataaatacataagtgaaccaaaggtttttgtcctttccttcactgatttgctttaaaaaaaataaaagataatgatttattgcagaattatgattctattttctcaatatgttaacttggaaaaaaattttagccttatcttaatctgtcccaacagcaatgtgacggatttttgcagattcaaaatctgcaatggttatttacaagtcaatctactgaattccttttttaaataatcttttgaaactaagaaaatgtgtcaaattgtgtgcattcattctgtaggtaaaattcttaaggattgccatgtcagtccttcagttgtacagtgaactgttgtacactggttcaatgaaaggaagttaaaagtaccttttacatattgtaaaagtggatacagttgatttgtgagtaggcactctttaatccattacctggcactagcaacattagaattttaaaataaaataattgggaaagaaggtgggtcatgtattaatcagtgaacagagatttacctaaccaacagacttggattgtcttttgacataatcaaaatgcaacacatgcactttgtgtgtctcctcttaattgaagggagggctgagggatgttttctcttcttgtcttgtgtataattctctattgcttaggatattaaagtagagcactcaagtgtgggtttctgtgttattgaggatttgtttggaattcaaattacagttatgtactggatgctacagacttataacagcatagtgaatggtaagactagtgcaaaacagttatttctgaaaattaaagaccattattgctaccaaatcaatgtgactatttcatatgcattttgcctttgttaattttaaacaaacaaagtatcattagtgatcagctagctaccttctactttccatttttcaagtggattgttctcttaatttgtatataacctgttgtctaaattttatgtacagtcttttataataaaccattctcctatatgaaattttggatactgtt

SEQ ID NO: 5816 - protein, 103 aa, Homo sapiens; identical to SEQ ID NO: 5784

SEQ ID NO: 5817 - DNA, 2726 bp, Homo sapiens
gtcatttttattgttttgtttactgtaagttcctttttgtttgttttttttaattacatcttcaacactttatgtttaaatcttaattgttgatgtattcttagaaaatcgaatctttaggatctaggctttccctcatcccgtgcttatgttttactagcaataatgcaaaattttagcttgctttctacattaaaaaactaattatgaatataaacctttttaaaaatactcaattagattttctactggttggggattctttttccattttttcaacttgtaaaatgtaaataacagagtagaaaatctgcacacagaagcagacctaatactaccaactttacttttctcttcatcaaaacaaacaataatcaacaaagaaacaaaaatctgtccacaggagactgaatttttagggaaccaaagctgtttcaagccaaaatcaggggcatgaatgagcagagtgaagagtgatcaaaccattaacgtaatgttactcatatcattactgcagtccaaatgacaaaagtgacatagatttattttagattgttaacatttgtcccgatctgaaccttggaataaggaaactactcctataatccttataaaaagagacattgtctcctaacaccctgcattcattaatttgtagtacttccagatacccttatttttagctcattttgttatttttaaatgattcttgagtagcataaactttaacacaccaagcttttatttctaatcattgcatgttttattatagtgcatgctgtacttaagttagagctttcttaaattctgttaacttataagtttccatctagacttatttttgattcaaatcaatcatatgaatctttttagttgctgatagtccaactccaccgccaccacctccaccagatgacattcccatgtttgatgactctccacctcccccaccaccaccaccagtggattatgaagatgaggaggctgcagtagttcagtataatgatccatatgcagatggggatcctgcttgggcccccaagaattatattgagaaagttgttgcaatatatgattatacaaaagacaaggatgatgagctgtcatttatggagggtgcaatcatttatgttataaagaagaatgatgatggctggtatgaaggagtctgcaatcgagtgactggtctgttccctgggaactatgttgaatcaatcatgcactatactgattaatttttttttttcttttgaagtagattcttattactcagtcatactgtgggactattatggttaacagaactgtcttaatatgttttaaaatgtgcccatattttcagaacatgctgttttattggtaaattgaatgtctacctgtaagcataaatctttgaggcagtttatgtattgctgaatagcaatttatacaagaagctgtccataactgattatgcttatgtacttacttacacatttttaactttatgaccagcctaaatattctgggggaagtggggtataatatttaacgaatcatgattcagattgtaccattacatgtttcagtgcagcatggttactaacgctatgtcagactaatattaaaatcagaaaatttaaatgctggtgctggtcagactttttttgttagattctctcatttaaaaaaaatactgtttgtttaaagcatgcataaaaatttatgtattgaaatatacttaaaaattcaagatgcttcccatttgtgtaatatttacctggaggactcgtacttaggtgtcttaacgtgaattgagtctccaaggtctccatgtgaaacaagcaaaaagagaattatctgtaatgttgtaatttgtacctaagttttttaatgagtgaaatttgcattataaactttttccattcataaatacataagtgaaccaaaggtttttgtcctttccttcactgatttgctttaaaaaaaataaaagataatgatttattgcagaattatgattctattttctcaatatgttaacttggaaaaaaattttagccttatcttaatctgtcccaacagcaatgtgacggatttttgcagattcaaaatctgcaatggttatttacaagtcaatctactgaattccttttttaaataatcttttgaaactaagaaaatgtgtcaaattgtgtgcattcattctgtaggtaaaattcttaaggattgccatgtcagtccttcagttgtacagtgaactgttgtacactggttcaatgaaaggaagttaaaagtaccttttacatattgtaaaagtggatacagttgatttgtgagtaggcactctttaatccattacctggcactagcaacattagaattttaaaataaaataattgggaaagaaggtgggtcatgtattaatcagtgaacagagatttacctaaccaacagacttggattgtcttttgacataatcaaaatgcaacacatgcactttgtgtgtctcctcttaattgaagggagggctgagggatgttttctcttcttgtcttgtgtataattctctattgcttaggatattaaagtagagcactcaagtgtgggtttctgtgttattgaggatttgtttggaattcaaattacagttatgtactggatgctacagacttataacagcatagtgaatggtaagactagtgcaaaacagttatttctgaaaattaaagaccattattgctacc

SEQ ID NO: 5818 - protein, 103 aa, Homo sapiens; identical to SEQ ID NO: 5784

SEQ ID NO: 5819 - DNA, 2120 bp, Homo sapiens
cagcagccccgggctcagctcctggttcccagtatggcacaatgaccaggcagatatctcgacacaactctactacttcttcgacatcttctggtggatacagacgaactccctctgtgactgctcaattttctgctcagcctcatgttaatggaggtccactttattctcaaaattcaatttctattgctccaccccctccccctatgcctcagttgactccacagatacctctcacaggcttcgtggccagggtgcaggaaaacattgctgatagtccaactccaccgccaccacctccaccagatgacattcccatgtttgatgactctccacctcccccaccaccaccaccagtggattatgaagatgaggaggctgcagtagttcagtataatgatccatatgcagatggggatcctgcttgggcccccaagaattatattgagaaagttgttgcaatatatgattatacaaaagacaaggatgatgagctgtcatttatggagggtgcaatcatttatgttataaagaagaatgatgatggctggtatgaaggagtctgcaatcgagtgactggtctgttccctgggaactatgttgaatcaatcatgcactatactgattaatttttttttttcttttgaagtagattcttattactcagtcatactgtgggactattatggttaacagaactgtcttaatatgttttaaaatgtgcccatattttcagaacatgctgttttattggtaaattgaatgtctacctgtaagcataaatctttgaggcagtttatgtattgctgaatagcaatttatacaagaagctgtccataactgattatgcttatgtacttacttacacatttttaactttatgaccagcctaaatattctgggggaagtggggtataatatttaacgaatcatgattcagattgtaccattacatgtttcagtgcagcatggttactaacgctatgtcagactaatattaaaatcagaaaatttaaatgctggtgctggtcagactttttttgttagattctctcatttaaaaaaaatactgtttgtttaaagcatgcataaaaatttatgtattgaaatatacttaaaaattcaagatgcttcccatttgtgtaatatttacctggaggactcgtacttaggtgtcttaacgtgaattgagtctccaaggtctccatgtgaaacaagcaaaaagagaattatctgtaatgttgtaatttgtacctaagttttttaatgagtgaaatttgcattataaactttttccattcataaatacataagtgaaccaaaggtttttgtcctttccttcactgatttgctttaaaaaaaataaaagataatgatttattgcagaattatgattctattttctcaatatgttaacttggaaaaaaattttagccttatcttaatctgtcccaacagcaatgtgacggatttttgcagattcaaaatctgcaatggttatttacaagtcaatctactgaattccttttttaaataatcttttgaaactaagaaaatgtgtcaaattgtgtgcattcattctgtaggtaaaattcttaaggattgccatgtcagtccttcagttgtacagtgaactgttgtacactggttcaatgaaaggaagttaaaagtaccttttacatattgtaaaagtggatacagttgatttgtgagtaggcactctttaatccattacctggcactagcaacattagaattttaaaataaaataattgggaaagaaggtgggtcatgtattaatcagtgaacagagatttacctaaccaacagacttggattgtcttttgacataatcaaaatgcaacacatgcactttgtgtgtctcctcttaattgaagggagggctgagggatgttttctcttcttgtcttgtgtataattctctattgcttaggatattaaagtagagcactcaagtgtgggtttctgtgttattgaggatttgtttggaattcaaattacagttatgtactggatgctacagacttataacagcatagtgaatggtaagactagtgcaaaacagttatttctgaaaattaaagaccattattgctacc

SEQ ID NO: 5820 - protein, 195 aa, Homo sapiens; identical to SEQ ID NO: 5786

SEQ ID NO: 5821 - DNA, 1998 bp, Homo sapiens
gtatccgggctgtgaggtgctcggagcctcggcggaccttgctgcctctgtctctttaacgcgagaggaagcgatgcagaggggtggaaaatggcagagctgcagatacctctcacaggcttcgtggccagggtgcaggaaaacattgctgatagtccaactccaccgccaccacctccaccagatgacattcccatgtttgatgactctccacctcccccaccaccaccaccagtggattatgaagatgaggaggctgcagtagttcagtataatgatccatatgcagatggggatcctgcttgggcccccaagaattatattgagaaagttgttgcaatatatgattatacaaaagacaaggatgatgagctgtcatttatggagggtgcaatcatttatgttataaagaagaatgatgatggctggtatgaaggagtctgcaatcgagtgactggtctgttccctgggaactatgttgaatcaatcatgcactatactgattaatttttttttttcttttgaagtagattcttattactcagtcatactgtgggactattatggttaacagaactgtcttaatatgttttaaaatgtgcccatattttcagaacatgctgttttattggtaaattgaatgtctacctgtaagcataaatctttgaggcagtttatgtattgctgaatagcaatttatacaagaagctgtccataactgattatgcttatgtacttacttacacatttttaactttatgaccagcctaaatattctgggggaagtggggtataatatttaacgaatcatgattcagattgtaccattacatgtttcagtgcagcatggttactaacgctatgtcagactaatattaaaatcagaaaatttaaatgctggtgctggtcagactttttttgttagattctctcatttaaaaaaaatactgtttgtttaaagcatgcataaaaatttatgtattgaaatatacttaaaaattcaagatgcttcccatttgtgtaatatttacctggaggactcgtacttaggtgtcttaacgtgaattgagtctccaaggtctccatgtgaaacaagcaaaaagagaattatctgtaatgttgtaatttgtacctaagttttttaatgagtgaaatttgcattataaactttttccattcataaatacataagtgaaccaaaggtttttgtcctttccttcactgatttgctttaaaaaaaataaaagataatgatttattgcagaattatgattctattttctcaatatgttaacttggaaaaaaattttagccttatcttaatctgtcccaacagcaatgtgacggatttttgcagattcaaaatctgcaatggttatttacaagtcaatctactgaattccttttttaaataatcttttgaaactaagaaaatgtgtcaaattgtgtgcattcattctgtaggtaaaattcttaaggattgccatgtcagtccttcagttgtacagtgaactgttgtacactggttcaatgaaaggaagttaaaagtaccttttacatattgtaaaagtggatacagttgatttgtgagtaggcactctttaatccattacctggcactagcaacattagaattttaaaataaaataattgggaaagaaggtgggtcatgtattaatcagtgaacagagatttacctaaccaacagacttggattgtcttttgacataatcaaaatgcaacacatgcactttgtgtgtctcctcttaattgaagggagggctgagggatgttttctcttcttgtcttgtgtataattctctattgcttaggatattaaagtagagcactcaagtgtgggtttctgtgttattgaggatttgtttggaattcaaattacagttatgtactggatgctacagacttataacagcatagtgaatggtaagactagtgcaaaacagttatttctgaaaattaaagaccattattgctacc

SEQ ID NO: 5822 - protein, 138 aa, Homo sapiens; identical to SEQ ID NO: 5788

SEQ ID NO: 5823 - DNA, 3173 bp, Homo sapiens
gagtgaggaggaaggggaggaggtgccgtcccacaataccaggcgggagggcgggtaggcggtttgtatccgggctgtgaggtgctcggagcctcggcggaccttgctgcctctgtctctttaacgcgagaggaagcgatgcagaggggtggaaaatggcagagctgcagatgttactagaggaggagatcccgtctggcaagagggcgctgatcgagagttaccagaacctgactcgggtggcagactactgtgaaaacaactacatacaggctacagacaagagaaaagctttagaggagaccaaagcctatacaacccaatctctagctagtgttgcttatcaaataaatgcattggccaacaatgtactccagttgctggatatccaagcctctcagcttcggagaatggagtcttccatcaatcatatctcacagactgtggatattcataaggagaaagtggcacgaagagagattggtattttgacaacaaataagaatacatcaagaactcacaaaataatagcacctgcgaatatggagcgccctgtaaggtatattcggaaacctatcgattacacagttctggatgatgtgggccatggtgtcaagtggctaaaagccaagcatggaaataaccagcctgcaagaactggcacactgtcgagaacaaatcctcctactcagaaaccgccaagtcctcccatgtcaggccggggaacactgggacggaatactccttataaaaccctggaacctgttaaacccccaacagttcctaatgactatatgaccagtcctgctaggcttggaagtcagcatagtccaggcaggacagcatctttaaatcagagaccaaggacacacagtggaagtagtggaggaagtggaagtcgagaaaacagtggtagcagtagtattggcattcccattgctgtgcctacaccttcgccacccactattggaccagaaaacatttctgtccctcctccttctggagctccaccagcaccacctctggcaccacttctcccagtgagcactgtgatagcagccccgggctcagctcctggttcccagtatggcacaatgaccaggcagatatctcgacacaactctactacttcttcgacatcttctggtggatacagacgaactccctctgtgactgctcaattttctgctcagcctcatgttaatggaggtccactttattctcaaaattcaatttctattgctccaccccctccccctatgcctcagttgactccacagatacctctcacaggcttcgtggccagggtgcaggaaaacattgctgatagtccaactccaccgccaccacctccaccagatgacattcccatgtttgatgactctccacctcccccaccaccaccaccagtggattatgaagatgaggaggctgcagtagttcagtataatgatccatatgcagatggggatcctgcttgggcccccaagaattatattgagaaagttgttgcaatatatgattatacaaaagacaaggatgatgagctgtcatttatggagggtgcaatcatttatgttataaagaagaatgatgatggctggtatgaaggagtctgcaatcgagtgactggtctgttccctgggaactatgttgaatcaatcatgcactatactgattaatttttttttttcttttgaagtagattcttattactcagtcatactgtgggactattatggttaacagaactgtcttaatatgttttaaaatgtgcccatattttcagaacatgctgttttattggtaaattgaatgtctacctgtaagcataaatctttgaggcagtttatgtattgctgaatagcaatttatacaagaagctgtccataactgattatgcttatgtacttacttacacatttttaactttatgaccagcctaaatattctgggggaagtggggtataatatttaacgaatcatgattcagattgtaccattacatgtttcagtgcagcatggttactaacgctatgtcagactaatattaaaatcagaaaatttaaatgctggtgctggtcagactttttttgttagattctctcatttaaaaaaaatactgtttgtttaaagcatgcataaaaatttatgtattgaaatatacttaaaaattcaagatgcttcccatttgtgtaatatttacctggaggactcgtacttaggtgtcttaacgtgaattgagtctccaaggtctccatgtgaaacaagcaaaaagagaattatctgtaatgttgtaatttgtacctaagttttttaatgagtgaaatttgcattataaactttttccattcataaatacataagtgaaccaaaggtttttgtcctttccttcactgatttgctttaaaaaaaataaaagataatgatttattgcagaattatgattctattttctcaatatgttaacttggaaaaaaattttagccttatcttaatctgtcccaacagcaatgtgacggatttttgcagattcaaaatctgcaatggttatttacaagtcaatctactgaattccttttttaaataatcttttgaaactaagaaaatgtgtcaaattgtgtgcattcattctgtaggtaaaattcttaaggattgccatgtcagtccttcagttgtacagtgaactgttgtacactggttcaatgaaaggaagttaaaagtaccttttacatattgtaaaagtggatacagttgatttgtgagtaggcactctttaatccattacctggcactagcaacattagaattttaaaataaaataattgggaaagaaggtgggtcatgtattaatcagtgaacagagatttacctaaccaacagacttggattgtcttttgacataatcaaaatgcaacacatgcactttgtgtgtctcctcttaattgaagggagggctgagggatgttttctcttcttgtcttgtgtataattctctattgcttaggatattaaagtagagcactcaagtgtgggtttctgtgttattgaggatttgtttggaattcaaattacagttatgtactggatgctacagacttataacagcatagtgaatggtaagactagtgcaaaacagttatttctgaaaattaaagaccattattgctacc

SEQ ID NO: 5824 - protein, 508 aa, Homo sapiens; identical to SEQ ID NO: 768

SEQ ID NO: 5825 - DNA, 3017 bp, Homo sapiens
gggggctggagagagtgaggaggaaggggaggaggtgccgtcccacaataccaggcgggagggcgggtaggcggtttgtatccgggctgtgaggtgctcggagcctcggcggaccttgctgcctctgtctctttaacgcgagaggaagcgatgcagaggggtggaaaatggcagagctgcagatgttactagaggaggagatcccgtctggcaagagggcgctgatcgagagttaccagaacctgactcgggtggcagactactgtgaaaacaactacatacaggctacagacaagagaaaagctttagaggagaccaaagcctatacaacccaatctctagctagtgttgcttatcaaataaatgcattggccaacaatgtactccagttgctggatatccaagcctctcagcttcggagaatggagtcttccatcaatcatatctcacagactgtggatattcataaggagaaagtggcacgaagagagattggtattttgacaacaaataagaatacatcaagaactcacaaaataatagcacctgcgaatatggagcgccctgtaaggtatattcggaaacctatcgattacacagttctggatgatgtgggccatggtgtcaagtggctaaaagccaagcatggaaataaccagcctgcaagaactggcacactgtcgagaacaaatcctcctactcagaaaccgccaagtcctcccatgtcaggccggggaacactgggacggaatactccttataaaaccctggaacctgttaaacccccaacagttcctaatgactatatgaccagtcctgctaggcttggaagtcagcatagtccaggcaggacagcatctttaaatcagagaccaaggacacacagtggaagtagtggaggaagtggaagtcgagaaaacagtggtagcagtagtattggcattcccattgctgtgcctacaccttcgccacccactattggaccagcagccccgggctcagctcctggttcccagtatggcacaatgaccaggcagatatctcgacacaactctactacttcttcgacatcttctggtggatacagacgaactccctctgtgactgctcaattttctgctcagcctcatgttaatggaggtccactttattctcaaaattcaattgctgatagtccaactccaccgccaccacctccaccagatgacattcccatgtttgatgactctccacctcccccaccaccaccaccagtggattatgaagatgaggaggctgcagtagttcagtataatgatccatatgcagatggggatcctgcttgggcccccaagaattatattgagaaagttgttgcaatatatgattatacaaaagacaaggatgatgagctgtcatttatggagggtgcaatcatttatgttataaagaagaatgatgatggctggtatgaaggagtctgcaatcgagtgactggtctgttccctgggaactatgttgaatcaatcatgcactatactgattaatttttttttttcttttgaagtagattcttattactcagtcatactgtgggactattatggttaacagaactgtcttaatatgttttaaaatgtgcccatattttcagaacatgctgttttattggtaaattgaatgtctacctgtaagcataaatctttgaggcagtttatgtattgctgaatagcaatttatacaagaagctgtccataactgattatgcttatgtacttacttacacatttttaactttatgaccagcctaaatattctgggggaagtggggtataatatttaacgaatcatgattcagattgtaccattacatgtttcagtgcagcatggttactaacgctatgtcagactaatattaaaatcagaaaatttaaatgctggtgctggtcagactttttttgttagattctctcatttaaaaaaaatactgtttgtttaaagcatgcataaaaatttatgtattgaaatatacttaaaaattcaagatgcttcccatttgtgtaatatttacctggaggactcgtacttaggtgtcttaacgtgaattgagtctccaaggtctccatgtgaaacaagcaaaaagagaattatctgtaatgttgtaatttgtacctaagttttttaatgagtgaaatttgcattataaactttttccattcataaatacataagtgaaccaaaggtttttgtcctttccttcactgatttgctttaaaaaaaataaaagataatgatttattgcagaattatgattctattttctcaatatgttaacttggaaaaaaattttagccttatcttaatctgtcccaacagcaatgtgacggatttttgcagattcaaaatctgcaatggttatttacaagtcaatctactgaattccttttttaaataatcttttgaaactaagaaaatgtgtcaaattgtgtgcattcattctgtaggtaaaattcttaaggattgccatgtcagtccttcagttgtacagtgaactgttgtacactggttcaatgaaaggaagttaaaagtaccttttacatattgtaaaagtggatacagttgatttgtgagtaggcactctttaatccattacctggcactagcaacattagaattttaaaataaaataattgggaaagaaggtgggtcatgtattaatcagtgaacagagatttacctaaccaacagacttggattgtcttttgacataatcaaaatgcaacacatgcactttgtgtgtctcctcttaattgaagggagggctgagggatgttttctcttcttgtcttgtgtataattctctattgcttaggatattaaagtagagcactcaagtgtgggtttctgtgttattgaggatttgtttggaattcaaattacagttatgtactggatgctacagacttataacagcatagtgaatggtaagactagtgcaaaacagttatttctgaaaattaaagaccattattgctacc

SEQ ID NO: 5826 - protein, 452 aa, Homo sapiens; identical to SEQ ID NO: 764

SEQ ID NO: 5827 - DNA, 3116 bp, Homo sapiens
tcaggcggctgcacgaagggggtggaggggggctggagagagtgaggaggaaggggaggaggtgccgtcccacaataccaggcgggagggcgggtaggcggtttgtatccgggctgtgaggtgctcggagcctcggcggaccttgctgcctctgtctctttaacgcgagaggaagcgatgcagaggggtggaaaatggcagagctgcagatgttactagaggaggagatcccgtctggcaagagggcgctgatcgagagttaccagaacctgactcgggtggcagactactgtgaaaacaactacatacaggctacagacaagagaaaagctttagaggagaccaaagcctatacaacccaatctctagctagtgttgcttatcaaataaatgcattggccaacaatgtactccagttgctggatatccaagcctctcagcttcggagaatggagtcttccatcaatcatatctcacagactgtggatattcataaggagaaagtggcacgaagagagattggtattttgacaacaaataagaatacatcaagaactcacaaaataatagcacctgcgaatatggagcgccctgtaaggtatattcggaaacctatcgattacacagttctggatgatgtgggccatggtgtcaagcatggaaataaccagcctgcaagaactggcacactgtcgagaacaaatcctcctactcagaaaccgccaagtcctcccatgtcaggccggggaacactgggacggaatactccttataaaaccctggaacctgttaaacccccaacagttcctaatgactatatgaccagtcctgctaggcttggaagtcagcatagtccaggcaggacagcatctttaaatcagagaccaaggacacacagtggaagtagtggaggaagtggaagtcgagaaaacagtggtagcagtagtattggcattcccattgctgtgcctacaccttcgccacccactattggaccagcagccccgggctcagctcctggttcccagtatggcacaatgaccaggcagatatctcgacacaactctactacttcttcgacatcttctggtggatacagacgaactccctctgtgactgctcaattttctgctcagcctcatgttaatggaggtccactttattctcaaaattcaatttctattgctccaccccctccccctatgcctcagttgactccacagatacctctcacaggcttcgtggccagggtgcaggaaaacattgctgatagtccaactccaccgccaccacctccaccagatgacattcccatgtttgatgactctccacctcccccaccaccaccaccagtggattatgaagatgaggaggctgcagtagttcagtataatgatccatatgcagatggggatcctgcttgggcccccaagaattatattgagaaagttgttgcaatatatgattatacaaaagacaaggatgatgagctgtcatttatggagggtgcaatcatttatgttataaagaagaatgatgatggctggtatgaaggagtctgcaatcgagtgactggtctgttccctgggaactatgttgaatcaatcatgcactatactgattaatttttttttttcttttgaagtagattcttattactcagtcatactgtgggactattatggttaacagaactgtcttaatatgttttaaaatgtgcccatattttcagaacatgctgttttattggtaaattgaatgtctacctgtaagcataaatctttgaggcagtttatgtattgctgaatagcaatttatacaagaagctgtccataactgattatgcttatgtacttacttacacatttttaactttatgaccagcctaaatattctgggggaagtggggtataatatttaacgaatcatgattcagattgtaccattacatgtttcagtgcagcatggttactaacgctatgtcagactaatattaaaatcagaaaatttaaatgctggtgctggtcagactttttttgttagattctctcatttaaaaaaaatactgtttgtttaaagcatgcataaaaatttatgtattgaaatatacttaaaaattcaagatgcttcccatttgtgtaatatttacctggaggactcgtacttaggtgtcttaacgtgaattgagtctccaaggtctccatgtgaaacaagcaaaaagagaattatctgtaatgttgtaatttgtacctaagttttttaatgagtgaaatttgcattataaactttttccattcataaatacataagtgaaccaaaggtttttgtcctttccttcactgatttgctttaaaaaaaataaaagataatgatttattgcagaattatgattctattttctcaatatgttaacttggaaaaaaattttagccttatcttaatctgtcccaacagcaatgtgacggatttttgcagattcaaaatctgcaatggttatttacaagtcaatctactgaattccttttttaaataatcttttgaaactaagaaaatgtgtcaaattgtgtgcattcattctgtaggtaaaattcttaaggattgccatgtcagtccttcagttgtacagtgaactgttgtacactggttcaatgaaaggaagttaaaagtaccttttacatattgtaaaagtggatacagttgatttgtgagtaggcactctttaatccattacctggcactagcaacattagaattttaaaataaaataattgggaaagaaggtgggtcatgtattaatcagtgaacagagatttacctaaccaacagacttggattgtcttttgacataatcaaaatgcaacacatgcactttgtgtgtctcctcttaattgaagggagggctgagggatgttttctcttcttgtcttgtgtataattctctattgcttaggatattaaagtagagcactcaagtgtgggtttctgtgttattgaggatttgtttggaattcaaattacagttatgtactggatgctacagacttataacagcatagtgaatggtaagactagtgcaaaacagttatttctgaaaattaaagaccattattgctacc

SEQ ID NO: 5828 - protein, 476 aa, Homo sapiens; identical to SEQ ID NO: 766

SEQ ID NO: 5829 - DNA, 3029 bp, Homo sapiens
tcaggcggctgcacgaagggggtggaggggggctggagagagtgaggaggaaggggaggaggtgccgtcccacaataccaggcgggagggcgggtaggcggtttgtatccgggctgtgaggtgctcggagcctcggcggaccttgctgcctctgtctctttaacgcgagaggaagcgatgcagaggggtggaaaatggcagagctgcagatgttactagaggaggagatcccgtctggcaagagggcgctgatcgagagttaccagaacctgactcgggtggcagactactgtgaaaacaactacatacaggctacagacaagagaaaagctttagaggagaccaaagcctatacaacccaatctctagctagtgttgcttatcaaataaatgcattggccaacaatgtactccagttgctggatatccaagcctctcagcttcggagaatggagtcttccatcaatcatatctcacagactgtggatattcataaggagaaagtggcacgaagagagattggtattttgacaacaaataagaatacatcaagaactcacaaaataatagcacctgcgaatatggagcgccctgtaaggtatattcggaaacctatcgattacacagttctggatgatgtgggccatggtgtcaagcatggaaataaccagcctgcaagaactggcacactgtcgagaacaaatcctcctactcagaaaccgccaagtcctcccatgtcaggccggggaacactgggacggaatactccttataaaaccctggaacctgttaaacccccaacagttcctaatgactatatgaccagtcctgctaggcttggaagtcagcatagtccaggcaggacagcatctttaaatcagagaccaaggacacacagtggaagtagtggaggaagtggaagtcgagaaaacagtggtagcagtagtattggcattcccattgctgtgcctacaccttcgccacccactattggaccagcagccccgggctcagctcctggttcccagtatggcacaatgaccaggcagatatctcgacacaactctactacttcttcgacatcttctggtggatacagacgaactccctctgtgactgctcaattttctgctcagcctcatgttaatggaggtccactttattctcaaaattcaattgctgatagtccaactccaccgccaccacctccaccagatgacattcccatgtttgatgactctccacctcccccaccaccaccaccagtggattatgaagatgaggaggctgcagtagttcagtataatgatccatatgcagatggggatcctgcttgggcccccaagaattatattgagaaagttgttgcaatatatgattatacaaaagacaaggatgatgagctgtcatttatggagggtgcaatcatttatgttataaagaagaatgatgatggctggtatgaaggagtctgcaatcgagtgactggtctgttccctgggaactatgttgaatcaatcatgcactatactgattaatttttttttttcttttgaagtagattcttattactcagtcatactgtgggactattatggttaacagaactgtcttaatatgttttaaaatgtgcccatattttcagaacatgctgttttattggtaaattgaatgtctacctgtaagcataaatctttgaggcagtttatgtattgctgaatagcaatttatacaagaagctgtccataactgattatgcttatgtacttacttacacatttttaactttatgaccagcctaaatattctgggggaagtggggtataatatttaacgaatcatgattcagattgtaccattacatgtttcagtgcagcatggttactaacgctatgtcagactaatattaaaatcagaaaatttaaatgctggtgctggtcagactttttttgttagattctctcatttaaaaaaaatactgtttgtttaaagcatgcataaaaatttatgtattgaaatatacttaaaaattcaagatgcttcccatttgtgtaatatttacctggaggactcgtacttaggtgtcttaacgtgaattgagtctccaaggtctccatgtgaaacaagcaaaaagagaattatctgtaatgttgtaatttgtacctaagttttttaatgagtgaaatttgcattataaactttttccattcataaatacataagtgaaccaaaggtttttgtcctttccttcactgatttgctttaaaaaaaataaaagataatgatttattgcagaattatgattctattttctcaatatgttaacttggaaaaaaattttagccttatcttaatctgtcccaacagcaatgtgacggatttttgcagattcaaaatctgcaatggttatttacaagtcaatctactgaattccttttttaaataatcttttgaaactaagaaaatgtgtcaaattgtgtgcattcattctgtaggtaaaattcttaaggattgccatgtcagtccttcagttgtacagtgaactgttgtacactggttcaatgaaaggaagttaaaagtaccttttacatattgtaaaagtggatacagttgatttgtgagtaggcactctttaatccattacctggcactagcaacattagaattttaaaataaaataattgggaaagaaggtgggtcatgtattaatcagtgaacagagatttacctaaccaacagacttggattgtcttttgacataatcaaaatgcaacacatgcactttgtgtgtctcctcttaattgaagggagggctgagggatgttttctcttcttgtcttgtgtataattctctattgcttaggatattaaagtagagcactcaagtgtgggtttctgtgttattgaggatttgtttggaattcaaattacagttatgtactggatgctacagacttataacagcatagtgaatggtaagactagtgcaaaacagttatttctgaaaattaaagaccattattgctacc

SEQ ID NO: 5830 - protein, 447 aa, Homo sapiens; identical to SEQ ID NO: 5798

SEQ ID NO: 5831 - DNA, 1992 bp, Homo sapiens
gtcatttttattgttttgtttactgtaagttcctttttgtttgttttttttaattacatcttcaacactttatgtttaaatcttaattgttgatgtattcttagaaaatcgaatctttaggatctaggctttccctcatcccgtgcttatgttttactagcaataatgcaaaattttagcttgctttctacattaaaaaactaattatgaatataaacctttttaaaaatactcaattagattttctactggttggggattctttttccattttttcaacttgtaaaatgtaaataacagagtagaaaatctgcacacagaagcagacctaatactaccaactttacttttctcttcatcaaaacaaacaataatcaacaaagaaacaaaaatctgtccacaggagactgaatttttagggaaccaaagctgtttcaagccaaaatcaggggcatgaatgagcagagtgaagagtgatcaaaccattaacgtaatgttactcatatcattactgcagtccaaatgacaaaagtgacatagatttattttagattgttaacatttgtcccgatctgaaccttggaataaggaaactactcctataatccttataaaaagagacattgtctcctaacaccctgcattcattaatttgtagtacttccagatacccttatttttagctcattttgttatttttaaatgattcttgagtagcataaactttaacacaccaagcttttatttctaatcattgcatgttttattatagtgcatgctgtacttaagttagagctttcttaaattctgttaacttataagtttccatctagacttatttttgattcaaatcaatcatatgaatctttttagttgctgatagtccaactccaccgccaccacctccaccagatgacattcccatgtttgatgactctccacctcccccaccaccaccaccagtggattatgaagatgaggaggctgcagtagttcagtataatgatccatatgcagatggggatcctgcttgggcccccaagaattatattgagaaagttgttgcaatatatgattatacaaaagacaaggatgatgagctgtcatttatggagggtgcaatcatttatgttataaagaagaatgatgatggctggtatgaaggagtctgcaatcgagtgactggtctgttccctgggaactatgttgaatcaatcatgcactatactgattaatttttttttttcttttgaagtagattcttattactcagtcatactgtgggactattatggttaacagaactgtcttaatatgttttaaaatgtgcccatattttcagaacatgctgttttattggtaaattgaatgtctacctgtaagcataaatctttgaggcagtttatgtattgctgaatagcaatttatacaagaagctgtccataactgattatgcttatgtacttacttacacatttttaactttatgaccagcctaaatattctgggggaagtggggtataatatttaacgaatcatgattcagattgtaccattacatgtttcagtgcagcatggttactaacgctatgtcagactaatattaaaatcagaaaatttaaatgctggtgctggtcagactttttttgttagattctctcatttaaaaaaaatactgtttgtttaaagcatgcataaaaatttatgtattgaaatatacttaaaaattcaagatgcttcccatttgtgtaatatttacctggaggactcgtacttaggtgtcttaacgtgaattgagtctccaaggtctccatgtgaaacaagcaaaaagagaattatctgtaatgttgtaatttgtacctaagttttttaatgagtgaaatttgcattataaactttttccattcataaatacataagtgaaccaaaggtttttgtcctttccttcactgatttgctttaaaaaaaataaaagataatgatttattgcag

SEQ ID NO: 5832 - protein, 103 aa, Homo sapiens; identical to SEQ ID NO: 5784

SEQ ID NO: 5833 - DNA, 1386 bp, Homo sapiens
cagcagccccgggctcagctcctggttcccagtatggcacaatgaccaggcagatatctcgacacaactctactacttcttcgacatcttctggtggatacagacgaactccctctgtgactgctcaattttctgctcagcctcatgttaatggaggtccactttattctcaaaattcaatttctattgctccaccccctccccctatgcctcagttgactccacagatacctctcacaggcttcgtggccagggtgcaggaaaacattgctgatagtccaactccaccgccaccacctccaccagatgacattcccatgtttgatgactctccacctcccccaccaccaccaccagtggattatgaagatgaggaggctgcagtagttcagtataatgatccatatgcagatggggatcctgcttgggcccccaagaattatattgagaaagttgttgcaatatatgattatacaaaagacaaggatgatgagctgtcatttatggagggtgcaatcatttatgttataaagaagaatgatgatggctggtatgaaggagtctgcaatcgagtgactggtctgttccctgggaactatgttgaatcaatcatgcactatactgattaatttttttttttcttttgaagtagattcttattactcagtcatactgtgggactattatggttaacagaactgtcttaatatgttttaaaatgtgcccatattttcagaacatgctgttttattggtaaattgaatgtctacctgtaagcataaatctttgaggcagtttatgtattgctgaatagcaatttatacaagaagctgtccataactgattatgcttatgtacttacttacacatttttaactttatgaccagcctaaatattctgggggaagtggggtataatatttaacgaatcatgattcagattgtaccattacatgtttcagtgcagcatggttactaacgctatgtcagactaatattaaaatcagaaaatttaaatgctggtgctggtcagactttttttgttagattctctcatttaaaaaaaatactgtttgtttaaagcatgcataaaaatttatgtattgaaatatacttaaaaattcaagatgcttcccatttgtgtaatatttacctggaggactcgtacttaggtgtcttaacgtgaattgagtctccaaggtctccatgtgaaacaagcaaaaagagaattatctgtaatgttgtaatttgtacctaagttttttaatgagtgaaatttgcattataaactttttccattcataaatacataagtgaaccaaaggtttttgtcctttccttcactgatttgctttaaaaaaaataaaagataatgatttattgcag

SEQ ID NO: 5834 - protein, 195 aa, Homo sapiens; identical to SEQ ID NO: 5786

SEQ ID NO: 5835 - DNA, 1264 bp, Homo sapiens
gtatccgggctgtgaggtgctcggagcctcggcggaccttgctgcctctgtctctttaacgcgagaggaagcgatgcagaggggtggaaaatggcagagctgcagatacctctcacaggcttcgtggccagggtgcaggaaaacattgctgatagtccaactccaccgccaccacctccaccagatgacattcccatgtttgatgactctccacctcccccaccaccaccaccagtggattatgaagatgaggaggctgcagtagttcagtataatgatccatatgcagatggggatcctgcttgggcccccaagaattatattgagaaagttgttgcaatatatgattatacaaaagacaaggatgatgagctgtcatttatggagggtgcaatcatttatgttataaagaagaatgatgatggctggtatgaaggagtctgcaatcgagtgactggtctgttccctgggaactatgttgaatcaatcatgcactatactgattaatttttttttttcttttgaagtagattcttattactcagtcatactgtgggactattatggttaacagaactgtcttaatatgttttaaaatgtgcccatattttcagaacatgctgttttattggtaaattgaatgtctacctgtaagcataaatctttgaggcagtttatgtattgctgaatagcaatttatacaagaagctgtccataactgattatgcttatgtacttacttacacatttttaactttatgaccagcctaaatattctgggggaagtggggtataatatttaacgaatcatgattcagattgtaccattacatgtttcagtgcagcatggttactaacgctatgtcagactaatattaaaatcagaaaatttaaatgctggtgctggtcagactttttttgttagattctctcatttaaaaaaaatactgtttgtttaaagcatgcataaaaatttatgtattgaaatatacttaaaaattcaagatgcttcccatttgtgtaatatttacctggaggactcgtacttaggtgtcttaacgtgaattgagtctccaaggtctccatgtgaaacaagcaaaaagagaattatctgtaatgttgtaatttgtacctaagttttttaatgagtgaaatttgcattataaactttttccattcataaatacataagtgaaccaaaggtttttgtcctttccttcactgatttgctttaaaaaaaataaaagataatgatttattgcag

SEQ ID NO: 5836 - protein, 138 aa, Homo sapiens; identical to SEQ ID NO: 5788

SEQ ID NO: 5837 - DNA, 2439 bp, Homo sapiens
gagtgaggaggaaggggaggaggtgccgtcccacaataccaggcgggagggcgggtaggcggtttgtatccgggctgtgaggtgctcggagcctcggcggaccttgctgcctctgtctctttaacgcgagaggaagcgatgcagaggggtggaaaatggcagagctgcagatgttactagaggaggagatcccgtctggcaagagggcgctgatcgagagttaccagaacctgactcgggtggcagactactgtgaaaacaactacatacaggctacagacaagagaaaagctttagaggagaccaaagcctatacaacccaatctctagctagtgttgcttatcaaataaatgcattggccaacaatgtactccagttgctggatatccaagcctctcagcttcggagaatggagtcttccatcaatcatatctcacagactgtggatattcataaggagaaagtggcacgaagagagattggtattttgacaacaaataagaatacatcaagaactcacaaaataatagcacctgcgaatatggagcgccctgtaaggtatattcggaaacctatcgattacacagttctggatgatgtgggccatggtgtcaagtggctaaaagccaagcatggaaataaccagcctgcaagaactggcacactgtcgagaacaaatcctcctactcagaaaccgccaagtcctcccatgtcaggccggggaacactgggacggaatactccttataaaaccctggaacctgttaaacccccaacagttcctaatgactatatgaccagtcctgctaggcttggaagtcagcatagtccaggcaggacagcatctttaaatcagagaccaaggacacacagtggaagtagtggaggaagtggaagtcgagaaaacagtggtagcagtagtattggcattcccattgctgtgcctacaccttcgccacccactattggaccagaaaacatttctgtccctcctccttctggagctccaccagcaccacctctggcaccacttctcccagtgagcactgtgatagcagccccgggctcagctcctggttcccagtatggcacaatgaccaggcagatatctcgacacaactctactacttcttcgacatcttctggtggatacagacgaactccctctgtgactgctcaattttctgctcagcctcatgttaatggaggtccactttattctcaaaattcaatttctattgctccaccccctccccctatgcctcagttgactccacagatacctctcacaggcttcgtggccagggtgcaggaaaacattgctgatagtccaactccaccgccaccacctccaccagatgacattcccatgtttgatgactctccacctcccccaccaccaccaccagtggattatgaagatgaggaggctgcagtagttcagtataatgatccatatgcagatggggatcctgcttgggcccccaagaattatattgagaaagttgttgcaatatatgattatacaaaagacaaggatgatgagctgtcatttatggagggtgcaatcatttatgttataaagaagaatgatgatggctggtatgaaggagtctgcaatcgagtgactggtctgttccctgggaactatgttgaatcaatcatgcactatactgattaatttttttttttcttttgaagtagattcttattactcagtcatactgtgggactattatggttaacagaactgtcttaatatgttttaaaatgtgcccatattttcagaacatgctgttttattggtaaattgaatgtctacctgtaagcataaatctttgaggcagtttatgtattgctgaatagcaatttatacaagaagctgtccataactgattatgcttatgtacttacttacacatttttaactttatgaccagcctaaatattctgggggaagtggggtataatatttaacgaatcatgattcagattgtaccattacatgtttcagtgcagcatggttactaacgctatgtcagactaatattaaaatcagaaaatttaaatgctggtgctggtcagactttttttgttagattctctcatttaaaaaaaatactgtttgtttaaagcatgcataaaaatttatgtattgaaatatacttaaaaattcaagatgcttcccatttgtgtaatatttacctggaggactcgtacttaggtgtcttaacgtgaattgagtctccaaggtctccatgtgaaacaagcaaaaagagaattatctgtaatgttgtaatttgtacctaagttttttaatgagtgaaatttgcattataaactttttccattcataaatacataagtgaaccaaaggtttttgtcctttccttcactgatttgctttaaaaaaaataaaagataatgatttattgcag

SEQ ID NO: 5838 - protein, 508 aa, Homo sapiens; identical to SEQ ID NO: 768

SEQ ID NO: 5839 - DNA, 2358 bp, Homo sapiens
gagtgaggaggaaggggaggaggtgccgtcccacaataccaggcgggagggcgggtaggcggtttgtatccgggctgtgaggtgctcggagcctcggcggaccttgctgcctctgtctctttaacgcgagaggaagcgatgcagaggggtggaaaatggcagagctgcagatgttactagaggaggagatcccgtctggcaagagggcgctgatcgagagttaccagaacctgactcgggtggcagactactgtgaaaacaactacatacaggctacagacaagagaaaagctttagaggagaccaaagcctatacaacccaatctctagctagtgttgcttatcaaataaatgcattggccaacaatgtactccagttgctggatatccaagcctctcagcttcggagaatggagtcttccatcaatcatatctcacagactgtggatattcataaggagaaagtggcacgaagagagattggtattttgacaacaaataagaatacatcaagaactcacaaaataatagcacctgcgaatatggagcgccctgtaaggtatattcggaaacctatcgattacacagttctggatgatgtgggccatggtgtcaagtggctaaaagccaagcatggaaataaccagcctgcaagaactggcacactgtcgagaacaaatcctcctactcagaaaccgccaagtcctcccatgtcaggccggggaacactgggacggaatactccttataaaaccctggaacctgttaaacccccaacagttcctaatgactatatgaccagtcctgctaggcttggaagtcagcatagtccaggcaggacagcatctttaaatcagagaccaaggacacacagtggaagtagtggaggaagtggaagtcgagaaaacagtggtagcagtagtattggcattcccattgctgtgcctacaccttcgccacccactattggaccagcagccccgggctcagctcctggttcccagtatggcacaatgaccaggcagatatctcgacacaactctactacttcttcgacatcttctggtggatacagacgaactccctctgtgactgctcaattttctgctcagcctcatgttaatggaggtccactttattctcaaaattcaatttctattgctccaccccctccccctatgcctcagttgactccacagatacctctcacaggcttcgtggccagggtgcaggaaaacattgctgatagtccaactccaccgccaccacctccaccagatgacattcccatgtttgatgactctccacctcccccaccaccaccaccagtggattatgaagatgaggaggctgcagtagttcagtataatgatccatatgcagatggggatcctgcttgggcccccaagaattatattgagaaagttgttgcaatatatgattatacaaaagacaaggatgatgagctgtcatttatggagggtgcaatcatttatgttataaagaagaatgatgatggctggtatgaaggagtctgcaatcgagtgactggtctgttccctgggaactatgttgaatcaatcatgcactatactgattaatttttttttttcttttgaagtagattcttattactcagtcatactgtgggactattatggttaacagaactgtcttaatatgttttaaaatgtgcccatattttcagaacatgctgttttattggtaaattgaatgtctacctgtaagcataaatctttgaggcagtttatgtattgctgaatagcaatttatacaagaagctgtccataactgattatgcttatgtacttacttacacatttttaactttatgaccagcctaaatattctgggggaagtggggtataatatttaacgaatcatgattcagattgtaccattacatgtttcagtgcagcatggttactaacgctatgtcagactaatattaaaatcagaaaatttaaatgctggtgctggtcagactttttttgttagattctctcatttaaaaaaaatactgtttgtttaaagcatgcataaaaatttatgtattgaaatatacttaaaaattcaagatgcttcccatttgtgtaatatttacctggaggactcgtacttaggtgtcttaacgtgaattgagtctccaaggtctccatgtgaaacaagcaaaaagagaattatctgtaatgttgtaatttgtacctaagttttttaatgagtgaaatttgcattataaactttttccattcataaatacataagtgaaccaaaggtttttgtcctttccttcactgatttgctttaaaaaaaataaaagataatgatttattgcag

SEQ ID NO: 5840 - protein, 481 aa, Homo sapiens; identical to SEQ ID NO: 762

SEQ ID NO: 5841 - DNA, 2283 bp, Homo sapiens
gggggctggagagagtgaggaggaaggggaggaggtgccgtcccacaataccaggcgggagggcgggtaggcggtttgtatccgggctgtgaggtgctcggagcctcggcggaccttgctgcctctgtctctttaacgcgagaggaagcgatgcagaggggtggaaaatggcagagctgcagatgttactagaggaggagatcccgtctggcaagagggcgctgatcgagagttaccagaacctgactcgggtggcagactactgtgaaaacaactacatacaggctacagacaagagaaaagctttagaggagaccaaagcctatacaacccaatctctagctagtgttgcttatcaaataaatgcattggccaacaatgtactccagttgctggatatccaagcctctcagcttcggagaatggagtcttccatcaatcatatctcacagactgtggatattcataaggagaaagtggcacgaagagagattggtattttgacaacaaataagaatacatcaagaactcacaaaataatagcacctgcgaatatggagcgccctgtaaggtatattcggaaacctatcgattacacagttctggatgatgtgggccatggtgtcaagtggctaaaagccaagcatggaaataaccagcctgcaagaactggcacactgtcgagaacaaatcctcctactcagaaaccgccaagtcctcccatgtcaggccggggaacactgggacggaatactccttataaaaccctggaacctgttaaacccccaacagttcctaatgactatatgaccagtcctgctaggcttggaagtcagcatagtccaggcaggacagcatctttaaatcagagaccaaggacacacagtggaagtagtggaggaagtggaagtcgagaaaacagtggtagcagtagtattggcattcccattgctgtgcctacaccttcgccacccactattggaccagcagccccgggctcagctcctggttcccagtatggcacaatgaccaggcagatatctcgacacaactctactacttcttcgacatcttctggtggatacagacgaactccctctgtgactgctcaattttctgctcagcctcatgttaatggaggtccactttattctcaaaattcaattgctgatagtccaactccaccgccaccacctccaccagatgacattcccatgtttgatgactctccacctcccccaccaccaccaccagtggattatgaagatgaggaggctgcagtagttcagtataatgatccatatgcagatggggatcctgcttgggcccccaagaattatattgagaaagttgttgcaatatatgattatacaaaagacaaggatgatgagctgtcatttatggagggtgcaatcatttatgttataaagaagaatgatgatggctggtatgaaggagtctgcaatcgagtgactggtctgttccctgggaactatgttgaatcaatcatgcactatactgattaatttttttttttcttttgaagtagattcttattactcagtcatactgtgggactattatggttaacagaactgtcttaatatgttttaaaatgtgcccatattttcagaacatgctgttttattggtaaattgaatgtctacctgtaagcataaatctttgaggcagtttatgtattgctgaatagcaatttatacaagaagctgtccataactgattatgcttatgtacttacttacacatttttaactttatgaccagcctaaatattctgggggaagtggggtataatatttaacgaatcatgattcagattgtaccattacatgtttcagtgcagcatggttactaacgctatgtcagactaatattaaaatcagaaaatttaaatgctggtgctggtcagactttttttgttagattctctcatttaaaaaaaatactgtttgtttaaagcatgcataaaaatttatgtattgaaatatacttaaaaattcaagatgcttcccatttgtgtaatatttacctggaggactcgtacttaggtgtcttaacgtgaattgagtctccaaggtctccatgtgaaacaagcaaaaagagaattatctgtaatgttgtaatttgtacctaagttttttaatgagtgaaatttgcattataaactttttccattcataaatacataagtgaaccaaaggtttttgtcctttccttcactgatttgctttaaaaaaaataaaagataatgatttattgcag

SEQ ID NO: 5842 - protein, 452 aa, Homo sapiens; identical to SEQ ID NO: 764

SEQ ID NO: 5843 - DNA, 2382 bp, Homo sapiens
tcaggcggctgcacgaagggggtggaggggggctggagagagtgaggaggaaggggaggaggtgccgtcccacaataccaggcgggagggcgggtaggcggtttgtatccgggctgtgaggtgctcggagcctcggcggaccttgctgcctctgtctctttaacgcgagaggaagcgatgcagaggggtggaaaatggcagagctgcagatgttactagaggaggagatcccgtctggcaagagggcgctgatcgagagttaccagaacctgactcgggtggcagactactgtgaaaacaactacatacaggctacagacaagagaaaagctttagaggagaccaaagcctatacaacccaatctctagctagtgttgcttatcaaataaatgcattggccaacaatgtactccagttgctggatatccaagcctctcagcttcggagaatggagtcttccatcaatcatatctcacagactgtggatattcataaggagaaagtggcacgaagagagattggtattttgacaacaaataagaatacatcaagaactcacaaaataatagcacctgcgaatatggagcgccctgtaaggtatattcggaaacctatcgattacacagttctggatgatgtgggccatggtgtcaagcatggaaataaccagcctgcaagaactggcacactgtcgagaacaaatcctcctactcagaaaccgccaagtcctcccatgtcaggccggggaacactgggacggaatactccttataaaaccctggaacctgttaaacccccaacagttcctaatgactatatgaccagtcctgctaggcttggaagtcagcatagtccaggcaggacagcatctttaaatcagagaccaaggacacacagtggaagtagtggaggaagtggaagtcgagaaaacagtggtagcagtagtattggcattcccattgctgtgcctacaccttcgccacccactattggaccagcagccccgggctcagctcctggttcccagtatggcacaatgaccaggcagatatctcgacacaactctactacttcttcgacatcttctggtggatacagacgaactccctctgtgactgctcaattttctgctcagcctcatgttaatggaggtccactttattctcaaaattcaatttctattgctccaccccctccccctatgcctcagttgactccacagatacctctcacaggcttcgtggccagggtgcaggaaaacattgctgatagtccaactccaccgccaccacctccaccagatgacattcccatgtttgatgactctccacctcccccaccaccaccaccagtggattatgaagatgaggaggctgcagtagttcagtataatgatccatatgcagatggggatcctgcttgggcccccaagaattatattgagaaagttgttgcaatatatgattatacaaaagacaaggatgatgagctgtcatttatggagggtgcaatcatttatgttataaagaagaatgatgatggctggtatgaaggagtctgcaatcgagtgactggtctgttccctgggaactatgttgaatcaatcatgcactatactgattaatttttttttttcttttgaagtagattcttattactcagtcatactgtgggactattatggttaacagaactgtcttaatatgttttaaaatgtgcccatattttcagaacatgctgttttattggtaaattgaatgtctacctgtaagcataaatctttgaggcagtttatgtattgctgaatagcaatttatacaagaagctgtccataactgattatgcttatgtacttacttacacatttttaactttatgaccagcctaaatattctgggggaagtggggtataatatttaacgaatcatgattcagattgtaccattacatgtttcagtgcagcatggttactaacgctatgtcagactaatattaaaatcagaaaatttaaatgctggtgctggtcagactttttttgttagattctctcatttaaaaaaaatactgtttgtttaaagcatgcataaaaatttatgtattgaaatatacttaaaaattcaagatgcttcccatttgtgtaatatttacctggaggactcgtacttaggtgtcttaacgtgaattgagtctccaaggtctccatgtgaaacaagcaaaaagagaattatctgtaatgttgtaatttgtacctaagttttttaatgagtgaaatttgcattataaactttttccattcataaatacataagtgaaccaaaggtttttgtcctttccttcactgatttgctttaaaaaaaataaaagataatgatttattgcag

SEQ ID NO: 5844 - protein, 476 aa, Homo sapiens; identical to SEQ ID NO: 766

SEQ ID NO: 5845 - DNA, 1926 bp, Homo sapiens
gtcatttttattgttttgtttactgtaagttcctttttgtttgttttttttaattacatcttcaacactttatgtttaaatcttaattgttgatgtattcttagaaaatcgaatctttaggatctaggctttccctcatcccgtgcttatgttttactagcaataatgcaaaattttagcttgctttctacattaaaaaactaattatgaatataaacctttttaaaaatactcaattagattttctactggttggggattctttttccattttttcaacttgtaaaatgtaaataacagagtagaaaatctgcacacagaagcagacctaatactaccaactttacttttctcttcatcaaaacaaacaataatcaacaaagaaacaaaaatctgtccacaggagactgaatttttagggaaccaaagctgtttcaagccaaaatcaggggcatgaatgagcagagtgaagagtgatcaaaccattaacgtaatgttactcatatcattactgcagtccaaatgacaaaagtgacatagatttattttagattgttaacatttgtcccgatctgaaccttggaataaggaaactactcctataatccttataaaaagagacattgtctcctaacaccctgcattcattaatttgtagtacttccagatacccttatttttagctcattttgttatttttaaatgattcttgagtagcataaactttaacacaccaagcttttatttctaatcattgcatgttttattatagtgcatgctgtacttaagttagagctttcttaaattctgttaacttataagtttccatctagacttatttttgattcaaatcaatcatatgaatctttttagttgctgatagtccaactccaccgccaccacctccaccagatgacattcccatgtttgatgactctccacctcccccaccaccaccaccagtggattatgaagatgaggaggctgcagtagttcagtataatgatccatatgcagatggggatcctgcttgggcccccaagaattatattgagaaagttgttgcaatatatgattatacaaaagacaaggatgatgagctgtcatttatggagggtgcaatcatttatgttataaagaagaatgatgatggctggtatgaaggagtctgcaatcgagtgactggtctgttccctgggaactatgttgaatcaatcatgcactatactgattaatttttttttttcttttgaagtagattcttattactcagtcatactgtgggactattatggttaacagaactgtcttaatatgttttaaaatgtgcccatattttcagaacatgctgttttattggtaaattgaatgtctacctgtaagcataaatctttgaggcagtttatgtattgctgaatagcaatttatacaagaagctgtccataactgattatgcttatgtacttacttacacatttttaactttatgaccagcctaaatattctgggggaagtggggtataatatttaacgaatcatgattcagattgtaccattacatgtttcagtgcagcatggttactaacgctatgtcagactaatattaaaatcagaaaatttaaatgctggtgctggtcagactttttttgttagattctctcatttaaaaaaaatactgtttgtttaaagcatgcataaaaatttatgtattgaaatatacttaaaaattcaagatgcttcccatttgtgtaatatttacctggaggactcgtacttaggtgtcttaacgtgaattgagtctccaaggtctccatgtgaaacaagcaaaaagagaattatctgtaatgttgtaatttgtacctaagttttttaatgagtgaaatttgcattataaactttttccattcataaatacataagtgaacc

SEQ ID NO: 5846 - protein, 103 aa, Homo sapiens; identical to SEQ ID NO: 5784

SEQ ID NO: 5847 - DNA, 1320 bp, Homo sapiens
cagcagccccgggctcagctcctggttcccagtatggcacaatgaccaggcagatatctcgacacaactctactacttcttcgacatcttctggtggatacagacgaactccctctgtgactgctcaattttctgctcagcctcatgttaatggaggtccactttattctcaaaattcaatttctattgctccaccccctccccctatgcctcagttgactccacagatacctctcacaggcttcgtggccagggtgcaggaaaacattgctgatagtccaactccaccgccaccacctccaccagatgacattcccatgtttgatgactctccacctcccccaccaccaccaccagtggattatgaagatgaggaggctgcagtagttcagtataatgatccatatgcagatggggatcctgcttgggcccccaagaattatattgagaaagttgttgcaatatatgattatacaaaagacaaggatgatgagctgtcatttatggagggtgcaatcatttatgttataaagaagaatgatgatggctggtatgaaggagtctgcaatcgagtgactggtctgttccctgggaactatgttgaatcaatcatgcactatactgattaatttttttttttcttttgaagtagattcttattactcagtcatactgtgggactattatggttaacagaactgtcttaatatgttttaaaatgtgcccatattttcagaacatgctgttttattggtaaattgaatgtctacctgtaagcataaatctttgaggcagtttatgtattgctgaatagcaatttatacaagaagctgtccataactgattatgcttatgtacttacttacacatttttaactttatgaccagcctaaatattctgggggaagtggggtataatatttaacgaatcatgattcagattgtaccattacatgtttcagtgcagcatggttactaacgctatgtcagactaatattaaaatcagaaaatttaaatgctggtgctggtcagactttttttgttagattctctcatttaaaaaaaatactgtttgtttaaagcatgcataaaaatttatgtattgaaatatacttaaaaattcaagatgcttcccatttgtgtaatatttacctggaggactcgtacttaggtgtcttaacgtgaattgagtctccaaggtctccatgtgaaacaagcaaaaagagaattatctgtaatgttgtaatttgtacctaagttttttaatgagtgaaatttgcattataaactttttccattcataaatacataagtgaacc

SEQ ID NO: 5848 - protein, 195 aa, Homo sapiens; identical to SEQ ID NO: 5786

SEQ ID NO: 5849 - DNA, 1198 bp, Homo sapiens
gtatccgggctgtgaggtgctcggagcctcggcggaccttgctgcctctgtctctttaacgcgagaggaagcgatgcagaggggtggaaaatggcagagctgcagatacctctcacaggcttcgtggccagggtgcaggaaaacattgctgatagtccaactccaccgccaccacctccaccagatgacattcccatgtttgatgactctccacctcccccaccaccaccaccagtggattatgaagatgaggaggctgcagtagttcagtataatgatccatatgcagatggggatcctgcttgggcccccaagaattatattgagaaagttgttgcaatatatgattatacaaaagacaaggatgatgagctgtcatttatggagggtgcaatcatttatgttataaagaagaatgatgatggctggtatgaaggagtctgcaatcgagtgactggtctgttccctgggaactatgttgaatcaatcatgcactatactgattaatttttttttttcttttgaagtagattcttattactcagtcatactgtgggactattatggttaacagaactgtcttaatatgttttaaaatgtgcccatattttcagaacatgctgttttattggtaaattgaatgtctacctgtaagcataaatctttgaggcagtttatgtattgctgaatagcaatttatacaagaagctgtccataactgattatgcttatgtacttacttacacatttttaactttatgaccagcctaaatattctgggggaagtggggtataatatttaacgaatcatgattcagattgtaccattacatgtttcagtgcagcatggttactaacgctatgtcagactaatattaaaatcagaaaatttaaatgctggtgctggtcagactttttttgttagattctctcatttaaaaaaaatactgtttgtttaaagcatgcataaaaatttatgtattgaaatatacttaaaaattcaagatgcttcccatttgtgtaatatttacctggaggactcgtacttaggtgtcttaacgtgaattgagtctccaaggtctccatgtgaaacaagcaaaaagagaattatctgtaatgttgtaatttgtacctaagttttttaatgagtgaaatttgcattataaactttttccattcataaatacataagtgaacc

SEQ ID NO: 5850 - protein, 138 aa, Homo sapiens; identical to SEQ ID NO: 5788

SEQ ID NO: 5851 - DNA, 2316 bp, Homo sapiens
tcaggcggctgcacgaagggggtggaggggggctggagagagtgaggaggaaggggaggaggtgccgtcccacaataccaggcgggagggcgggtaggcggtttgtatccgggctgtgaggtgctcggagcctcggcggaccttgctgcctctgtctctttaacgcgagaggaagcgatgcagaggggtggaaaatggcagagctgcagatgttactagaggaggagatcccgtctggcaagagggcgctgatcgagagttaccagaacctgactcgggtggcagactactgtgaaaacaactacatacaggctacagacaagagaaaagctttagaggagaccaaagcctatacaacccaatctctagctagtgttgcttatcaaataaatgcattggccaacaatgtactccagttgctggatatccaagcctctcagcttcggagaatggagtcttccatcaatcatatctcacagactgtggatattcataaggagaaagtggcacgaagagagattggtattttgacaacaaataagaatacatcaagaactcacaaaataatagcacctgcgaatatggagcgccctgtaaggtatattcggaaacctatcgattacacagttctggatgatgtgggccatggtgtcaagcatggaaataaccagcctgcaagaactggcacactgtcgagaacaaatcctcctactcagaaaccgccaagtcctcccatgtcaggccggggaacactgggacggaatactccttataaaaccctggaacctgttaaacccccaacagttcctaatgactatatgaccagtcctgctaggcttggaagtcagcatagtccaggcaggacagcatctttaaatcagagaccaaggacacacagtggaagtagtggaggaagtggaagtcgagaaaacagtggtagcagtagtattggcattcccattgctgtgcctacaccttcgccacccactattggaccagcagccccgggctcagctcctggttcccagtatggcacaatgaccaggcagatatctcgacacaactctactacttcttcgacatcttctggtggatacagacgaactccctctgtgactgctcaattttctgctcagcctcatgttaatggaggtccactttattctcaaaattcaatttctattgctccaccccctccccctatgcctcagttgactccacagatacctctcacaggcttcgtggccagggtgcaggaaaacattgctgatagtccaactccaccgccaccacctccaccagatgacattcccatgtttgatgactctccacctcccccaccaccaccaccagtggattatgaagatgaggaggctgcagtagttcagtataatgatccatatgcagatggggatcctgcttgggcccccaagaattatattgagaaagttgttgcaatatatgattatacaaaagacaaggatgatgagctgtcatttatggagggtgcaatcatttatgttataaagaagaatgatgatggctggtatgaaggagtctgcaatcgagtgactggtctgttccctgggaactatgttgaatcaatcatgcactatactgattaatttttttttttcttttgaagtagattcttattactcagtcatactgtgggactattatggttaacagaactgtcttaatatgttttaaaatgtgcccatattttcagaacatgctgttttattggtaaattgaatgtctacctgtaagcataaatctttgaggcagtttatgtattgctgaatagcaatttatacaagaagctgtccataactgattatgcttatgtacttacttacacatttttaactttatgaccagcctaaatattctgggggaagtggggtataatatttaacgaatcatgattcagattgtaccattacatgtttcagtgcagcatggttactaacgctatgtcagactaatattaaaatcagaaaatttaaatgctggtgctggtcagactttttttgttagattctctcatttaaaaaaaatactgtttgtttaaagcatgcataaaaatttatgtattgaaatatacttaaaaattcaagatgcttcccatttgtgtaatatttacctggaggactcgtacttaggtgtcttaacgtgaattgagtctccaaggtctccatgtgaaacaagcaaaaagagaattatctgtaatgttgtaatttgtacctaagttttttaatgagtgaaatttgcattataaactttttccattcataaatacataagtgaacc

SEQ ID NO: 5852 - protein, 476 aa, Homo sapiens; identical to SEQ ID NO: 766

SEQ ID NO: 5853 - DNA, 361 bp, Homo sapiens
agttaagaatcatttcaaagaaagaattggccttggctggtctcaaactcttgggctcaagcagtccacctgccttggcctcccaaagtgttgggagttacaggtgtgagccaccgtgcctagcctgaaatgagatcttaaggaaataaaaaagtttcattttggatatattttggggatatttaaataaaaaattttatagatttctaacaaaaatattagtattttgaggtgtaagatgtagaggttatttcctactaacacttgccaacattgacacatctgcatgtctaataacacttaatagaggaggccgaacttcataagaggttaaagcttataccattgcatagtagcacag

SEQ ID NO: 5854 - protein, 41 aa, Homo sapiens
LRIISKKELALAGLKLLGSSSPPALASQSVGSYRCEPPCLA

SEQ ID NO: 5855 - DNA, 793 bp, Homo sapiens
gcttttttcttttgctattttcaataaatcttgctgctgctcactccttgggtccacactgctttaatgagctgtaacactgactgtgaagttctgcagcttcactcctgaggccagcgagaccacgaacccaccgggagaaatgaacaactacagatgcgccaccttaagagctgtaacactcaccatgagggtctgcagcttcattcctgaagtcgatgagaaaatcaaagcccgtatcatctgcttcacgtcccgcatttacttaacgctgtaagcatagaacgctgttcccagtgactacccctccatccccggttctgtgatttcagagacagtcgtggtatccttgagggcaggcattggttttttttttaaatttattacaatatttagcttattcctagtagagagcagtcaatggatacattttccaaattgaattgacttcatgtaagtgaattttttaataaacagcaaatttacacggtgaatattaccttttcagaatctgtttattatattaatattgatttctcaacattatacctctattaaaaactctttgttaatgaagggttttgacactaaaaaataaactaatatatagcataacactgaagtttaagaaaattattgtatgaaacattcagtaaaagcaagcacttactaccctgtcagtccaaaatgtaatattgtgcaatagcctttaaattgtattgttataaaaatgttgcttaactgggcccttaggaattaataacggttctaaaaataaactaaatggattatt

SEQ ID NO: 5856 - protein, 44 aa, Homo sapiens
MNNYRCATLRAVTLTMRVCSFIPEVDEKIKARIICFTSRIYLTL

SEQ ID NO: 5857 - DNA, 187 bp, Homo sapiens
aatacgttctcatttttctgaaataccaccaacattttcctggaactttacttcggcctctttccctgtaatgtgagacagtctgatacatctgcagtgcccttgctatatgcattacacgctatgactaggcaccgggctgggtcaactctacgccaaggttatattcagggtcgtatacttgatt

SEQ ID NO: 5858 - DNA, 680 bp, Homo sapiens
aaatgctcccagctgtggcagttcctcttctaccttctttgagtgaatttgcaacacagaaaaaggctgatgaagctgagacattgattatcaaagtgccttcacttcccagaaccatctgacgcaagatagaatccagctatgcttaatcaccacttacacagcactttctgaaatgctttctacatcttaggaggactctgactagaaaagattaggccttcagcagcctggaattggccatcctaactgacaccatcttgcagtcacttgtgataagagctgggcatctgcttccaaaggctctgcagcatcaaatactctgcattgcaaaaccagtggaccacctcgcctagacaagggctcctttagctacccctggactggtttgttcactttttcttctatctgttttgccctttgatgttaaatgttactttgtttgttgtagaatgtttagcctataacattcatatattgattaagtatactatgatgtatggtgtgcaatactgactggcttgtggggtgacttgagcctgtgtgctcaggactatgtgcccgtgactccctagtgcatgggaagtgtgatggagaattgccttcttgggaactccatgtagctcatggcttttgtgattgaaataccttcaataaaagcctgacattgtggaaagaca

SEQ ID NO: 5859 - protein, 39 aa, Homo sapiens
MLPAVAVPLLPSLSEFATQKKADEAETLIIKVPSLPRTI

SEQ ID NO: 5860 - DNA, 1596 bp, Homo sapiens
ttgacagggtgtttcagaaacttggaaacctgaagcacccacccagagctaacccctgtcttcttccccaggcctctgacttccctcacctcccaaccatcattacaggaaagactgtgaactcctgagttcagcttgatttctgactacatcccagcaagctctggcatctgtggattaaaatccctggatctctctcagttgtgtatttgttcatcttcatatgctggcaggaacaactattaatacagatactcagaagccaataacatgacaggagctgggactggtttgaacacagggtgtgcagatggggagggggtactggccttgggcctcctatgatgcagacatggtgaatttaattcaaggaggaggagaatgttttaggcaggtggttatatgtgggaagataattttattcatggatccaaatgtttgttgagtcctttctttgtgctaaggttcttgcggtgaaccagaattataacagtgagctcatctgactgttttaggatgtacagcctagtgttaacattcttggtatctttttgtgccttatctaaaacatttctcgatcactggtttcagatgttcatttattatattcttttcaaagattcagagattggcttttgtcatccactattgtatgttttgtttcattgacctctagtgataccttgatctttcccactttctgttttcggattggagaagatgtaccttttttgtcaactcttacttttatcagatgatcaactcacgtatttggatctttatttgttttctcaaataaatatttaaggttatacatttcttctgacttcctttattttcacaatcattcaattcatagcatttcctatattctgttataattatttcattgattcataaatttctttgaaaaataatttggtcttctattgattgtgagaagataatctaagtttaatttggtcagagaatatcatctgtttaataaactttgaaatttggtgagtgaattatcttttttactgataaagagtgatgtcatcttttttaatgtttcacataggtttggaaagaatgcattttagattgtgtgtagtattttctattagattatgtttgcaatttttgtttcaatttatatcttatatacttaattttttgttgtctgtcacctgagaggtgtgttcaaatctccaactatgatagtggatttgtgcatttgtctttatagttccattttcttacatactttgcagttactttattaaggtatatgtaaatttacatttatatttttcttctgaactgaactctttgtgtggtagcctgcttcatctataggctaatgtgtttaaccttgaaaactactagttttaatattaatataactgtcaattcttttggttaccctttgcttgacatcctttctcttgaatttccattcttttttagtttcaacctttctttatatttaccacttgtatacagcatttaaagggttatttataaaaaaaaaaaaaactcttgtcacatttgtctttatgattttctagttgtgtcaattttttatttgctttctcttggctttttatttat

SEQ ID NO: 5861 - protein, 50 aa, Homo sapiens
MYSLVLTFLVSFCALSKTFLDHWFQMFIYYILFKDSEIGFCHPLLYVLFH

SEQ ID NO: 5862 - DNA, 1876 bp, Homo sapiens
aaccccagcagccgactcgaccccaggagcagagtacaggagacaccatggggagagaccctggtgtgtccttcaaggctgttggtctacaacctgctggagatgtaaatttgccatgacttcctggaggacagcagcatggagaaagatcctagaaaaggtcagacccaactcaggccttggtgtccctggactgcaagtgtggaaggagggaaagcctggtttacctctctctgcatctgagctctgctacccatggagcagatggatggtgggaacaggaaagagcttatgttacacctcattcccatgcttagcccacccagagctaacccctgtcttcttccccaggcctctgacttccctcacctcccaaccatcattacaggaaagactgtgaactcctgagttcagcttgatttctgactacatcccagcaagctctggcatctgtggattaaaatccctggatctctctcagttgtgtatttgttcatcttcatatgctggcaggaacaactattaatacagatactcagaagccaataacatgacaggagctgggactggtttgaacacagggtgtgcagatggggagggggtactggccttgggcctcctatgatgcagacatggtgaatttaattcaaggaggaggagaatgttttaggcaggtggttatatgtgggaagataattttattcatggatccaaatgtttgttgagtcctttctttgtgctaaggttcttgcggtgaaccagaattataacagtgagctcatctgactgttttaggatgtacagcctagtgttaacattcttggtatctttttgtgccttatctaaaacatttctcgatcactggtttcagatgttcatttattatattcttttcaaagattcagagattggcttttgtcatccactattgtatgttttgtttcattgacctctagtgataccttgatctttcccactttctgttttcggattggagaagatgtaccttttttgtcaactcttacttttatcagatgatcaactcacgtatttggatctttatttgttttctcaaataaatatttaaggttatacatttcttctgacttcctttattttcacaatcattcaattcatagcatttcctatattctgttataattatttcattgattcataaatttctttgaaaaataatttggtcttctattgattgtgagaagataatctaagtttaatttggtcagagaatatcatctgtttaataaactttgaaatttggtgagtgaattatcttttttactgataaagagtgatgtcatcttttttaatgtttcacataggtttggaaagaatgcattttagattgtgtgtagtattttctattagattatgtttgcaatttttgtttcaatttatatcttatatacttaattttttgttgtctgtcacctgagaggtgtgttcaaatctccaactatgatagtggatttgtgcatttgtctttatagttccattttcttacatactttgcagttactttattaaggtatatgtaaatttacatttatatttttcttctgaactgaactctttgtgtggtagcctgcttcatctataggctaatgtgtttaaccttgaaaactactagttttaatattaatataactgtcaattcttttggttaccctttgcttgacatcctttctcttgaatttccattcttttttagtttcaacctttctttatatttaccacttgtatacagcatttaaagggttatttataaaaaaaaaaaaaactcttgtcacatttgtctttatgattttctagttgtgtcaattttttatttgctttctcttggctttttatttat

SEQ ID NO: 5863 - protein, 94 aa, Homo sapiens
MTSWRTAAWRKILEKVRPNSGLGVPGLQVWKEGKPGLPLSASELCYPWSRWMVGTGKSLCYTSFPCLAHPELTPVFFPRPLTSLTSQPSLQERL

SEQ ID NO: 5864 - DNA, 2630 bp, Homo sapiens
gggattgtgggaaggcagctgaactcggcgcctggaaagatggaggcagcggagacagaggcggaagctgcagccctagaggtcctggctgaggtggcaggcatcttggaacctgtaggcctgcaggaggaggcagaactgccagccaagatcctggttgagtttgtggtggactctcagaagaaagacaagctgctctgcagccagcttcaggtagcggatttcctgcagaacatcctggctcaggaggacactgctaagggtctcgaccccttggcttctgaagacacgagccgacagaaggcaattgcagctaaggaacaatggaaagagctgaaggccacctacagggagcacgtagaggccatcaaaattggcctcaccaaggccctgactcagatggaggaagcccagaggaaacggacacaactccgggaagcctttgagcagctccaggccaagaaacaaatggccatggagaaacgcagagcagtccagaaccagtggcagctacaacaggagaagcatctgcagcatctggcggaggtttctgcagaggtgagggagcgtaagacagggactcagcaggagcttgacagggtgtttcagaaacttggaaacctgaagcagcaggcagaacaggagcgggacaagctgcagaggtatcagaccttcctccagcttctgtataccctgcagggtaagctgttgttccctgaggctgaggctgaggcagagaatcttccagatgataaaccccagcagccgactcgaccccaggagcagagtacaggagacaccatggggagagaccctggtgtgtccttcaaggctgttggtctacaacctgctggagatgtaaatttgccatgacttcctggaggacagcagcatggagaaagatcctagaaaaggtcagacccaactcaggccttggtgtccctggactgcaagtgtggaaggagggaaagcctggtttacctctctctgcatctgagctctgctacccatggagcagatggatggtgggaacaggaaagagcttatgttacacctcattcccatgcttagcccacccagagctaacccctgtcttcttccccaggcctctgacttccctcacctcccaaccatcattacaggaaagactgtgaactcctgagttcagcttgatttctgactacatcccagcaagctctggcatctgtggattaaaatccctggatctctctcagttgtgtatttgttcatcttcatatgctggcaggaacaactattaatacagatactcagaagccaataacatgacaggagctgggactggtttgaacacagggtgtgcagatggggagggggtactggccttgggcctcctatgatgcagacatggtgaatttaattcaaggaggaggagaatgttttaggcaggtggttatatgtgggaagataattttattcatggatccaaatgtttgttgagtcctttctttgtgctaaggttcttgcggtgaaccagaattataacagtgagctcatctgactgttttaggatgtacagcctagtgttaacattcttggtatctttttgtgccttatctaaaacatttctcgatcactggtttcagatgttcatttattatattcttttcaaagattcagagattggcttttgtcatccactattgtatgttttgtttcattgacctctagtgataccttgatctttcccactttctgttttcggattggagaagatgtaccttttttgtcaactcttacttttatcagatgatcaactcacgtatttggatctttatttgttttctcaaataaatatttaaggttatacatttcttctgacttcctttattttcacaatcattcaattcatagcatttcctatattctgttataattatttcattgattcataaatttctttgaaaaataatttggtcttctattgattgtgagaagataatctaagtttaatttggtcagagaatatcatctgtttaataaactttgaaatttggtgagtgaattatcttttttactgataaagagtgatgtcatcttttttaatgtttcacataggtttggaaagaatgcattttagattgtgtgtagtattttctattagattatgtttgcaatttttgtttcaatttatatcttatatacttaattttttgttgtctgtcacctgagaggtgtgttcaaatctccaactatgatagtggatttgtgcatttgtctttatagttccattttcttacatactttgcagttactttattaaggtatatgtaaatttacatttatatttttcttctgaactgaactctttgtgtggtagcctgcttcatctataggctaatgtgtttaaccttgaaaactactagttttaatattaatataactgtcaattcttttggttaccctttgcttgacatcctttctcttgaatttccattcttttttagtttcaacctttctttatatttaccacttgtatacagcatttaaagggttatttataaaaaaaaaaaaaactcttgtcacatttgtctttatgattttctagttgtgtcaattttttatttgctttctcttggctttttatttat

SEQ ID NO: 5865 - protein, 277 aa, Homo sapiens; identical to SEQ ID NO: 774

SEQ ID NO: 5866 - DNA, 1712 bp, Homo sapiens
ctgaggcagagaatcttccagatgataaaccccagcagccgactcgaccccaggagcagagtacaggagacaccatggggagagaccctggtgtgtccttcaaggctgttggtctacaacctgctggagatgtaaatttgccatgacttcctggaggacagcagcatggagaaagatcctagaaaaggcctctgacttccctcacctcccaaccatcattacaggaaagactgtgaactcctgagttcagcttgatttctgactacatcccagcaagctctggcatctgtggattaaaatccctggatctctctcagttgtgtatttgttcatcttcatatgctggcaggaacaactattaatacagatactcagaagccaataacatgacaggagctgggactggtttgaacacagggtgtgcagatggggagggggtactggccttgggcctcctatgatgcagacatggtgaatttaattcaaggaggaggagaatgttttaggcaggtggttatatgtgggaagataattttattcatggatccaaatgtttgttgagtcctttctttgtgctaaggttcttgcggtgaaccagaattataacagtgagctcatctgactgttttaggatgtacagcctagtgttaacattcttggtatctttttgtgccttatctaaaacatttctcgatcactggtttcagatgttcatttattatattcttttcaaagattcagagattggcttttgtcatccactattgtatgttttgtttcattgacctctagtgataccttgatctttcccactttctgttttcggattggagaagatgtaccttttttgtcaactcttacttttatcagatgatcaactcacgtatttggatctttatttgttttctcaaataaatatttaaggttatacatttcttctgacttcctttattttcacaatcattcaattcatagcatttcctatattctgttataattatttcattgattcataaatttctttgaaaaataatttggtcttctattgattgtgagaagataatctaagtttaatttggtcagagaatatcatctgtttaataaactttgaaatttggtgagtgaattatcttttttactgataaagagtgatgtcatcttttttaatgtttcacataggtttggaaagaatgcattttagattgtgtgtagtattttctattagattatgtttgcaatttttgtttcaatttatatcttatatacttaattttttgttgtctgtcacctgagaggtgtgttcaaatctccaactatgatagtggatttgtgcatttgtctttatagttccattttcttacatactttgcagttactttattaaggtatatgtaaatttacatttatatttttcttctgaactgaactctttgtgtggtagcctgcttcatctataggctaatgtgtttaaccttgaaaactactagttttaatattaatataactgtcaattcttttggttaccctttgcttgacatcctttctcttgaatttccattcttttttagtttcaacctttctttatatttaccacttgtatacagcatttaaagggttatttataaaaaaaaaaaaaactcttgtcacatttgtctttatgattttctagttgtgtcaattttttatttgctttctcttggctttttatttat

SEQ ID NO: 5867 - protein, 37 aa, Homo sapiens
MINPSSRLDPRSRVQETPWGETLVCPSRLLVYNLLEM

SEQ ID NO: 5868 - DNA, 2319 bp, Homo sapiens
ggactctcagaagaaagacaagctgctctgcagccagcttcaggtagcggatttcctgcagaacatcctggctcaggaggacactgctaagggtctcgaccccttggcttctgaagacacgagccgacagaaggcaattgcagctaaggaacaatggaaagagctgaaggccacctacagggagcacgtagaggccatcaaaattggcctcaccaaggccctgactcagatggaggaagcccagaggaaacggacacaactccgggaagcctttgagcagctccaggccaagaaacaaatggccatggagaaacgcagagcagtccagaaccagtggcagctacaacaggagaagcatctgcagcatctggcggaggtttctgcagagggtaagctgttgttccctgaggctgaggctgaggcagagaatcttccagatgataaaccccagcagccgactcgaccccaggagcagagtacaggagacaccatggggagagaccctggtgtgtccttcaaggctgttggtctacaacctgctggagatgtaaatttgccatgacttcctggaggacagcagcatggagaaagatcctagaaaaggtcagacccaactcaggccttggtgtccctggactgcaagtgtggaaggagggaaagcctggtttacctctctctgcatctgagctctgctacccatggagcagatggatggtgggaacaggaaagagcttatgttacacctcattcccatgcttagcccacccagagctaacccctgtcttcttccccaggcctctgacttccctcacctcccaaccatcattacaggaaagactgtgaactcctgagttcagcttgatttctgactacatcccagcaagctctggcatctgtggattaaaatccctggatctctctcagttgtgtatttgttcatcttcatatgctggcaggaacaactattaatacagatactcagaagccaataacatgacaggagctgggactggtttgaacacagggtgtgcagatggggagggggtactggccttgggcctcctatgatgcagacatggtgaatttaattcaaggaggaggagaatgttttaggcaggtggttatatgtgggaagataattttattcatggatccaaatgtttgttgagtcctttctttgtgctaaggttcttgcggtgaaccagaattataacagtgagctcatctgactgttttaggatgtacagcctagtgttaacattcttggtatctttttgtgccttatctaaaacatttctcgatcactggtttcagatgttcatttattatattcttttcaaagattcagagattggcttttgtcatccactattgtatgttttgtttcattgacctctagtgataccttgatctttcccactttctgttttcggattggagaagatgtaccttttttgtcaactcttacttttatcagatgatcaactcacgtatttggatctttatttgttttctcaaataaatatttaaggttatacatttcttctgacttcctttattttcacaatcattcaattcatagcatttcctatattctgttataattatttcattgattcataaatttctttgaaaaataatttggtcttctattgattgtgagaagataatctaagtttaatttggtcagagaatatcatctgtttaataaactttgaaatttggtgagtgaattatcttttttactgataaagagtgatgtcatcttttttaatgtttcacataggtttggaaagaatgcattttagattgtgtgtagtattttctattagattatgtttgcaatttttgtttcaatttatatcttatatacttaattttttgttgtctgtcacctgagaggtgtgttcaaatctccaactatgatagtggatttgtgcatttgtctttatagttccattttcttacatactttgcagttactttattaaggtatatgtaaatttacatttatatttttcttctgaactgaactctttgtgtggtagcctgcttcatctataggctaatgtgtttaaccttgaaaactactagttttaatattaatataactgtcaattcttttggttaccctttgcttgacatcctttctcttgaatttccattcttttttagtttcaacctttctttatatttaccacttgtatacagcatttaaagggttatttataaaaaaaaaaaaaactcttgtcacatttgtctttatgattttctagttgtgtcaattttttatttgctttctcttggctttttatttat

SEQ ID NO: 5869 - protein, 110 aa, Homo sapiens
MEEAQRKRTQLREAFEQLQAKKQMAMEKRRAVQNQWQLQQEKHLQHLAEVSAEGKLLFPEAEAEAENLPDDKPQQPTRPQEQSTGDTMGRDPGVSFKAVGLQPAGDVNLP

SEQ ID NO: 5870 - DNA, 2069 bp, Homo sapiens
gaactcggcgcctggaaagatggaggcagcggagacagaggcggaagctgcagccctagaggtcctggctgaggtggcaggcatcttggaacctgtaggcctgcaggaggaggcagaactgccagccaagatcctggttgagtttgtggtggactctcagaagaaagacaagctgctctgcagccagcttcaggtagcggatttcctgcagaacatcctggctcaggaggacactgctaagggtctcgaccccttggcttctgaagacacgagcctggcagctacaacaggagaagcatctgcagcatctggcggaggtttctgcagagggtaagctgttgttccctgaggctgaggctgaggcagagaatcttccagatgataaaccccagcagccgactcgaccccaggagcagagtacaggagacaccatggggagagaccctggtgtgtccttcaaggctgttggtctacaacctgctggagatgtaaatttgccatgacttcctggaggacagcagcatggagaaagatcctagaaaaggcctctgacttccctcacctcccaaccatcattacaggaaagactgtgaactcctgagttcagcttgatttctgactacatcccagcaagctctggcatctgtggattaaaatccctggatctctctcagttgtgtatttgttcatcttcatatgctggcaggaacaactattaatacagatactcagaagccaataacatgacaggagctgggactggtttgaacacagggtgtgcagatggggagggggtactggccttgggcctcctatgatgcagacatggtgaatttaattcaaggaggaggagaatgttttaggcaggtggttatatgtgggaagataattttattcatggatccaaatgtttgttgagtcctttctttgtgctaaggttcttgcggtgaaccagaattataacagtgagctcatctgactgttttaggatgtacagcctagtgttaacattcttggtatctttttgtgccttatctaaaacatttctcgatcactggtttcagatgttcatttattatattcttttcaaagattcagagattggcttttgtcatccactattgtatgttttgtttcattgacctctagtgataccttgatctttcccactttctgttttcggattggagaagatgtaccttttttgtcaactcttacttttatcagatgatcaactcacgtatttggatctttatttgttttctcaaataaatatttaaggttatacatttcttctgacttcctttattttcacaatcattcaattcatagcatttcctatattctgttataattatttcattgattcataaatttctttgaaaaataatttggtcttctattgattgtgagaagataatctaagtttaatttggtcagagaatatcatctgtttaataaactttgaaatttggtgagtgaattatcttttttactgataaagagtgatgtcatcttttttaatgtttcacataggtttggaaagaatgcattttagattgtgtgtagtattttctattagattatgtttgcaatttttgtttcaatttatatcttatatacttaattttttgttgtctgtcacctgagaggtgtgttcaaatctccaactatgatagtggatttgtgcatttgtctttatagttccattttcttacatactttgcagttactttattaaggtatatgtaaatttacatttatatttttcttctgaactgaactctttgtgtggtagcctgcttcatctataggctaatgtgtttaaccttgaaaactactagttttaatattaatataactgtcaattcttttggttaccctttgcttgacatcctttctcttgaatttccattcttttttagtttcaacctttctttatatttaccacttgtatacagcatttaaagggttatttataaaaaaaaaaaaaactcttgtcacatttgtctttatgattttctagttgtgtcaattttttatttgctttctcttggctttttatttat

SEQ ID NO: 5871 - protein, 104 aa, Homo sapiens
MEAAETEAEAAALEVLAEVAGILEPVGLQEEAELPAKILVEFVVDSQKKDKLLCSQLQVADFLQNILAQEDTAKGLDPLASEDTSLAATTGEASAASGGGFCRG

SEQ ID NO: 5872 - DNA, 2741 bp, Homo sapiens
ggcagctgaactcggcgcctggaaagatggaggcagcggagacagaggcggaagctgcagccctagaggtcctggctgaggtggcaggcatcttggaacctgtaggcctgcaggaggaggcagaactgccagccaagatcctggttgagtttgtggtggtatgtacaagatgagagcgagcctttcagaagccagggtctggtcctggctcctcttactgagatacagggcagcactggcagagagcagacttaaggaaacctgtaaggaggtaaggatgttccctgtctctgccctccctctgagcaggactctcagaagaaagacaagctgctctgcagccagcttcaggtagcggatttcctgcagaacatcctggctcaggaggacactgctaagggtctcgaccccttggcttctgaagacacgagccgtgagtaggcaggggattgtagtagcagctgacctgagtggggaaggaaggaggatttcagttaggtctcccatttggctgatgggaaggaggcccagtgttgcagggaggcaggctagcaggccaccctcactcatgtactcattcctggtggctcatctcaggacagaaggcaattgcagctaaggaacaatggaaagagctgaaggccacctacagggagcacgtagaggccatcaaaattggcctcaccaaggccctgactcagatggaggaagcccagaggaaacggacacaactccgggaagcctttgagcagctccaggccaagaaacaaatggccatggagaaacgcagagcagtccagaaccagtggcagctacaacaggagaagcatctgcagcatctggcggaggtttctgcagaggtgagggagcgtaagacagggactcagcaggagcttgacagggtgtttcagaaacttggaaacctgaagcagcaggcagaacaggagcgggacaagctgcagaggtatcagaccttcctccagcttctgtataccctgcagggtaagctgttgttccctgaggctgaggctgaggcagagaatcttccagatgataaaccccagcagccgactcgaccccaggagcagagtacaggagacaccatggggagagaccctggtgtgtccttcaaggctgttggtctacaacctgctggagatgtaaatttgccatgacttcctggaggacagcagcatggagaaagatcctagaaaaggcctctgacttccctcacctcccaaccatcattacaggaaagactgtgaactcctgagttcagcttgatttctgactacatcccagcaagctctggcatctgtggattaaaatccctggatctctctcagttgtgtatttgttcatcttcatatgctggcaggaacaactattaatacagatactcagaagccaataacatgacaggagctgggactggtttgaacacagggtgtgcagatggggagggggtactggccttgggcctcctatgatgcagacatggtgaatttaattcaaggaggaggagaatgttttaggcaggtggttatatgtgggaagataattttattcatggatccaaatgtttgttgagtcctttctttgtgctaaggttcttgcggtgaaccagaattataacagtgagctcatctgactgttttaggatgtacagcctagtgttaacattcttggtatctttttgtgccttatctaaaacatttctcgatcactggtttcagatgttcatttattatattcttttcaaagattcagagattggcttttgtcatccactattgtatgttttgtttcattgacctctagtgataccttgatctttcccactttctgttttcggattggagaagatgtaccttttttgtcaactcttacttttatcagatgatcaactcacgtatttggatctttatttgttttctcaaataaatatttaaggttatacatttcttctgacttcctttattttcacaatcattcaattcatagcatttcctatattctgttataattatttcattgattcataaatttctttgaaaaataatttggtcttctattgattgtgagaagataatctaagtttaatttggtcagagaatatcatctgtttaataaactttgaaatttggtgagtgaattatcttttttactgataaagagtgatgtcatcttttttaatgtttcacataggtttggaaagaatgcattttagattgtgtgtagtattttctattagattatgtttgcaatttttgtttcaatttatatcttatatacttaattttttgttgtctgtcacctgagaggtgtgttcaaatctccaactatgatagtggatttgtgcatttgtctttatagttccattttcttacatactttgcagttactttattaaggtatatgtaaatttacatttatatttttcttctgaactgaactctttgtgtggtagcctgcttcatctataggctaatgtgtttaaccttgaaaactactagttttaatattaatataactgtcaattcttttggttaccctttgcttgacatcctttctcttgaatttccattcttttttagtttcaacctttctttatatttaccacttgtatacagcatttaaagggttatttataaaaaaaaaaaaaactcttgtcacatttgtctttatgattttctagttgtgtcaattttttatttgctttctcttggctttttatttat

SEQ ID NO: 5873 - protein, 157 aa, Homo sapiens
MEEAQRKRTQLREAFEQLQAKKQMAMEKRRAVQNQWQLQQEKHLQHLAEVSAEVRERKTGTQQELDRVFQKLGNLKQQAEQERDKLQRYQTFLQLLYTLQGKLLFPEAEAEAENLPDDKPQQPTRPQEQSTGDTMGRDPGVSFKAVGLQPAGDVNLP

SEQ ID NO: 5874 - DNA, 2439 bp, Homo sapiens
gaaggcagctgaactcggcgcctggaaagatggaggcagcggagacagaggcggaagctgcagccctagaggtcctggctgaggtggcaggcatcttggaacctgtaggcctgcaggaggaggcagaactgccagccaagatcctggttgagtttgtggtggtatgtacaagatgagagcgagcctttcagaagccagggtctggtcctggctcctcttactgagatacagggcagcactggcagagagcagacttaaggaaacctgtaaggaggtaaggatgttccctgtctctgccctccctctgagcaggactctcagaagaaagacaagctgctctgcagccagcttcaggtagcggatttcctgcagaacatcctggctcaggaggacactgctaagggtctcgaccccttggcttctgaagacacgagccgacagaaggcaattgcagctaaggaacaatggaaagagctgaaggccacctacagggagcacgtagaggccatcaaaattggcctcaccaaggccctgactcagatggaggaagcccagaggaaacggacacaactccgggaagcctttgagcagctccaggccaagaaacaaatggccatggagaaacgcagagcagtccagaaccagtggcagctacaacaggagaagcatctgcagcatctggcggaggtttctgcagagggtaagctgttgttccctgaggctgaggctgaggcagagaatcttccagatgataaaccccagcagccgactcgaccccaggagcagagtacaggagacaccatggggagagaccctggtgtgtccttcaaggctgttggtctacaacctgctggagatgtaaatttgccatgacttcctggaggacagcagcatggagaaagatcctagaaaaggcctctgacttccctcacctcccaaccatcattacaggaaagactgtgaactcctgagttcagcttgatttctgactacatcccagcaagctctggcatctgtggattaaaatccctggatctctctcagttgtgtatttgttcatcttcatatgctggcaggaacaactattaatacagatactcagaagccaataacatgacaggagctgggactggtttgaacacagggtgtgcagatggggagggggtactggccttgggcctcctatgatgcagacatggtgaatttaattcaaggaggaggagaatgttttaggcaggtggttatatgtgggaagataattttattcatggatccaaatgtttgttgagtcctttctttgtgctaaggttcttgcggtgaaccagaattataacagtgagctcatctgactgttttaggatgtacagcctagtgttaacattcttggtatctttttgtgccttatctaaaacatttctcgatcactggtttcagatgttcatttattatattcttttcaaagattcagagattggcttttgtcatccactattgtatgttttgtttcattgacctctagtgataccttgatctttcccactttctgttttcggattggagaagatgtaccttttttgtcaactcttacttttatcagatgatcaactcacgtatttggatctttatttgttttctcaaataaatatttaaggttatacatttcttctgacttcctttattttcacaatcattcaattcatagcatttcctatattctgttataattatttcattgattcataaatttctttgaaaaataatttggtcttctattgattgtgagaagataatctaagtttaatttggtcagagaatatcatctgtttaataaactttgaaatttggtgagtgaattatcttttttactgataaagagtgatgtcatcttttttaatgtttcacataggtttggaaagaatgcattttagattgtgtgtagtattttctattagattatgtttgcaatttttgtttcaatttatatcttatatacttaattttttgttgtctgtcacctgagaggtgtgttcaaatctccaactatgatagtggatttgtgcatttgtctttatagttccattttcttacatactttgcagttactttattaaggtatatgtaaatttacatttatatttttcttctgaactgaactctttgtgtggtagcctgcttcatctataggctaatgtgtttaaccttgaaaactactagttttaatattaatataactgtcaattcttttggttaccctttgcttgacatcctttctcttgaatttccattcttttttagtttcaacctttctttatatttaccacttgtatacagcatttaaagggttatttataaaaaaaaaaaaaactcttgtcacatttgtctttatgattttctagttgtgtcaattttttatttgctttctcttggctttttatttat

SEQ ID NO: 5875 - protein, 110 aa, Homo sapiens; identical to SEQ ID NO: 5869

SEQ ID NO: 5876 - DNA, 1873 bp, Homo sapiens
gtgggaaggcagctgaactcggcgcctggaaagatggaggcagcggagacagaggcggaagctgcagccctagaggtcctggctgaggtggcaggcatcttggaacctgtaggcctgcaggaggaggcagaactgccagccaagatcctggttgagtttgtggtggactctcagaagaaagacaagctgctctgcagccagcttcaggtagcggatttcctgcagaacatcctggctcaggaggacacctggtgtgtccttcaaggctgttggtctacaacctgctggagatgtaaatttgccatgacttcctggaggacagcagcatggagaaagatcctagaaaaggcctctgacttccctcacctcccaaccatcattacaggaaagactgtgaactcctgagttcagcttgatttctgactacatcccagcaagctctggcatctgtggattaaaatccctggatctctctcagttgtgtatttgttcatcttcatatgctggcaggaacaactattaatacagatactcagaagccaataacatgacaggagctgggactggtttgaacacagggtgtgcagatggggagggggtactggccttgggcctcctatgatgcagacatggtgaatttaattcaaggaggaggagaatgttttaggcaggtggttatatgtgggaagataattttattcatggatccaaatgtttgttgagtcctttctttgtgctaaggttcttgcggtgaaccagaattataacagtgagctcatctgactgttttaggatgtacagcctagtgttaacattcttggtatctttttgtgccttatctaaaacatttctcgatcactggtttcagatgttcatttattatattcttttcaaagattcagagattggcttttgtcatccactattgtatgttttgtttcattgacctctagtgataccttgatctttcccactttctgttttcggattggagaagatgtaccttttttgtcaactcttacttttatcagatgatcaactcacgtatttggatctttatttgttttctcaaataaatatttaaggttatacatttcttctgacttcctttattttcacaatcattcaattcatagcatttcctatattctgttataattatttcattgattcataaatttctttgaaaaataatttggtcttctattgattgtgagaagataatctaagtttaatttggtcagagaatatcatctgtttaataaactttgaaatttggtgagtgaattatcttttttactgataaagagtgatgtcatcttttttaatgtttcacataggtttggaaagaatgcattttagattgtgtgtagtattttctattagattatgtttgcaatttttgtttcaatttatatcttatatacttaattttttgttgtctgtcacctgagaggtgtgttcaaatctccaactatgatagtggatttgtgcatttgtctttatagttccattttcttacatactttgcagttactttattaaggtatatgtaaatttacatttatatttttcttctgaactgaactctttgtgtggtagcctgcttcatctataggctaatgtgtttaaccttgaaaactactagttttaatattaatataactgtcaattcttttggttaccctttgcttgacatcctttctcttgaatttccattcttttttagtttcaacctttctttatatttaccacttgtatacagcatttaaagggttatttataaaaaaaaaaaaaactcttgtcacatttgtctttatgattttctagttgtgtcaattttttatttgctttctcttggctttttatttat

SEQ ID NO: 5877 - protein, 123 aa, Homo sapiens
MEAAETEAEAAALEVLAEVAGILEPVGLQEEAELPAKILVEFVVDSQKKDKLLCSQLQVADFLQNILAQEDTWCVLQGCWSTTCWRCKFAMTSWRTAAWRKILEKASDFPHLPTIITGKTVNS

SEQ ID NO: 5878 - DNA, 2295 bp, Homo sapiens
attgtgggaaggcagctgaactcggcgcctggaaagatggaggcagcggagacagaggcggaagctgcagccctagaggtcctggctgaggtggcaggcatcttggaacctgtaggcctgcaggaggaggcagaactgccagccaagatcctggttgagtttgtggtggactctcagaagaaagacaagctgctctgcagccagcttcaggtagcggatttcctgcagaacatcctggctcaggaggacactgctaagggtctcgaccccttggcttctgaagacacgagccgacagaaggcaattgcagctaaggaacaatggaaagagctgaaggccacctacagggagcacgtagaggccatcaaaattggcctcaccaaggccctgactcagatggaggaagcccagaggaaacggacacaactccgggaagcctttgagcagctccaggccaagaaacaaatggccatggagaaacgcagagcagtccagaaccagtggcagctacaacaggagaagcatctgcagcatctggcggaggtttctgcagagggtaagctgttgttccctgaggctgaggctgaggcagagaatcttccagatgataaaccccagcagccgactcgaccccaggagcagagtacaggagacaccatggggagagaccctggtgtgtccttcaaggctgttggtctacaacctgctggagatgtaaatttgccatgacttcctggaggacagcagcatggagaaagatcctagaaaaggcctctgacttccctcacctcccaaccatcattacaggaaagactgtgaactcctgagttcagcttgatttctgactacatcccagcaagctctggcatctgtggattaaaatccctggatctctctcagttgtgtatttgttcatcttcatatgctggcaggaacaactattaatacagatactcagaagccaataacatgacaggagctgggactggtttgaacacagggtgtgcagatggggagggggtactggccttgggcctcctatgatgcagacatggtgaatttaattcaaggaggaggagaatgttttaggcaggtggttatatgtgggaagataattttattcatggatccaaatgtttgttgagtcctttctttgtgctaaggttcttgcggtgaaccagaattataacagtgagctcatctgactgttttaggatgtacagcctagtgttaacattcttggtatctttttgtgccttatctaaaacatttctcgatcactggtttcagatgttcatttattatattcttttcaaagattcagagattggcttttgtcatccactattgtatgttttgtttcattgacctctagtgataccttgatctttcccactttctgttttcggattggagaagatgtaccttttttgtcaactcttacttttatcagatgatcaactcacgtatttggatctttatttgttttctcaaataaatatttaaggttatacatttcttctgacttcctttattttcacaatcattcaattcatagcatttcctatattctgttataattatttcattgattcataaatttctttgaaaaataatttggtcttctattgattgtgagaagataatctaagtttaatttggtcagagaatatcatctgtttaataaactttgaaatttggtgagtgaattatcttttttactgataaagagtgatgtcatcttttttaatgtttcacataggtttggaaagaatgcattttagattgtgtgtagtattttctattagattatgtttgcaatttttgtttcaatttatatcttatatacttaattttttgttgtctgtcacctgagaggtgtgttcaaatctccaactatgatagtggatttgtgcatttgtctttatagttccattttcttacatactttgcagttactttattaaggtatatgtaaatttacatttatatttttcttctgaactgaactctttgtgtggtagcctgcttcatctataggctaatgtgtttaaccttgaaaactactagttttaatattaatataactgtcaattcttttggttaccctttgcttgacatcctttctcttgaatttccattcttttttagtttcaacctttctttatatttaccacttgtatacagcatttaaagggttatttataaaaaaaaaaaaaactcttgtcacatttgtctttatgattttctagttgtgtcaattttttatttgctttctcttggctttttatttat

SEQ ID NO: 5879 - protein, 230 aa, Homo sapiens; identical to SEQ ID NO: 770

SEQ ID NO: 5880 - DNA, 2439 bp, Homo sapiens
gggattgtgggaaggcagctgaactcggcgcctggaaagatggaggcagcggagacagaggcggaagctgcagccctagaggtcctggctgaggtggcaggcatcttggaacctgtaggcctgcaggaggaggcagaactgccagccaagatcctggttgagtttgtggtggactctcagaagaaagacaagctgctctgcagccagcttcaggtagcggatttcctgcagaacatcctggctcaggaggacactgctaagggtctcgaccccttggcttctgaagacacgagccgacagaaggcaattgcagctaaggaacaatggaaagagctgaaggccacctacagggagcacgtagaggccatcaaaattggcctcaccaaggccctgactcagatggaggaagcccagaggaaacggacacaactccgggaagcctttgagcagctccaggccaagaaacaaatggccatggagaaacgcagagcagtccagaaccagtggcagctacaacaggagaagcatctgcagcatctggcggaggtttctgcagaggtgagggagcgtaagacagggactcagcaggagcttgacagggtgtttcagaaacttggaaacctgaagcagcaggcagaacaggagcgggacaagctgcagaggtatcagaccttcctccagcttctgtataccctgcagggtaagctgttgttccctgaggctgaggctgaggcagagaatcttccagatgataaaccccagcagccgactcgaccccaggagcagagtacaggagacaccatggggagagaccctggtgtgtccttcaaggctgttggtctacaacctgctggagatgtaaatttgccatgacttcctggaggacagcagcatggagaaagatcctagaaaaggcctctgacttccctcacctcccaaccatcattacaggaaagactgtgaactcctgagttcagcttgatttctgactacatcccagcaagctctggcatctgtggattaaaatccctggatctctctcagttgtgtatttgttcatcttcatatgctggcaggaacaactattaatacagatactcagaagccaataacatgacaggagctgggactggtttgaacacagggtgtgcagatggggagggggtactggccttgggcctcctatgatgcagacatggtgaatttaattcaaggaggaggagaatgttttaggcaggtggttatatgtgggaagataattttattcatggatccaaatgtttgttgagtcctttctttgtgctaaggttcttgcggtgaaccagaattataacagtgagctcatctgactgttttaggatgtacagcctagtgttaacattcttggtatctttttgtgccttatctaaaacatttctcgatcactggtttcagatgttcatttattatattcttttcaaagattcagagattggcttttgtcatccactattgtatgttttgtttcattgacctctagtgataccttgatctttcccactttctgttttcggattggagaagatgtaccttttttgtcaactcttacttttatcagatgatcaactcacgtatttggatctttatttgttttctcaaataaatatttaaggttatacatttcttctgacttcctttattttcacaatcattcaattcatagcatttcctatattctgttataattatttcattgattcataaatttctttgaaaaataatttggtcttctattgattgtgagaagataatctaagtttaatttggtcagagaatatcatctgtttaataaactttgaaatttggtgagtgaattatcttttttactgataaagagtgatgtcatcttttttaatgtttcacataggtttggaaagaatgcattttagattgtgtgtagtattttctattagattatgtttgcaatttttgtttcaatttatatcttatatacttaattttttgttgtctgtcacctgagaggtgtgttcaaatctccaactatgatagtggatttgtgcatttgtctttatagttccattttcttacatactttgcagttactttattaaggtatatgtaaatttacatttatatttttcttctgaactgaactctttgtgtggtagcctgcttcatctataggctaatgtgtttaaccttgaaaactactagttttaatattaatataactgtcaattcttttggttaccctttgcttgacatcctttctcttgaatttccattcttttttagtttcaacctttctttatatttaccacttgtatacagcatttaaagggttatttataaaaaaaaaaaaaactcttgtcacatttgtctttatgattttctagttgtgtcaattttttatttgctttctcttggctttttatttat

SEQ ID NO: 5881 - protein, 277 aa, Homo sapiens; identical to SEQ ID NO: 774

SEQ ID NO: 5882 - DNA, 1294 bp, Homo sapiens
aaccccagcagccgactcgaccccaggagcagagtacaggagacaccatggggagagaccctggtgtgtccttcaaggctgttggtctacaacctgctggagatgtaaatttgccatgacttcctggaggacagcagcatggagaaagatcctagaaaaggtcagacccaactcaggccttggtgtccctggactgcaagtgtggaaggagggaaagcctggtttacctctctctgcatctgagctctgctacccatggagcagatggatggtgggaacaggaaagagcttatgttacacctcattcccatgcttagcccacccagagctaacccctgtcttcttccccaggcctctgacttccctcacctcccaaccatcattacaggaaagactgtgaactcctgagttcagcttgatttctgactacatcccagcaagctctggcatctgtggattaaaatccctggatctctctcagttgtgtatttgttcatcttcatatgctggcaggaacaactattaatacagatactcagaagccaataacatgacaggagctgggactggtttgaacacagggtgtgcagatggggagggggtactggccttgggcctcctatgatgcagacatggtgaatttaattcaaggaggaggagaatgttttaggcaggtggttatatgtgggaagataattttattcatggatccaaatgtttgttgagtcctttctttgtgctaaggttcttgcggtgaaccagaattataacagtgagctcatctgactgttttaggatgtacagcctagtgttaacattcttggtatctttttgtgccttatctaaaacatttctcgatcactggtttcagatgttcatttattatattcttttcaaagattcagagattggcttttgtcatccactattgtatgttttgtttcattgacctctagtgataccttgatctttcccactttctgttttcggattggagaagatgtaccttttttgtcaactcttacttttatcagatgatcaactcacgtatttggatctttatttgttttctcaaataaatatttaaggttatacatttcttctgacttcctttattttcacaatcattcaattcatagcatttcctatattctgttataattatttcattgattcataaatttctttgaaaaataatttggtcttctattgattgtgagaagataatctaagtttaatttggtcagagaatatcatctgtttaataaactttgaaatttggtgagtgaattat

SEQ ID NO: 5883 - protein, 94 aa, Homo sapiens; identical to SEQ ID NO: 5863

SEQ ID NO: 5884 - DNA, 1130 bp, Homo sapiens
ctgaggcagagaatcttccagatgataaaccccagcagccgactcgaccccaggagcagagtacaggagacaccatggggagagaccctggtgtgtccttcaaggctgttggtctacaacctgctggagatgtaaatttgccatgacttcctggaggacagcagcatggagaaagatcctagaaaaggcctctgacttccctcacctcccaaccatcattacaggaaagactgtgaactcctgagttcagcttgatttctgactacatcccagcaagctctggcatctgtggattaaaatccctggatctctctcagttgtgtatttgttcatcttcatatgctggcaggaacaactattaatacagatactcagaagccaataacatgacaggagctgggactggtttgaacacagggtgtgcagatggggagggggtactggccttgggcctcctatgatgcagacatggtgaatttaattcaaggaggaggagaatgttttaggcaggtggttatatgtgggaagataattttattcatggatccaaatgtttgttgagtcctttctttgtgctaaggttcttgcggtgaaccagaattataacagtgagctcatctgactgttttaggatgtacagcctagtgttaacattcttggtatctttttgtgccttatctaaaacatttctcgatcactggtttcagatgttcatttattatattcttttcaaagattcagagattggcttttgtcatccactattgtatgttttgtttcattgacctctagtgataccttgatctttcccactttctgttttcggattggagaagatgtaccttttttgtcaactcttacttttatcagatgatcaactcacgtatttggatctttatttgttttctcaaataaatatttaaggttatacatttcttctgacttcctttattttcacaatcattcaattcatagcatttcctatattctgttataattatttcattgattcataaatttctttgaaaaataatttggtcttctattgattgtgagaagataatctaagtttaatttggtcagagaatatcatctgtttaataaactttgaaatttggtgagtgaattat

SEQ ID NO: 5885 - protein, 37 aa, Homo sapiens; identical to SEQ ID NO: 5867

SEQ ID NO: 5886 - DNA, 1737 bp, Homo sapiens
ggactctcagaagaaagacaagctgctctgcagccagcttcaggtagcggatttcctgcagaacatcctggctcaggaggacactgctaagggtctcgaccccttggcttctgaagacacgagccgacagaaggcaattgcagctaaggaacaatggaaagagctgaaggccacctacagggagcacgtagaggccatcaaaattggcctcaccaaggccctgactcagatggaggaagcccagaggaaacggacacaactccgggaagcctttgagcagctccaggccaagaaacaaatggccatggagaaacgcagagcagtccagaaccagtggcagctacaacaggagaagcatctgcagcatctggcggaggtttctgcagagggtaagctgttgttccctgaggctgaggctgaggcagagaatcttccagatgataaaccccagcagccgactcgaccccaggagcagagtacaggagacaccatggggagagaccctggtgtgtccttcaaggctgttggtctacaacctgctggagatgtaaatttgccatgacttcctggaggacagcagcatggagaaagatcctagaaaaggtcagacccaactcaggccttggtgtccctggactgcaagtgtggaaggagggaaagcctggtttacctctctctgcatctgagctctgctacccatggagcagatggatggtgggaacaggaaagagcttatgttacacctcattcccatgcttagcccacccagagctaacccctgtcttcttccccaggcctctgacttccctcacctcccaaccatcattacaggaaagactgtgaactcctgagttcagcttgatttctgactacatcccagcaagctctggcatctgtggattaaaatccctggatctctctcagttgtgtatttgttcatcttcatatgctggcaggaacaactattaatacagatactcagaagccaataacatgacaggagctgggactggtttgaacacagggtgtgcagatggggagggggtactggccttgggcctcctatgatgcagacatggtgaatttaattcaaggaggaggagaatgttttaggcaggtggttatatgtgggaagataattttattcatggatccaaatgtttgttgagtcctttctttgtgctaaggttcttgcggtgaaccagaattataacagtgagctcatctgactgttttaggatgtacagcctagtgttaacattcttggtatctttttgtgccttatctaaaacatttctcgatcactggtttcagatgttcatttattatattcttttcaaagattcagagattggcttttgtcatccactattgtatgttttgtttcattgacctctagtgataccttgatctttcccactttctgttttcggattggagaagatgtaccttttttgtcaactcttacttttatcagatgatcaactcacgtatttggatctttatttgttttctcaaataaatatttaaggttatacatttcttctgacttcctttattttcacaatcattcaattcatagcatttcctatattctgttataattatttcattgattcataaatttctttgaaaaataatttggtcttctattgattgtgagaagataatctaagtttaatttggtcagagaatatcatctgtttaataaactttgaaatttggtgagtgaattat

SEQ ID NO: 5887 - protein, 110 aa, Homo sapiens; identical to SEQ ID NO: 5869

SEQ ID NO: 5888 - DNA, 1487 bp, Homo sapiens
gaactcggcgcctggaaagatggaggcagcggagacagaggcggaagctgcagccctagaggtcctggctgaggtggcaggcatcttggaacctgtaggcctgcaggaggaggcagaactgccagccaagatcctggttgagtttgtggtggactctcagaagaaagacaagctgctctgcagccagcttcaggtagcggatttcctgcagaacatcctggctcaggaggacactgctaagggtctcgaccccttggcttctgaagacacgagcctggcagctacaacaggagaagcatctgcagcatctggcggaggtttctgcagagggtaagctgttgttccctgaggctgaggctgaggcagagaatcttccagatgataaaccccagcagccgactcgaccccaggagcagagtacaggagacaccatggggagagaccctggtgtgtccttcaaggctgttggtctacaacctgctggagatgtaaatttgccatgacttcctggaggacagcagcatggagaaagatcctagaaaaggcctctgacttccctcacctcccaaccatcattacaggaaagactgtgaactcctgagttcagcttgatttctgactacatcccagcaagctctggcatctgtggattaaaatccctggatctctctcagttgtgtatttgttcatcttcatatgctggcaggaacaactattaatacagatactcagaagccaataacatgacaggagctgggactggtttgaacacagggtgtgcagatggggagggggtactggccttgggcctcctatgatgcagacatggtgaatttaattcaaggaggaggagaatgttttaggcaggtggttatatgtgggaagataattttattcatggatccaaatgtttgttgagtcctttctttgtgctaaggttcttgcggtgaaccagaattataacagtgagctcatctgactgttttaggatgtacagcctagtgttaacattcttggtatctttttgtgccttatctaaaacatttctcgatcactggtttcagatgttcatttattatattcttttcaaagattcagagattggcttttgtcatccactattgtatgttttgtttcattgacctctagtgataccttgatctttcccactttctgttttcggattggagaagatgtaccttttttgtcaactcttacttttatcagatgatcaactcacgtatttggatctttatttgttttctcaaataaatatttaaggttatacatttcttctgacttcctttattttcacaatcattcaattcatagcatttcctatattctgttataattatttcattgattcataaatttctttgaaaaataatttggtcttctattgattgtgagaagataatctaagtttaatttggtcagagaatatcatctgtttaataaactttgaaatttggtgagtgaattat

SEQ ID NO: 5889 - protein, 104 aa, Homo sapiens; identical to SEQ ID NO: 5871

SEQ ID NO: 5890 - DNA, 2159 bp, Homo sapiens
ggcagctgaactcggcgcctggaaagatggaggcagcggagacagaggcggaagctgcagccctagaggtcctggctgaggtggcaggcatcttggaacctgtaggcctgcaggaggaggcagaactgccagccaagatcctggttgagtttgtggtggtatgtacaagatgagagcgagcctttcagaagccagggtctggtcctggctcctcttactgagatacagggcagcactggcagagagcagacttaaggaaacctgtaaggaggtaaggatgttccctgtctctgccctccctctgagcaggactctcagaagaaagacaagctgctctgcagccagcttcaggtagcggatttcctgcagaacatcctggctcaggaggacactgctaagggtctcgaccccttggcttctgaagacacgagccgtgagtaggcaggggattgtagtagcagctgacctgagtggggaaggaaggaggatttcagttaggtctcccatttggctgatgggaaggaggcccagtgttgcagggaggcaggctagcaggccaccctcactcatgtactcattcctggtggctcatctcaggacagaaggcaattgcagctaaggaacaatggaaagagctgaaggccacctacagggagcacgtagaggccatcaaaattggcctcaccaaggccctgactcagatggaggaagcccagaggaaacggacacaactccgggaagcctttgagcagctccaggccaagaaacaaatggccatggagaaacgcagagcagtccagaaccagtggcagctacaacaggagaagcatctgcagcatctggcggaggtttctgcagaggtgagggagcgtaagacagggactcagcaggagcttgacagggtgtttcagaaacttggaaacctgaagcagcaggcagaacaggagcgggacaagctgcagaggtatcagaccttcctccagcttctgtataccctgcagggtaagctgttgttccctgaggctgaggctgaggcagagaatcttccagatgataaaccccagcagccgactcgaccccaggagcagagtacaggagacaccatggggagagaccctggtgtgtccttcaaggctgttggtctacaacctgctggagatgtaaatttgccatgacttcctggaggacagcagcatggagaaagatcctagaaaaggcctctgacttccctcacctcccaaccatcattacaggaaagactgtgaactcctgagttcagcttgatttctgactacatcccagcaagctctggcatctgtggattaaaatccctggatctctctcagttgtgtatttgttcatcttcatatgctggcaggaacaactattaatacagatactcagaagccaataacatgacaggagctgggactggtttgaacacagggtgtgcagatggggagggggtactggccttgggcctcctatgatgcagacatggtgaatttaattcaaggaggaggagaatgttttaggcaggtggttatatgtgggaagataattttattcatggatccaaatgtttgttgagtcctttctttgtgctaaggttcttgcggtgaaccagaattataacagtgagctcatctgactgttttaggatgtacagcctagtgttaacattcttggtatctttttgtgccttatctaaaacatttctcgatcactggtttcagatgttcatttattatattcttttcaaagattcagagattggcttttgtcatccactattgtatgttttgtttcattgacctctagtgataccttgatctttcccactttctgttttcggattggagaagatgtaccttttttgtcaactcttacttttatcagatgatcaactcacgtatttggatctttatttgttttctcaaataaatatttaaggttatacatttcttctgacttcctttattttcacaatcattcaattcatagcatttcctatattctgttataattatttcattgattcataaatttctttgaaaaataatttggtcttctattgattgtgagaagataatctaagtttaatttggtcagagaatatcatctgtttaataaactttgaaatttggtgagtgaattat

SEQ ID NO: 5891 - protein, 157 aa, Homo sapiens; identical to SEQ ID NO: 5873

SEQ ID NO: 5892 - DNA, 1857 bp, Homo sapiens
gaaggcagctgaactcggcgcctggaaagatggaggcagcggagacagaggcggaagctgcagccctagaggtcctggctgaggtggcaggcatcttggaacctgtaggcctgcaggaggaggcagaactgccagccaagatcctggttgagtttgtggtggtatgtacaagatgagagcgagcctttcagaagccagggtctggtcctggctcctcttactgagatacagggcagcactggcagagagcagacttaaggaaacctgtaaggaggtaaggatgttccctgtctctgccctccctctgagcaggactctcagaagaaagacaagctgctctgcagccagcttcaggtagcggatttcctgcagaacatcctggctcaggaggacactgctaagggtctcgaccccttggcttctgaagacacgagccgacagaaggcaattgcagctaaggaacaatggaaagagctgaaggccacctacagggagcacgtagaggccatcaaaattggcctcaccaaggccctgactcagatggaggaagcccagaggaaacggacacaactccgggaagcctttgagcagctccaggccaagaaacaaatggccatggagaaacgcagagcagtccagaaccagtggcagctacaacaggagaagcatctgcagcatctggcggaggtttctgcagagggtaagctgttgttccctgaggctgaggctgaggcagagaatcttccagatgataaaccccagcagccgactcgaccccaggagcagagtacaggagacaccatggggagagaccctggtgtgtccttcaaggctgttggtctacaacctgctggagatgtaaatttgccatgacttcctggaggacagcagcatggagaaagatcctagaaaaggcctctgacttccctcacctcccaaccatcattacaggaaagactgtgaactcctgagttcagcttgatttctgactacatcccagcaagctctggcatctgtggattaaaatccctggatctctctcagttgtgtatttgttcatcttcatatgctggcaggaacaactattaatacagatactcagaagccaataacatgacaggagctgggactggtttgaacacagggtgtgcagatggggagggggtactggccttgggcctcctatgatgcagacatggtgaatttaattcaaggaggaggagaatgttttaggcaggtggttatatgtgggaagataattttattcatggatccaaatgtttgttgagtcctttctttgtgctaaggttcttgcggtgaaccagaattataacagtgagctcatctgactgttttaggatgtacagcctagtgttaacattcttggtatctttttgtgccttatctaaaacatttctcgatcactggtttcagatgttcatttattatattcttttcaaagattcagagattggcttttgtcatccactattgtatgttttgtttcattgacctctagtgataccttgatctttcccactttctgttttcggattggagaagatgtaccttttttgtcaactcttacttttatcagatgatcaactcacgtatttggatctttatttgttttctcaaataaatatttaaggttatacatttcttctgacttcctttattttcacaatcattcaattcatagcatttcctatattctgttataattatttcattgattcataaatttctttgaaaaataatttggtcttctattgattgtgagaagataatctaagtttaatttggtcagagaatatcatctgtttaataaactttgaaatttggtgagtgaattat

SEQ ID NO: 5893 - protein, 110 aa, Homo sapiens; identical to SEQ ID NO: 5869

SEQ ID NO: 5894 - DNA, 1291 bp, Homo sapiens
gtgggaaggcagctgaactcggcgcctggaaagatggaggcagcggagacagaggcggaagctgcagccctagaggtcctggctgaggtggcaggcatcttggaacctgtaggcctgcaggaggaggcagaactgccagccaagatcctggttgagtttgtggtggactctcagaagaaagacaagctgctctgcagccagcttcaggtagcggatttcctgcagaacatcctggctcaggaggacacctggtgtgtccttcaaggctgttggtctacaacctgctggagatgtaaatttgccatgacttcctggaggacagcagcatggagaaagatcctagaaaaggcctctgacttccctcacctcccaaccatcattacaggaaagactgtgaactcctgagttcagcttgatttctgactacatcccagcaagctctggcatctgtggattaaaatccctggatctctctcagttgtgtatttgttcatcttcatatgctggcaggaacaactattaatacagatactcagaagccaataacatgacaggagctgggactggtttgaacacagggtgtgcagatggggagggggtactggccttgggcctcctatgatgcagacatggtgaatttaattcaaggaggaggagaatgttttaggcaggtggttatatgtgggaagataattttattcatggatccaaatgtttgttgagtcctttctttgtgctaaggttcttgcggtgaaccagaattataacagtgagctcatctgactgttttaggatgtacagcctagtgttaacattcttggtatctttttgtgccttatctaaaacatttctcgatcactggtttcagatgttcatttattatattcttttcaaagattcagagattggcttttgtcatccactattgtatgttttgtttcattgacctctagtgataccttgatctttcccactttctgttttcggattggagaagatgtaccttttttgtcaactcttacttttatcagatgatcaactcacgtatttggatctttatttgttttctcaaataaatatttaaggttatacatttcttctgacttcctttattttcacaatcattcaattcatagcatttcctatattctgttataattatttcattgattcataaatttctttgaaaaataatttggtcttctattgattgtgagaagataatctaagtttaatttggtcagagaatatcatctgtttaataaactttgaaatttggtgagtgaattat

SEQ ID NO: 5895 - protein, 123 aa, Homo sapiens; identical to SEQ ID NO: 5877

SEQ ID NO: 5896 - DNA, 1713 bp, Homo sapiens
attgtgggaaggcagctgaactcggcgcctggaaagatggaggcagcggagacagaggcggaagctgcagccctagaggtcctggctgaggtggcaggcatcttggaacctgtaggcctgcaggaggaggcagaactgccagccaagatcctggttgagtttgtggtggactctcagaagaaagacaagctgctctgcagccagcttcaggtagcggatttcctgcagaacatcctggctcaggaggacactgctaagggtctcgaccccttggcttctgaagacacgagccgacagaaggcaattgcagctaaggaacaatggaaagagctgaaggccacctacagggagcacgtagaggccatcaaaattggcctcaccaaggccctgactcagatggaggaagcccagaggaaacggacacaactccgggaagcctttgagcagctccaggccaagaaacaaatggccatggagaaacgcagagcagtccagaaccagtggcagctacaacaggagaagcatctgcagcatctggcggaggtttctgcagagggtaagctgttgttccctgaggctgaggctgaggcagagaatcttccagatgataaaccccagcagccgactcgaccccaggagcagagtacaggagacaccatggggagagaccctggtgtgtccttcaaggctgttggtctacaacctgctggagatgtaaatttgccatgacttcctggaggacagcagcatggagaaagatcctagaaaaggcctctgacttccctcacctcccaaccatcattacaggaaagactgtgaactcctgagttcagcttgatttctgactacatcccagcaagctctggcatctgtggattaaaatccctggatctctctcagttgtgtatttgttcatcttcatatgctggcaggaacaactattaatacagatactcagaagccaataacatgacaggagctgggactggtttgaacacagggtgtgcagatggggagggggtactggccttgggcctcctatgatgcagacatggtgaatttaattcaaggaggaggagaatgttttaggcaggtggttatatgtgggaagataattttattcatggatccaaatgtttgttgagtcctttctttgtgctaaggttcttgcggtgaaccagaattataacagtgagctcatctgactgttttaggatgtacagcctagtgttaacattcttggtatctttttgtgccttatctaaaacatttctcgatcactggtttcagatgttcatttattatattcttttcaaagattcagagattggcttttgtcatccactattgtatgttttgtttcattgacctctagtgataccttgatctttcccactttctgttttcggattggagaagatgtaccttttttgtcaactcttacttttatcagatgatcaactcacgtatttggatctttatttgttttctcaaataaatatttaaggttatacatttcttctgacttcctttattttcacaatcattcaattcatagcatttcctatattctgttataattatttcattgattcataaatttctttgaaaaataatttggtcttctattgattgtgagaagataatctaagtttaatttggtcagagaatatcatctgtttaataaactttgaaatttggtgagtgaattat

SEQ ID NO: 5897 - protein, 230 aa, Homo sapiens; identical to SEQ ID NO: 770

SEQ ID NO: 5898 - DNA, 1857 bp, Homo sapiens
gggattgtgggaaggcagctgaactcggcgcctggaaagatggaggcagcggagacagaggcggaagctgcagccctagaggtcctggctgaggtggcaggcatcttggaacctgtaggcctgcaggaggaggcagaactgccagccaagatcctggttgagtttgtggtggactctcagaagaaagacaagctgctctgcagccagcttcaggtagcggatttcctgcagaacatcctggctcaggaggacactgctaagggtctcgaccccttggcttctgaagacacgagccgacagaaggcaattgcagctaaggaacaatggaaagagctgaaggccacctacagggagcacgtagaggccatcaaaattggcctcaccaaggccctgactcagatggaggaagcccagaggaaacggacacaactccgggaagcctttgagcagctccaggccaagaaacaaatggccatggagaaacgcagagcagtccagaaccagtggcagctacaacaggagaagcatctgcagcatctggcggaggtttctgcagaggtgagggagcgtaagacagggactcagcaggagcttgacagggtgtttcagaaacttggaaacctgaagcagcaggcagaacaggagcgggacaagctgcagaggtatcagaccttcctccagcttctgtataccctgcagggtaagctgttgttccctgaggctgaggctgaggcagagaatcttccagatgataaaccccagcagccgactcgaccccaggagcagagtacaggagacaccatggggagagaccctggtgtgtccttcaaggctgttggtctacaacctgctggagatgtaaatttgccatgacttcctggaggacagcagcatggagaaagatcctagaaaaggcctctgacttccctcacctcccaaccatcattacaggaaagactgtgaactcctgagttcagcttgatttctgactacatcccagcaagctctggcatctgtggattaaaatccctggatctctctcagttgtgtatttgttcatcttcatatgctggcaggaacaactattaatacagatactcagaagccaataacatgacaggagctgggactggtttgaacacagggtgtgcagatggggagggggtactggccttgggcctcctatgatgcagacatggtgaatttaattcaaggaggaggagaatgttttaggcaggtggttatatgtgggaagataattttattcatggatccaaatgtttgttgagtcctttctttgtgctaaggttcttgcggtgaaccagaattataacagtgagctcatctgactgttttaggatgtacagcctagtgttaacattcttggtatctttttgtgccttatctaaaacatttctcgatcactggtttcagatgttcatttattatattcttttcaaagattcagagattggcttttgtcatccactattgtatgttttgtttcattgacctctagtgataccttgatctttcccactttctgttttcggattggagaagatgtaccttttttgtcaactcttacttttatcagatgatcaactcacgtatttggatctttatttgttttctcaaataaatatttaaggttatacatttcttctgacttcctttattttcacaatcattcaattcatagcatttcctatattctgttataattatttcattgattcataaatttctttgaaaaataatttggtcttctattgattgtgagaagataatctaagtttaatttggtcagagaatatcatctgtttaataaactttgaaatttggtgagtgaattat

SEQ ID NO: 5899 - protein, 277 aa, Homo sapiens; identical to SEQ ID NO: 774

SEQ ID NO: 5900 - DNA, 2048 bp, Homo sapiens
gggattgtgggaaggcagctgaactcggcgcctggaaagatggaggcagcggagacagaggcggaagctgcagccctagaggtcctggctgaggtggcaggcatcttggaacctgtaggcctgcaggaggaggcagaactgccagccaagatcctggttgagtttgtggtggactctcagaagaaagacaagctgctctgcagccagcttcaggtagcggatttcctgcagaacatcctggctcaggaggacactgctaagggtctcgaccccttggcttctgaagacacgagccgacagaaggcaattgcagctaaggaacaatggaaagagctgaaggccacctacagggagcacgtagaggccatcaaaattggcctcaccaaggccctgactcagatggaggaagcccagaggaaacggacacaactccgggaagcctttgagcagctccaggccaagaaacaaatggccatggagaaacgcagagcagtccagaaccagtggcagctacaacaggagaagcatctgcagcatctggcggaggtttctgcagaggtgagggagcgtaagacagggactcagcaggagcttgacagggtgtttcagaaacttggaaacctgaagcagcaggcagaacaggagcgggacaagctgcagaggtatcagaccttcctccagcttctgtataccctgcagggtaagctgttgttccctgaggctgaggctgaggcagagaatcttccagatgataaaccccagcagccgactcgaccccaggagcagagtacaggagacaccatggggagagaccctggtgtgtccttcaaggctgttggtctacaacctgctggagatgtaaatttgccatgacttcctggaggacagcagcatggagaaagatcctagaaaaggtcagacccaactcaggccttggtgtccctggactgcaagtgtggaaggagggaaagcctggtttacctctctctgcatctgagctctgctacccatggagcagatggatggtgggaacaggaaagagcttatgttacacctcattcccatgcttagcccacccagagctaacccctgtcttcttccccaggcctctgacttccctcacctcccaaccatcattacaggaaagactgtgaactcctgagttcagcttgatttctgactacatcccagcaagctctggcatctgtggattaaaatccctggatctctctcagttgtgtatttgttcatcttcatatgctggcaggaacaactattaatacagatactcagaagccaataacatgacaggagctgggactggtttgaacacagggtgtgcagatggggagggggtactggccttgggcctcctatgatgcagacatggtgaatttaattcaaggaggaggagaatgttttaggcaggtggttatatgtgggaagataattttattcatggatccaaatgtttgttgagtcctttctttgtgctaaggttcttgcggtgaaccagaattataacagtgagctcatctgactgttttaggatgtacagcctagtgttaacattcttggtatctttttgtgccttatctaaaacatttctcgatcactggtttcagatgttcatttattatattcttttcaaagattcagagattggcttttgtcatccactattgtatgttttgtttcattgacctctagtgataccttgatctttcccactttctgttttcggattggagaagatgtaccttttttgtcaactcttacttttatcagatgatcaactcacgtatttggatctttatttgttttctcaaataaatatttaaggttatacatttcttctgacttcctttattttcacaatcattcaattcatagcatttcctatattctgttataattatttcattgattcataaatttctttgaaaaataatttggtcttctattgattgtgagaagataatctaagtttaatttggtcagagaatatcatctgtttaataaactttgaaatttggtgagtgaattat

SEQ ID NO: 5901 - protein, 277 aa, Homo sapiens; identical to SEQ ID NO: 774

SEQ ID NO: 5902 - DNA, 819 bp, Homo sapiens
ttgacagggtgtttcagaaacttggaaacctgaagcacccacccagagctaacccctgtcttcttccccaggcctctgacttccctcacctcccaaccatcattacaggaaagactgtgaactcctgagttcagcttgatttctgactacatcccagcaagctctggcatctgtggattaaaatccctggatctctctcagttgtgtatttgttcatcttcatatgctggcaggaacaactattaatacagatactcagaagccaataacatgacaggagctgggactggtttgaacacagggtgtgcagatggggagggggtactggccttgggcctcctatgatgcagacatggtgaatttaattcaaggaggaggagaatgttttaggcaggtggttatatgtgggaagataattttattcatggatccaaatgtttgttgagtcctttctttgtgctaaggttcttgcggtgaaccagaattataacagtgagctcatctgactgttttaggatgtacagcctagtgttaacattcttggtatctttttgtgccttatctaaaacatttctcgatcactggtttcagatgttcatttattatattcttttcaaagattcagagattggcttttgtcatccactattgtatgttttgtttcattgacctctagtgataccttgatctttcccactttctgttttcggattggagaagatgtaccttttttgtcaactcttacttttatcagatgatcaactcacgtatttggatctttatttgttttctcaaataaatatttaaggttatacattt

SEQ ID NO: 5903 - protein, 50 aa, Homo sapiens; identical to SEQ ID NO: 5861

SEQ ID NO: 5904 - DNA, 1099 bp, Homo sapiens
aaccccagcagccgactcgaccccaggagcagagtacaggagacaccatggggagagaccctggtgtgtccttcaaggctgttggtctacaacctgctggagatgtaaatttgccatgacttcctggaggacagcagcatggagaaagatcctagaaaaggtcagacccaactcaggccttggtgtccctggactgcaagtgtggaaggagggaaagcctggtttacctctctctgcatctgagctctgctacccatggagcagatggatggtgggaacaggaaagagcttatgttacacctcattcccatgcttagcccacccagagctaacccctgtcttcttccccaggcctctgacttccctcacctcccaaccatcattacaggaaagactgtgaactcctgagttcagcttgatttctgactacatcccagcaagctctggcatctgtggattaaaatccctggatctctctcagttgtgtatttgttcatcttcatatgctggcaggaacaactattaatacagatactcagaagccaataacatgacaggagctgggactggtttgaacacagggtgtgcagatggggagggggtactggccttgggcctcctatgatgcagacatggtgaatttaattcaaggaggaggagaatgttttaggcaggtggttatatgtgggaagataattttattcatggatccaaatgtttgttgagtcctttctttgtgctaaggttcttgcggtgaaccagaattataacagtgagctcatctgactgttttaggatgtacagcctagtgttaacattcttggtatctttttgtgccttatctaaaacatttctcgatcactggtttcagatgttcatttattatattcttttcaaagattcagagattggcttttgtcatccactattgtatgttttgtttcattgacctctagtgataccttgatctttcccactttctgttttcggattggagaagatgtaccttttttgtcaactcttacttttatcagatgatcaactcacgtatttggatctttatttgttttctcaaataaatatttaaggttatacattt

SEQ ID NO: 5905 - protein, 94 aa, Homo sapiens; identical to SEQ ID NO: 5863

SEQ ID NO: 5906 - DNA, 935 bp, Homo sapiens
ctgaggcagagaatcttccagatgataaaccccagcagccgactcgaccccaggagcagagtacaggagacaccatggggagagaccctggtgtgtccttcaaggctgttggtctacaacctgctggagatgtaaatttgccatgacttcctggaggacagcagcatggagaaagatcctagaaaaggcctctgacttccctcacctcccaaccatcattacaggaaagactgtgaactcctgagttcagcttgatttctgactacatcccagcaagctctggcatctgtggattaaaatccctggatctctctcagttgtgtatttgttcatcttcatatgctggcaggaacaactattaatacagatactcagaagccaataacatgacaggagctgggactggtttgaacacagggtgtgcagatggggagggggtactggccttgggcctcctatgatgcagacatggtgaatttaattcaaggaggaggagaatgttttaggcaggtggttatatgtgggaagataattttattcatggatccaaatgtttgttgagtcctttctttgtgctaaggttcttgcggtgaaccagaattataacagtgagctcatctgactgttttaggatgtacagcctagtgttaacattcttggtatctttttgtgccttatctaaaacatttctcgatcactggtttcagatgttcatttattatattcttttcaaagattcagagattggcttttgtcatccactattgtatgttttgtttcattgacctctagtgataccttgatctttcccactttctgttttcggattggagaagatgtaccttttttgtcaactcttacttttatcagatgatcaactcacgtatttggatctttatttgttttctcaaataaatatttaaggttatacattt

SEQ ID NO: 5907 - protein, 37 aa, Homo sapiens; identical to SEQ ID NO: 5867

SEQ ID NO: 5908 - DNA, 1542 bp, Homo sapiens
ggactctcagaagaaagacaagctgctctgcagccagcttcaggtagcggatttcctgcagaacatcctggctcaggaggacactgctaagggtctcgaccccttggcttctgaagacacgagccgacagaaggcaattgcagctaaggaacaatggaaagagctgaaggccacctacagggagcacgtagaggccatcaaaattggcctcaccaaggccctgactcagatggaggaagcccagaggaaacggacacaactccgggaagcctttgagcagctccaggccaagaaacaaatggccatggagaaacgcagagcagtccagaaccagtggcagctacaacaggagaagcatctgcagcatctggcggaggtttctgcagagggtaagctgttgttccctgaggctgaggctgaggcagagaatcttccagatgataaaccccagcagccgactcgaccccaggagcagagtacaggagacaccatggggagagaccctggtgtgtccttcaaggctgttggtctacaacctgctggagatgtaaatttgccatgacttcctggaggacagcagcatggagaaagatcctagaaaaggtcagacccaactcaggccttggtgtccctggactgcaagtgtggaaggagggaaagcctggtttacctctctctgcatctgagctctgctacccatggagcagatggatggtgggaacaggaaagagcttatgttacacctcattcccatgcttagcccacccagagctaacccctgtcttcttccccaggcctctgacttccctcacctcccaaccatcattacaggaaagactgtgaactcctgagttcagcttgatttctgactacatcccagcaagctctggcatctgtggattaaaatccctggatctctctcagttgtgtatttgttcatcttcatatgctggcaggaacaactattaatacagatactcagaagccaataacatgacaggagctgggactggtttgaacacagggtgtgcagatggggagggggtactggccttgggcctcctatgatgcagacatggtgaatttaattcaaggaggaggagaatgttttaggcaggtggttatatgtgggaagataattttattcatggatccaaatgtttgttgagtcctttctttgtgctaaggttcttgcggtgaaccagaattataacagtgagctcatctgactgttttaggatgtacagcctagtgttaacattcttggtatctttttgtgccttatctaaaacatttctcgatcactggtttcagatgttcatttattatattcttttcaaagattcagagattggcttttgtcatccactattgtatgttttgtttcattgacctctagtgataccttgatctttcccactttctgttttcggattggagaagatgtaccttttttgtcaactcttacttttatcagatgatcaactcacgtatttggatctttatttgttttctcaaataaatatttaaggttatacattt

SEQ ID NO: 5909 - protein, 110 aa, Homo sapiens; identical to SEQ ID NO: 5869

SEQ ID NO: 5910 - DNA, 1292 bp, Homo sapiens
gaactcggcgcctggaaagatggaggcagcggagacagaggcggaagctgcagccctagaggtcctggctgaggtggcaggcatcttggaacctgtaggcctgcaggaggaggcagaactgccagccaagatcctggttgagtttgtggtggactctcagaagaaagacaagctgctctgcagccagcttcaggtagcggatttcctgcagaacatcctggctcaggaggacactgctaagggtctcgaccccttggcttctgaagacacgagcctggcagctacaacaggagaagcatctgcagcatctggcggaggtttctgcagagggtaagctgttgttccctgaggctgaggctgaggcagagaatcttccagatgataaaccccagcagccgactcgaccccaggagcagagtacaggagacaccatggggagagaccctggtgtgtccttcaaggctgttggtctacaacctgctggagatgtaaatttgccatgacttcctggaggacagcagcatggagaaagatcctagaaaaggcctctgacttccctcacctcccaaccatcattacaggaaagactgtgaactcctgagttcagcttgatttctgactacatcccagcaagctctggcatctgtggattaaaatccctggatctctctcagttgtgtatttgttcatcttcatatgctggcaggaacaactattaatacagatactcagaagccaataacatgacaggagctgggactggtttgaacacagggtgtgcagatggggagggggtactggccttgggcctcctatgatgcagacatggtgaatttaattcaaggaggaggagaatgttttaggcaggtggttatatgtgggaagataattttattcatggatccaaatgtttgttgagtcctttctttgtgctaaggttcttgcggtgaaccagaattataacagtgagctcatctgactgttttaggatgtacagcctagtgttaacattcttggtatctttttgtgccttatctaaaacatttctcgatcactggtttcagatgttcatttattatattcttttcaaagattcagagattggcttttgtcatccactattgtatgttttgtttcattgacctctagtgataccttgatctttcccactttctgttttcggattggagaagatgtaccttttttgtcaactcttacttttatcagatgatcaactcacgtatttggatctttatttgttttctcaaataaatatttaaggttatacattt

SEQ ID NO: 5911 - protein, 104 aa, Homo sapiens; identical to SEQ ID NO: 5871

SEQ ID NO: 5912 - DNA, 1964 bp, Homo sapiens
ggcagctgaactcggcgcctggaaagatggaggcagcggagacagaggcggaagctgcagccctagaggtcctggctgaggtggcaggcatcttggaacctgtaggcctgcaggaggaggcagaactgccagccaagatcctggttgagtttgtggtggtatgtacaagatgagagcgagcctttcagaagccagggtctggtcctggctcctcttactgagatacagggcagcactggcagagagcagacttaaggaaacctgtaaggaggtaaggatgttccctgtctctgccctccctctgagcaggactctcagaagaaagacaagctgctctgcagccagcttcaggtagcggatttcctgcagaacatcctggctcaggaggacactgctaagggtctcgaccccttggcttctgaagacacgagccgtgagtaggcaggggattgtagtagcagctgacctgagtggggaaggaaggaggatttcagttaggtctcccatttggctgatgggaaggaggcccagtgttgcagggaggcaggctagcaggccaccctcactcatgtactcattcctggtggctcatctcaggacagaaggcaattgcagctaaggaacaatggaaagagctgaaggccacctacagggagcacgtagaggccatcaaaattggcctcaccaaggccctgactcagatggaggaagcccagaggaaacggacacaactccgggaagcctttgagcagctccaggccaagaaacaaatggccatggagaaacgcagagcagtccagaaccagtggcagctacaacaggagaagcatctgcagcatctggcggaggtttctgcagaggtgagggagcgtaagacagggactcagcaggagcttgacagggtgtttcagaaacttggaaacctgaagcagcaggcagaacaggagcgggacaagctgcagaggtatcagaccttcctccagcttctgtataccctgcagggtaagctgttgttccctgaggctgaggctgaggcagagaatcttccagatgataaaccccagcagccgactcgaccccaggagcagagtacaggagacaccatggggagagaccctggtgtgtccttcaaggctgttggtctacaacctgctggagatgtaaatttgccatgacttcctggaggacagcagcatggagaaagatcctagaaaaggcctctgacttccctcacctcccaaccatcattacaggaaagactgtgaactcctgagttcagcttgatttctgactacatcccagcaagctctggcatctgtggattaaaatccctggatctctctcagttgtgtatttgttcatcttcatatgctggcaggaacaactattaatacagatactcagaagccaataacatgacaggagctgggactggtttgaacacagggtgtgcagatggggagggggtactggccttgggcctcctatgatgcagacatggtgaatttaattcaaggaggaggagaatgttttaggcaggtggttatatgtgggaagataattttattcatggatccaaatgtttgttgagtcctttctttgtgctaaggttcttgcggtgaaccagaattataacagtgagctcatctgactgttttaggatgtacagcctagtgttaacattcttggtatctttttgtgccttatctaaaacatttctcgatcactggtttcagatgttcatttattatattcttttcaaagattcagagattggcttttgtcatccactattgtatgttttgtttcattgacctctagtgataccttgatctttcccactttctgttttcggattggagaagatgtaccttttttgtcaactcttacttttatcagatgatcaactcacgtatttggatctttatttgttttctcaaataaatatttaaggttatacattt

SEQ ID NO: 5913 - protein, 157 aa, Homo sapiens; identical to SEQ ID NO: 5873

SEQ ID NO: 5914 - DNA, 1662 bp, Homo sapiens
gaaggcagctgaactcggcgcctggaaagatggaggcagcggagacagaggcggaagctgcagccctagaggtcctggctgaggtggcaggcatcttggaacctgtaggcctgcaggaggaggcagaactgccagccaagatcctggttgagtttgtggtggtatgtacaagatgagagcgagcctttcagaagccagggtctggtcctggctcctcttactgagatacagggcagcactggcagagagcagacttaaggaaacctgtaaggaggtaaggatgttccctgtctctgccctccctctgagcaggactctcagaagaaagacaagctgctctgcagccagcttcaggtagcggatttcctgcagaacatcctggctcaggaggacactgctaagggtctcgaccccttggcttctgaagacacgagccgacagaaggcaattgcagctaaggaacaatggaaagagctgaaggccacctacagggagcacgtagaggccatcaaaattggcctcaccaaggccctgactcagatggaggaagcccagaggaaacggacacaactccgggaagcctttgagcagctccaggccaagaaacaaatggccatggagaaacgcagagcagtccagaaccagtggcagctacaacaggagaagcatctgcagcatctggcggaggtttctgcagagggtaagctgttgttccctgaggctgaggctgaggcagagaatcttccagatgataaaccccagcagccgactcgaccccaggagcagagtacaggagacaccatggggagagaccctggtgtgtccttcaaggctgttggtctacaacctgctggagatgtaaatttgccatgacttcctggaggacagcagcatggagaaagatcctagaaaaggcctctgacttccctcacctcccaaccatcattacaggaaagactgtgaactcctgagttcagcttgatttctgactacatcccagcaagctctggcatctgtggattaaaatccctggatctctctcagttgtgtatttgttcatcttcatatgctggcaggaacaactattaatacagatactcagaagccaataacatgacaggagctgggactggtttgaacacagggtgtgcagatggggagggggtactggccttgggcctcctatgatgcagacatggtgaatttaattcaaggaggaggagaatgttttaggcaggtggttatatgtgggaagataattttattcatggatccaaatgtttgttgagtcctttctttgtgctaaggttcttgcggtgaaccagaattataacagtgagctcatctgactgttttaggatgtacagcctagtgttaacattcttggtatctttttgtgccttatctaaaacatttctcgatcactggtttcagatgttcatttattatattcttttcaaagattcagagattggcttttgtcatccactattgtatgttttgtttcattgacctctagtgataccttgatctttcccactttctgttttcggattggagaagatgtaccttttttgtcaactcttacttttatcagatgatcaactcacgtatttggatctttatttgttttctcaaataaatatttaaggttatacattt

SEQ ID NO: 5915 - protein, 110 aa, Homo sapiens; identical to SEQ ID NO: 5869

SEQ ID NO: 5916 - DNA, 1096 bp, Homo sapiens
gtgggaaggcagctgaactcggcgcctggaaagatggaggcagcggagacagaggcggaagctgcagccctagaggtcctggctgaggtggcaggcatcttggaacctgtaggcctgcaggaggaggcagaactgccagccaagatcctggttgagtttgtggtggactctcagaagaaagacaagctgctctgcagccagcttcaggtagcggatttcctgcagaacatcctggctcaggaggacacctggtgtgtccttcaaggctgttggtctacaacctgctggagatgtaaatttgccatgacttcctggaggacagcagcatggagaaagatcctagaaaaggcctctgacttccctcacctcccaaccatcattacaggaaagactgtgaactcctgagttcagcttgatttctgactacatcccagcaagctctggcatctgtggattaaaatccctggatctctctcagttgtgtatttgttcatcttcatatgctggcaggaacaactattaatacagatactcagaagccaataacatgacaggagctgggactggtttgaacacagggtgtgcagatggggagggggtactggccttgggcctcctatgatgcagacatggtgaatttaattcaaggaggaggagaatgttttaggcaggtggttatatgtgggaagataattttattcatggatccaaatgtttgttgagtcctttctttgtgctaaggttcttgcggtgaaccagaattataacagtgagctcatctgactgttttaggatgtacagcctagtgttaacattcttggtatctttttgtgccttatctaaaacatttctcgatcactggtttcagatgttcatttattatattcttttcaaagattcagagattggcttttgtcatccactattgtatgttttgtttcattgacctctagtgataccttgatctttcccactttctgttttcggattggagaagatgtaccttttttgtcaactcttacttttatcagatgatcaactcacgtatttggatctttatttgttttctcaaataaatatttaaggttatacattt

SEQ ID NO: 5917 - protein, 123 aa, Homo sapiens; identical to SEQ ID NO: 5877

SEQ ID NO: 5918 - DNA, 1518 bp, Homo sapiens
attgtgggaaggcagctgaactcggcgcctggaaagatggaggcagcggagacagaggcggaagctgcagccctagaggtcctggctgaggtggcaggcatcttggaacctgtaggcctgcaggaggaggcagaactgccagccaagatcctggttgagtttgtggtggactctcagaagaaagacaagctgctctgcagccagcttcaggtagcggatttcctgcagaacatcctggctcaggaggacactgctaagggtctcgaccccttggcttctgaagacacgagccgacagaaggcaattgcagctaaggaacaatggaaagagctgaaggccacctacagggagcacgtagaggccatcaaaattggcctcaccaaggccctgactcagatggaggaagcccagaggaaacggacacaactccgggaagcctttgagcagctccaggccaagaaacaaatggccatggagaaacgcagagcagtccagaaccagtggcagctacaacaggagaagcatctgcagcatctggcggaggtttctgcagagggtaagctgttgttccctgaggctgaggctgaggcagagaatcttccagatgataaaccccagcagccgactcgaccccaggagcagagtacaggagacaccatggggagagaccctggtgtgtccttcaaggctgttggtctacaacctgctggagatgtaaatttgccatgacttcctggaggacagcagcatggagaaagatcctagaaaaggcctctgacttccctcacctcccaaccatcattacaggaaagactgtgaactcctgagttcagcttgatttctgactacatcccagcaagctctggcatctgtggattaaaatccctggatctctctcagttgtgtatttgttcatcttcatatgctggcaggaacaactattaatacagatactcagaagccaataacatgacaggagctgggactggtttgaacacagggtgtgcagatggggagggggtactggccttgggcctcctatgatgcagacatggtgaatttaattcaaggaggaggagaatgttttaggcaggtggttatatgtgggaagataattttattcatggatccaaatgtttgttgagtcctttctttgtgctaaggttcttgcggtgaaccagaattataacagtgagctcatctgactgttttaggatgtacagcctagtgttaacattcttggtatctttttgtgccttatctaaaacatttctcgatcactggtttcagatgttcatttattatattcttttcaaagattcagagattggcttttgtcatccactattgtatgttttgtttcattgacctctagtgataccttgatctttcccactttctgttttcggattggagaagatgtaccttttttgtcaactcttacttttatcagatgatcaactcacgtatttggatctttatttgttttctcaaataaatatttaaggttatacattt

SEQ ID NO: 5919 - protein, 230 aa, Homo sapiens; identical to SEQ ID NO: 770

SEQ ID NO: 5920 - DNA, 1662 bp, Homo sapiens
gggattgtgggaaggcagctgaactcggcgcctggaaagatggaggcagcggagacagaggcggaagctgcagccctagaggtcctggctgaggtggcaggcatcttggaacctgtaggcctgcaggaggaggcagaactgccagccaagatcctggttgagtttgtggtggactctcagaagaaagacaagctgctctgcagccagcttcaggtagcggatttcctgcagaacatcctggctcaggaggacactgctaagggtctcgaccccttggcttctgaagacacgagccgacagaaggcaattgcagctaaggaacaatggaaagagctgaaggccacctacagggagcacgtagaggccatcaaaattggcctcaccaaggccctgactcagatggaggaagcccagaggaaacggacacaactccgggaagcctttgagcagctccaggccaagaaacaaatggccatggagaaacgcagagcagtccagaaccagtggcagctacaacaggagaagcatctgcagcatctggcggaggtttctgcagaggtgagggagcgtaagacagggactcagcaggagcttgacagggtgtttcagaaacttggaaacctgaagcagcaggcagaacaggagcgggacaagctgcagaggtatcagaccttcctccagcttctgtataccctgcagggtaagctgttgttccctgaggctgaggctgaggcagagaatcttccagatgataaaccccagcagccgactcgaccccaggagcagagtacaggagacaccatggggagagaccctggtgtgtccttcaaggctgttggtctacaacctgctggagatgtaaatttgccatgacttcctggaggacagcagcatggagaaagatcctagaaaaggcctctgacttccctcacctcccaaccatcattacaggaaagactgtgaactcctgagttcagcttgatttctgactacatcccagcaagctctggcatctgtggattaaaatccctggatctctctcagttgtgtatttgttcatcttcatatgctggcaggaacaactattaatacagatactcagaagccaataacatgacaggagctgggactggtttgaacacagggtgtgcagatggggagggggtactggccttgggcctcctatgatgcagacatggtgaatttaattcaaggaggaggagaatgttttaggcaggtggttatatgtgggaagataattttattcatggatccaaatgtttgttgagtcctttctttgtgctaaggttcttgcggtgaaccagaattataacagtgagctcatctgactgttttaggatgtacagcctagtgttaacattcttggtatctttttgtgccttatctaaaacatttctcgatcactggtttcagatgttcatttattatattcttttcaaagattcagagattggcttttgtcatccactattgtatgttttgtttcattgacctctagtgataccttgatctttcccactttctgttttcggattggagaagatgtaccttttttgtcaactcttacttttatcagatgatcaactcacgtatttggatctttatttgttttctcaaataaatatttaaggttatacattt

SEQ ID NO: 5921 - protein, 277 aa, Homo sapiens; identical to SEQ ID NO: 774

SEQ ID NO: 5922 - DNA, 1853 bp, Homo sapiens
gggattgtgggaaggcagctgaactcggcgcctggaaagatggaggcagcggagacagaggcggaagctgcagccctagaggtcctggctgaggtggcaggcatcttggaacctgtaggcctgcaggaggaggcagaactgccagccaagatcctggttgagtttgtggtggactctcagaagaaagacaagctgctctgcagccagcttcaggtagcggatttcctgcagaacatcctggctcaggaggacactgctaagggtctcgaccccttggcttctgaagacacgagccgacagaaggcaattgcagctaaggaacaatggaaagagctgaaggccacctacagggagcacgtagaggccatcaaaattggcctcaccaaggccctgactcagatggaggaagcccagaggaaacggacacaactccgggaagcctttgagcagctccaggccaagaaacaaatggccatggagaaacgcagagcagtccagaaccagtggcagctacaacaggagaagcatctgcagcatctggcggaggtttctgcagaggtgagggagcgtaagacagggactcagcaggagcttgacagggtgtttcagaaacttggaaacctgaagcagcaggcagaacaggagcgggacaagctgcagaggtatcagaccttcctccagcttctgtataccctgcagggtaagctgttgttccctgaggctgaggctgaggcagagaatcttccagatgataaaccccagcagccgactcgaccccaggagcagagtacaggagacaccatggggagagaccctggtgtgtccttcaaggctgttggtctacaacctgctggagatgtaaatttgccatgacttcctggaggacagcagcatggagaaagatcctagaaaaggtcagacccaactcaggccttggtgtccctggactgcaagtgtggaaggagggaaagcctggtttacctctctctgcatctgagctctgctacccatggagcagatggatggtgggaacaggaaagagcttatgttacacctcattcccatgcttagcccacccagagctaacccctgtcttcttccccaggcctctgacttccctcacctcccaaccatcattacaggaaagactgtgaactcctgagttcagcttgatttctgactacatcccagcaagctctggcatctgtggattaaaatccctggatctctctcagttgtgtatttgttcatcttcatatgctggcaggaacaactattaatacagatactcagaagccaataacatgacaggagctgggactggtttgaacacagggtgtgcagatggggagggggtactggccttgggcctcctatgatgcagacatggtgaatttaattcaaggaggaggagaatgttttaggcaggtggttatatgtgggaagataattttattcatggatccaaatgtttgttgagtcctttctttgtgctaaggttcttgcggtgaaccagaattataacagtgagctcatctgactgttttaggatgtacagcctagtgttaacattcttggtatctttttgtgccttatctaaaacatttctcgatcactggtttcagatgttcatttattatattcttttcaaagattcagagattggcttttgtcatccactattgtatgttttgtttcattgacctctagtgataccttgatctttcccactttctgttttcggattggagaagatgtaccttttttgtcaactcttacttttatcagatgatcaactcacgtatttggatctttatttgttttctcaaataaatatttaaggttatacattt

SEQ ID NO: 5923 - protein, 277 aa, Homo sapiens; identical to SEQ ID NO: 774

SEQ ID NO: 5924 - DNA, 898 bp, Homo sapiens
attgtgggaaggcagctgaactcggcgcctggaaagatggaggcagcggagacagaggcggaagctgcagccctagaggtcctggctgaggtggcaggcatcttggaacctgtaggcctgcaggaggaggcagaactgccagccaagatcctggttgagtttgtggtggactctcagaagaaagacaagctgctctgcagccagcttcaggtagcggatttcctgcagaacatcctggctcaggaggacactgctaagggtctcgaccccttggcttctgaagacacgagccgacagaaggcaattgcagctaaggaacaatggaaagagctgaaggccacctacagggagcacgtagaggccatcaaaattggcctcaccaaggccctgactcagatggaggaagcccagaggaaacggacacaactccgggaagcctttgagcagctccaggccaagaaacaaatggccatggagaaacgcagagcagtccagaaccagtggcagctacaacaggagaagcatctgcagcatctggcggaggtttctgcagagggtaagctgttgttccctgaggctgaggctgaggcagagaatcttccagatgataaaccccagcagccgactcgaccccaggagcagagtacaggagacaccatggggagagaccctggtgtgtccttcaaggctgttggtctacaacctgctggagatgtaaatttgccatgacttcctggaggacagcagcatggagaaagatcctagaaaaggcctctgacttccctcacctcccaaccatcattacaggaaagactgtgaactcctgagttcagcttgatttctgactacatcccagcaagctctggcatctgtggattaaaatccctggatctctctc

SEQ ID NO: 5925 - protein, 230 aa, Homo sapiens; identical to SEQ ID NO: 770

SEQ ID NO: 5926 - DNA, 1042 bp, Homo sapiens
gggattgtgggaaggcagctgaactcggcgcctggaaagatggaggcagcggagacagaggcggaagctgcagccctagaggtcctggctgaggtggcaggcatcttggaacctgtaggcctgcaggaggaggcagaactgccagccaagatcctggttgagtttgtggtggactctcagaagaaagacaagctgctctgcagccagcttcaggtagcggatttcctgcagaacatcctggctcaggaggacactgctaagggtctcgaccccttggcttctgaagacacgagccgacagaaggcaattgcagctaaggaacaatggaaagagctgaaggccacctacagggagcacgtagaggccatcaaaattggcctcaccaaggccctgactcagatggaggaagcccagaggaaacggacacaactccgggaagcctttgagcagctccaggccaagaaacaaatggccatggagaaacgcagagcagtccagaaccagtggcagctacaacaggagaagcatctgcagcatctggcggaggtttctgcagaggtgagggagcgtaagacagggactcagcaggagcttgacagggtgtttcagaaacttggaaacctgaagcagcaggcagaacaggagcgggacaagctgcagaggtatcagaccttcctccagcttctgtataccctgcagggtaagctgttgttccctgaggctgaggctgaggcagagaatcttccagatgataaaccccagcagccgactcgaccccaggagcagagtacaggagacaccatggggagagaccctggtgtgtccttcaaggctgttggtctacaacctgctggagatgtaaatttgccatgacttcctggaggacagcagcatggagaaagatcctagaaaaggcctctgacttccctcacctcccaaccatcattacaggaaagactgtgaactcctgagttcagcttgatttctgactacatcccagcaagctctggcatctgtggattaaaatccctggatctctctc

SEQ ID NO: 5927 - protein, 277 aa, Homo sapiens; identical to SEQ ID NO: 774

SEQ ID NO: 5928 - DNA, 505 bp, Homo sapiens
atatgtaagaggcagctttatgctaaacttgacaaaagaaagcctcagagtgggaaagtcaacctaagagagaaaccgtttattttgtgggtaatgctgagtgcccatttgagtggagacctaaaaaccagactctgagcagtagcatgaaccaaatgttgtcctagacctgaagtttggccatatcccattgtaagcattgacatcaccacctacctctcagagacagttaacaggcctgaggtatgatgagaaaagagagcaaccagacacaacaactaaccagcattccttcctgataatagaccactgaccttggagtggctctggccagtctacaaaggatgcacactgagtaccttagtgtcctctgcttcaccttttgacatcagagggcagaaaactccacccatgcctccaggcttccatgaagaggcatgaagctcagtttccgctttcataaatatttatgactcctcctgtagctattaaataatgtatattt

SEQ ID NO: 5929 - protein, 38 aa, Homo sapiens
ALTSPPTSQRQLTGLRYDEKREQPDTTTNQHSFLIIDH

SEQ ID NO: 5930 - DNA, 1868 bp, Homo sapiens
cgcagggggcgggcccgcggcgcggcgccggaggaggaagtggtgaggttgttgctccttcagcgcctatcgctggctcttggggcgcagagaggggccgcagtctccgcggctgcgtcgagctcccttgcagtcccctccatgttccccggcgccactactccccttcctaaggccgccgcttaccccggggtctatggaagtaatggaaggacccctcaacctggctcatcaacagagcagacgagcagaccgtttattagctgcaggcaaatacgaagaggctatttcttgtcacaaaaaggctgcagcatatctttctgaagccatgaagctgacacagtcagagcaggctcatctttcactggaattgcaaagggatagccatatgaaacagctcctcctcatccaagagagatggaaaagggcccagcgtgaagaaagattgaaagcccagcagaacacagacaaggatgcagctgcccatcttcagacatctcacaaaccctctgcagaggatgcagagggccagagtcccctttctcagaagtacagcccttccacagagaaatgcctgcctgagattcaggggatctttgacagggatccagacacactactttatttacttcagcaaaagagtgagccagcagagccatgtattggaagcaaagccccaaaagatgataaaacaattatagaggagcaggcaaccaaaattgcagatttgaagaggcatgtggaattccttgtggctgagaatgaaagattaaggaaagaaaataaacaactaaaggctgaaaaggccagacttctaaaaggtccaatagaaaaggagctggatgtagatgctgattttgtagaaacgtcagagttatggagcttgccaccacatgcagaaactgctacagcctcctcaacctggcagaagttcgcagcaaatactgggaaagccaaggacattccaatccccaatcttcctcccttggattttccatctccagaacttcctcttatggagctctctgaggatattctgaaaggatttatgaataattaaaatggaaggccacagaaaaggggaaaagaggaaataatacagtaatcgttaatccagcaaaaagaaatgaaaagggaaaaccacatagaagggtaatcccggaaatgcttcatctggtggactgtgggagcagaggcattgccaggacttgggaaacagtcactgtgaaatgcgctgcgtatctcattcactcacttcagctaatgattccgacttggcagacgctaaactcatggaggttcggtttctcctgatacaaaccaaatggctacctggaagaatttctttcaagcaacagttatttttcttatcttcagggttaaaatgtataaaagttatgtgtaattaatctataatgccataaatgataatgcaaaacctaaataatatggtggccggaggggctgccttatatttgaaacatgctttctatcatgcattgactgtatgcattttgttaatgcacattctgtttgtttaaggtgtgtaagatacacacccttctagatgaaactatatgtgccacactttgcactactcataatgataacctcaagactatcagaagaaatatttaaatttccattttatgaagaaaggaaccaaattattatgctttttaaaacaaattaccagtttacataattaatcagggtgcattttaagttctaacttcgtttattgtataatgcatcatttgaaaataccaaggaggaaataccctttgtttttaatgatgcaagagtggacgtaatgctagttggcagtattttattgtaagaaatcaataaagtaattgtgttttata

SEQ ID NO: 5931 - protein, 287 aa, Homo sapiens
MEVMEGPLNLAHQQSRRADRLLAAGKYEEAISCHKKAAAYLSEAMKLTQSEQAHLSLELQRDSHMKQLLLIQERWKRAQREERLKAQQNTDKDAAAHLQTSHKPSAEDAEGQSPLSQKYSPSTEKCLPEIQGIFDRDPDTLLYLLQQKSEPAEPCIGSKAPKDDKTIIEEQATKIADLKRHVEFLVAENERLRKENKQLKAEKARLLKGPIEKELDVDADFVETSELWSLPPHAETATASSTWQKFAANTGKAKDIPIPNLPPLDFPSPELPLMELSEDILKGFMNN

SEQ ID NO: 5932 - DNA, 1685 bp, Homo sapiens
gaggaagtggtgaggttgttgctccttcagcgcctatcgctggctcttggggcgcagagaggggccgcagtctccgcggctgcgtcgagctcccttgcagtcccctccatgttccccggcgccactactccccttcctaaggccgccgcttaccccggggtctatggaagtaatggaaggacccctcaacctggctcatcaacagagcagacgagcagaccgtttattagctgcaggcaaatacgaagaggctatttcttgtcacaaaaaggctgcagcatatctttctgaagccatgaagctgacacagtcagagcaggctcatctttcactggaattgcaaagggatagccatatgaaacagctcctcctcatccaagagagatggaaaagggcccagcgtgaagaaagattgaaagcccagcagaacacactactttatttacttcagcaaaagagtgagccagcagagccatgtattggaagcaaagccccaaaagatgataaaacaattatagaggagcaggcaaccaaaattgcagatttgaagaggcatgtggaattccttgtggctgagaatgaaagattaaggaaagaaaataaacaactaaaggctgaaaaggccagacttctaaaaggtccaatagaaaaggagctggatgtagatgctgattttgtagaaacgtcagagttatggagcttgccaccacatgcagaaactgctacagcctcctcaacctggcagaagttcgcagcaaatactgggaaagccaaggacattccaatccccaatcttcctcccttggattttccatctccagaacttcctcttatggagctctctgaggatattctgaaaggatttatgaataattaaaatggaaggccacagaaaaggggaaaagaggaaataatacagtaatcgttaatccagcaaaaagaaatgaaaagggaaaaccacatagaagggtaatcccggaaatgcttcatctggtggactgtgggagcagaggcattgccaggacttgggaaacagtcactgtgaaatgcgctgcgtatctcattcactcacttcagctaatgattccgacttggcagacgctaaactcatggaggttcggtttctcctgatacaaaccaaatggctacctggaagaatttctttcaagcaacagttatttttcttatcttcagggttaaaatgtataaaagttatgtgtaattaatctataatgccataaatgataatgcaaaacctaaataatatggtggccggaggggctgccttatatttgaaacatgctttctatcatgcattgactgtatgcattttgttaatgcacattctgtttgtttaaggtgtgtaagatacacacccttctagatgaaactatatgtgccacactttgcactactcataatgataacctcaagactatcagaagaaatatttaaatttccattttatgaagaaaggaaccaaattattatgctttttaaaacaaattaccagtttacataattaatcagggtgcattttaagttctaacttcgtttattgtataatgcatcatttgaaaataccaaggaggaaataccctttgtttttaatgatgcaagagtggacgtaatgctagttggcagtattttattgtaagaaatcaataaagtaattgtgttttata

SEQ ID NO: 5933 - protein, 237 aa, Homo sapiens
MEVMEGPLNLAHQQSRRADRLLAAGKYEEAISCHKKAAAYLSEAMKLTQSEQAHLSLELQRDSHMKQLLLIQERWKRAQREERLKAQQNTLLYLLQQKSEPAEPCIGSKAPKDDKTIIEEQATKIADLKRHVEFLVAENERLRKENKQLKAEKARLLKGPIEKELDVDADFVETSELWSLPPHAETATASSTWQKFAANTGKAKDIPIPNLPPLDFPSPELPLMELSEDILKGFMNN

SEQ ID NO: 5934 - DNA, 1950 bp, Homo sapiens
cttagagtaactttaaatgcttagtttttcaattatttctcctttcccaggaatttttatgatgttttttaatatcactagaagacaatctagaaacaccacaaatcccagattggatcagcttgggccttcctctgttgttttactggcattaatagaaagcagctctaatagtcaagtgcaaagtcagtttgtaaatgctgaacaaataacagataagactattgactggcttcttgggaaaactgtttggtcaggagagagaaaactgttgaaaaactgttgtactgatgtcaccggtgattgaaggggtatctttaattggctaatttgaaagaaagtcacaaaagaaaggcatgaataaccaaaatcctgggatatttctgaaactcagtcgaggtcagtagatctgtctgggactacattttccatcccagttcctaacaaagtttcattttcttttctttattctctgatgtaagagttaacagtgaaatgaccaaaatcctgaaagccaatggagcaacaataaacatactcagatagattgcctcataaattctttcaagttagtttttaaaagtaacacattttttaaaagtccactttggcaaaattgataatttaatatctggttatcagcctctccaaaggattcctggaaaagttattttctttttatcatttaaaaatattccatttacaaagtcactttacatgaagcttttcagtgacataactttctcataaaatgtggtcttctgctttaaaatccatttgatgttttggagaaagtaaattctccagcagaattgtctcttgtgtttattggttttaaataacttggcttttctttgctccacctcctaaaacttgtatttcacggtttttcttttggggataggttcagaattttcacagctgtattcaggtaactgaagattttgtgtctccagaacatcttgtagagtcatttcatttaacacaggaactgagacttttgaaggaagaaatcaattatgatgataaactacaggttaaaaatattttgtatcatgcagtcaaagaaatggtgagagccttgaagatacacgaggatgaagtagaggatatggaagaaaattaagtgtgatccagtttgatatttttaggttgttgaactgggattacttaaccttgaatgatgatatgtatgcacactgactttaagcttcataaaaccatcagtgccaagaaattctctttgtagtaattacttgttactgacaccacagcagtatagcatatgtcacagctcctgtgattcaatgttataaaacaagcagaattttaaaagcagcactatatagctgttttgtattatagtgtatatgatgtttgtgaaaatgccagatttaaaatgatgtatttatttttggtaaaaaataaaaaattctatgctatattgttgatcaagtgtaaatgtgaccttgtacagtttactaaaattactgatatttttcactacattgagacagttactgtgagaataggacacaaacaccagctattgcctgcatctgggaaattgctgaatcgcacagcagtcatgtcataatcagaaaattactgccaaataattgtaaaatttgtaaagtataaagtatataaagtagatactaaatacagacacttcaatattttgttgaagctattgactgtacaattaaacattttcaaaaggtgtaatttatttaaaattgtctcattttggtaaaatttatgtgaacttttaaagctaaatattaaacttaatatgctatgtaaatatatacatatatacatttaatgatgtatttttttaaaacattggcttgcttttgttaaagtgcaagtgttacatatggctttgtacattaaagttgaaaggggttttacattttccattaaaaggactttatcaaaaattga

SEQ ID NO: 5935 - protein, 96 aa, Homo sapiens [sequence omitted]

SEQ ID NO: 5936 - DNA, 1830 bp, Homo sapiens
gttctgtctgtgatcaatgtgaagtaaaagagttacagccttttttgtaccattttatccctgaatacttacctgtattttaatctgaagtatgatcatttgtgccttctaaagcagattatttaactgattaaagagtcccttgaaattgatttttcaagtgttagaaggttagccatgtaaaggtatttatacttacctcaaaaaaggatcaataaatgtttatgaaatccatacatatgaatggtttggcttttggtaaaaaaaaaaaaaaaaaaaaaataccctgttcctcatccatgtgctatacttttgaaacagttataaggaaggaaaccagatagatggaaacttcatagtggaaggaggtggtgagaaggaagtagtaaactgttaagagcatttcagcattgctgtattgttttaatattctttggctttccaaattattgcagaatgttattttttaactgaagaagctcattcagttgttccattgattctgagaagaaaagatttgttattacaaataaaattgaaatttaactgaacaggatttaccatttccttacttaaattggagtgtctattttaattcatatttcagatttcaaaagaacaaggccttgaagttctaccagaacatgatccaatacgtgaccaaagttggtatgtgaacaaaaagctccgtcaaaggctgcttgaagaatatggagtcagaacctgtactcttattcagttccttggtgatgctattgttttgccagcgggagcacttcatcaggttcagaattttcacagctgtattcaggtaactgaagattttgtgtctccagaacatcttgtagagtcatttcatttaacacaggaactgagacttttgaaggaagaaatcaattatgatgataaactacaggttaaaaatattttgtatcatgcagtcaaagaaatggtgagagccttgaagatacacgaggatgaagtagaggatatggaagaaaattaagtgtgatccagtttgatatttttaggttgttgaactgggattacttaaccttgaatgatgatatgtatgcacactgactttaagcttcataaaaccatcagtgccaagaaattctctttgtagtaattacttgttactgacaccacagcagtatagcatatgtcacagctcctgtgattcaatgttataaaacaagcagaattttaaaagcagcactatatagctgttttgtattatagtgtatatgatgtttgtgaaaatgccagatttaaaatgatgtatttatttttggtaaaaaataaaaaattctatgctatattgttgatcaagtgtaaatgtgaccttgtacagtttactaaaattactgatatttttcactacattgagacagttactgtgagaataggacacaaacaccagctattgcctgcatctgggaaattgctgaatcgcacagcagtcatgtcataatcagaaaattactgccaaataattgtaaaatttgtaaagtataaagtatataaagtagatactaaatacagacacttcaatattttgttgaagctattgactgtacaattaaacattttcaaaaggtgtaatttatttaaaattgtctcattttggtaaaatttatgtgaacttttaaagctaaatattaaacttaatatgctatgtaaatatatacatatatacatttaatgatgtatttttttaaaacattggcttgcttttgttaaagtgcaagtgttacatatggctttgtacattaaagttgaaaggggttttacattttccattaaaaggactttatcaaaaattga

SEQ ID NO: 5937 - protein, 34 aa, Homo sapiens
MESEPVLLFSSLVMLLFCQREHFIRFRIFTAVFR

SEQ ID NO: 5938 - DNA, 8089 bp, Homo sapiens
cccttctctcagtgtgccctaagccaagtactcgttctcatttgggtgtctgcactgttggaagctactgcactgtgtttccacgcagacagagtacagtgggaaaggctttctccagctgatggatggctgttctctttatttggagtatcttactggttatgtaagcgacctcgagagaaattatcctgacccagatcggaggatgcagtagtgcttcagctgcaggatttcttagtcgttaacaccacagtgctgatgacaaagagcgagttgtaatcctcatcactgccagggctgagccagagcagacagaaaatcgtcatttgctcgttggagacttgttaggttacagctcctgcttcgttctgtggtcttggcttttcttcctatacaatgacgccgctgcaagtgagctcagaaatgcttggtttgagagccatttgcctgtgatttttgaagactaaagaagtatttacactagatactcttccagaacaaaatagaaatttcagcaaatacttactgacctttaaagccttgttgtggatttctgagatttaaagatactttaaaattctcaagaacaaagtccttattccttaaatggatacagagtgagagtatatagacaagactctgccacccagtggtttactggcataattactcatcatgatctcttcacccgcaccatgatcgttatgaatgatcaggtactagaaccacagaatgtcgatccttctatggttcaaatgacctttctagatgatgttgttcactctttgttaaaaggtgaaaatattggcattacatcacgacgcaggtctcgtgccaatcaaaacgtcaacgctgttcacagccattatacacgtgcccaagcaaatagtcccagaccagcaatgaactcccaagctgctgtaccaaaacagaatacacaccagcaacagcaacaaagaagtatccgtccaaataagaggaagggctcagatagcagtataccagatgaagagaagatgaaggaggaaaaatatgattatatatcacgaggagaaaatcctaaaggtaaaaacaaacacttgatgaataaaagaaggaaacctgaggaggatgaaaagaaactaaatatgaaaagacttcgaactgacaatgtttcagacttttctgagagcagtgactcagaaaattcaaataagagaataatagataattcctcagaacagaagccagagaatgaattgaaaaataaaaatacttcaaaaataaatggagaagaaggaaaaccccataataatgagaaggcaggagaagagaccctaaaaaatagccagcctccctgggatcaaatacaggaagataaaaaacatgaagaagcagagaagcggaagtctgttgacactcagcttcaagaagatatgattattcattcgtcagaacagtccacagtttctgatcataattctaatgatttacttcctcaggaatgcaatatggataaaacacataccatggaattgctaccaaaggagaagtttgtatccagaccacccacaccaaaatgtgttattgatattacaaatgacactaatttagaaaaggtggctcaggaaaactcaagtacctttggccttcagacacttcagaaaatggatcctaatgttagtgattcaaaacactctattgcaaatgcaaaattcttggaaacagcaaaaaaagattctgaccagagctgggtcagtgatgtagttaaagtggatctaacccaatcaagtgttacaaatgcttcttcaggaaatgatcacttgaacatggaaaaagagaagtatgtctcttacatttctcctttaagtgcagtttctgtcatggaagataagctgcataagcgaagtccacctccagagactataaaatctaaacttaatacttcagtagatactcacaagataaaatccagcccatcacctgaagttgttaaacccaaaataactcattctcctgattctgtaaagtctaaggccacttatgtgaacagccaagctactggtgaaagaagattggcaaataagatagaacatgagctatcaagatgcagttttcatccaattcctactcgaagcagtacattagaaactacaaagagtcctcttatcattgataaaaatgagcattttacagtttacagagatcctgcacttattgggtcagaaacaggagctaatcatatttcacctttcctaagccagcatccttttcctcttcactcctcatctcatagaacctgtttaaatccaggtacccatcatcctgccttaactcctgcaccccatttactagccggatcatctagtcaaactccattacctaccattaacactcatcctctgactagtggtccacaccatgctgttcatcaccctcatttacttcccactgtgttacctggagtgcctactgcctccttacttggtggccacccacgactagagagtgctcatgccagcagcttgagccacttagcgctagcacaccagcaacaacaacagttgttacagcaccagtcacctcatcttcttggacaagcccatccttctgcttcatataatcagcttggactttatccaattatttggcagtatccaaatggaacacatgcatactcaggacttggtttgccttcttctaagtgggttcacccagaaaatgcagttaatgctgaagcttcattaaggaggaattctcccagtccttggctacatcagcccacccctgtgacctcagcagatggtattggattacttagtcacattcctgtcagaccttccagtgcagagcctcatcggcctcttaaaattacagcccattccagtccaccattgacaaaaactttagtagatcatcataaggaagaattagaaagaaaagcttttatggaaccattacggtctgttgcatccacatcagccaaaaatgacctggatctaaataggtcacagactggaaaagattgtcacttacataggcattttgtggatccagtattaaatcagttacagaggccaccccaggagactggagagaggttaaacaaatacaaagaggaacaccgtcgaattcttcaagaaagtattgatgttgctccctttacaactaaaatcaagggacttgagggtgagagagagaattattccagagtggcatcatcatcttccagtcctaaaagccatatcatcaaacaagatatggatgtagaacgctcagtatcagatctttataaaatgaagcactcagtgcctcagagtttaccccaaagtaactatttcactacattgtctaatagtgtggtcaatgaaccaccaagatcatacccatccaaagaagtttcaaatatttacggtgataaacagagtaatgcccttgcagcggcagcagctaatcctcaaactctgacttcatttataacatctctttcaaagcctccacctttgattaaacaccaaccagaaagtgaaggtttagtaggcaagataccagaacatcttccacatcagattgcatctcactcagtaacaaccttcagaaatgattgtaggagtcctacccatttgacagtttcttctacaaatacactccgcagtatgcctgcattacatagagcaccagtatttcacccaccaatccatcacagcctggaaagaaaggaaggcagctatagtagtctttcccctccaactttaactccggtgatgccagtaaatgctggtggtaaagttcaagaatcacagaagcctccaactctaatacccgaaccaaaagactcccaggcaaattttaagagttcttcagaacagagtttgacggagatgtggagacctaataataacctcagcaaagagaaaactgaatggcatgtggagaaaagcagcggaaagttacaggctgctatggcatctgtcattgtgcgtccatcttctagtacaaaaactgatagtatgccagcaatgcagttagcttctaaagatcgtgttagtgaaagatcttcagctggggcacataaaacagattgcctcaaactagcagaagccggagaaactggaagaatcattttgccaaatgtgaattcagacagtgttcacacaaaatctgaaaaaaactttcaggctgtctcacagggcagtgttcccagttcagtcatgtctgctgtaaatacgatgtgtaataccaaaacggatgtaatcacatctgctgccgatactaccagtgtttccagctggggtggttcagaagtaatttcctctttatcaaataccattttggcctctacatcatcagaatgtgtatcttcaaaaagtgtcagtcagccagtggctcaaaaacaagaatgcaaggtcagcaccacagcaccagttacattagccagtagtaagacaggaagtgttgttcaacccagttctgggttctcaggcacaactgattttatccatttaaaaaagcacaaggcagcattggctgcagctcagtataaaagtagtaatgccagtgagactgaacctaatgctataaaaaatcagacactttcagcctcccttcctctggatagcactgtaatctgtagtacaattaacaaagcaaactctgtaggaaatgggcaagcttcccagacaagtcaaccaaactaccatactaaactgaaaaaggcctggctcaccagacactcagaagaagataaaaatactaataaaatggaaaattcagggaattctgtatcagaaattattaagccatgttctgtcaacttaatagcctctacatctagtgatatacaaaatagtgtagatagtaagatcatagttgataaatatgtaaaagatgataaagtcaacaggagaaaagccaaaagaacttatgaatctggctctgaaagtggagactcagatgaaagtgaaagcaagtcagagcaaaggactaaaagacaacctaagccaacttacaaaaagaagcaaaatgatttgcaaaagagaaaaggtgaaatagaagaagatttgaaacccaatggagttctcagcaggagtgccaaagaaagaagtaaactgaagttgcaaagcaacagtaatagttgtcatttagtaaaaacggagtagttagaatagatggtttctcttctcctgaccaatatgatgatgaagctatgagtttgtggacacatgaaaattttgaagatgatgaactagatatagagacttctaaatatatcttggatataataggtgataagttctgtcaattagtaacatctgaaaaaacagctttgtcctgggtgaaaaaggatgccaaaattgcctggaaaagagcagtgagaggagtccgggagatgtgtgatgcatgtgaagcaacattgtttaacattcactgggtctgccaaaaatgtggatttgtggtctgcttagattgttacaaggcaaaggaaaggaagagttctagagataaagaactatatgcttggatgaagtgtgtgaagggacagcctcatgatcacaaacatttaatgccaacccaaattatacctggttctgttttgacagatcttctagatgccatgcacactcttagggaaaaatatggtattaaatcccattgtcattgtactaacaaacagaatttacaagttggaaattttcctacaatgaatggtgtatctcaatctcagcagcaaaatactcctccgaagtctgagaaaaatggtggcagcagcccagagagtgatgtaggcacagataacaagttaactcctccagaatcccagtcaccactgcactggttagcagatcttgcagagcaaaaagccagagaggaaaaaaaagaaaacaaagaacttacccttgaaaaccaaattaaagaagaaagagaacaagacaactctgaatctccaaatggcagaacatcacctcttgtgtcccagaataatgaacaaggctcaaccttacgggatttgctgactacaacagctggaaagctacgtgtggggtctacagatgctggcattgcctttgccccagtatattcaatgggagccccaagtagcaaaagtggacggactatgcctaacattcttgatgacataattgcttcagttgttgaaaacaaaattccaccaagtaaaacctccaagataaatgtaaaaccagagcttaaagaagagcctgaagaaagcataatatctgcagtggatgaaaataataaattatacagtgatataccacattcttggatctgtgagaagcatattttatggcttaaggattataagaatagcagtaattggaagcttttcaaagaatgttggaaacaaggacagcctgcagtggtttctggtgtgcataagaaaatgaacattagcctatggaaggcggaatcaattagtcttgattttggagaccaccaagctgatctcctgaactgcaaagatagcatcatttcaaatgccaatgttaaggaattctgggatggttttgaagaagtttcaaaacggcagaaaaacaagagtggagaaacagttgttttaaaattgaaagactggccttcaggagaagacttcaagactatgatgccagcaagatacgaagatcttttaaaaagtctgccattgccagaatattgtaatccagaaggaaaattcaatttggcctctcatttgccaggattttttgtacgtcctgatctaggacccaggttgtgcagtgcctatggtgtagttgctgctaaagatcatgatataggaacaacaaatctccatattgaagtttctgatgttgtaaatatactagtttatgttggcatagcaaaaggaaatggcattctctcaaaagcaggaattctcaagaaatttgaggaagaagatttggatgacattttaaggaaaagattgaaggactcaagtgaaatacctggtgctctgtggcatatttatgctgggaaagatgttgacaagataagggaatttcttcaaaagatttcaaaagaacaaggccttgaagttctaccagaacatgatccaatacgtgaccaaagttggtatgtgaacaaaaagctccgtcaaaggctgcttgaagaatatggagtcagaacctgtactcttattcagttccttggtgatgctattgttttgccagcgggagcacttcatcaggttcagaattttcacagctgtattcaggtaactgaagattttgtgtctccagaacatcttgtagagtcatttcatttaacacaggaactgagacttttgaaggaagaaatcaattatgatgataaactacaggttaaaaatattttgtatcatgcagtcaaagaaatggtgagagccttgaagatacacgaggatgaagtagaggatatggaagaaaattaagtgtgatccagtttgatatttttaggttgttgaactgggattacttaaccttgaatgatgatatgtatgcacactgactttaagcttcataaaaccatcagtgccaagaaattctctttgtagtaattacttgttactgacaccacagcagtatagcatatgtcacagctcctgtgattcaatgttataaaacaagcagaattttaaaagcagcactatatagctgttttgtattatagtgtatatgatgtttgtgaaaatgccagatttaaaatgatgtatttatttttggtaaaaaataaaaaattctatgctatattgttgatcaagtgtaaatgtgaccttgtacagtttactaaaattactgatatttttcactacattgagacagttactgtgagaataggacacaaacaccagctattgcctgcatctgggaaattgctgaatcgcacagcagtcatgtcataatcagaaaattactgccaaataattgtaaaatttgtaaagtataaagtatataaagtagatactaaatacagacacttcaatattttgttgaagctattgactgtacaattaaacattttcaaaaggtgtaatttatttaaaattgtctcattttggtaaaatttatgtgaacttttaaagctaaatattaaacttaatatgctatgtaaatat

SEQ ID NO: 5939 - protein, 1480 aa, Homo sapiens
MIVMNDQVLEPQNVDPSMVQMTFLDDVVHSLLKGENIGITSRRRSRANQNVNAVHSHYTRAQANSPRPAMNSQAAVPKQNTHQQQQQRSIRPNKRKGSDSSIPDEEKMKEEKYDYISRGENPKGKNKHLMNKRRKPEEDEKKLNMKRLRTDNVSDFSESSDSENSNKRIIDNSSEQKPENELKNKNTSKINGEEGKPHNNEKAGEETLKNSQPPWDQIQEDKKHEEAEKRKSVDTQLQEDMIIHSSEQSTVSDHNSNDLLPQECNMDKTHTMELLPKEKFVSRPPTPKCVIDITNDTNLEKVAQENSSTFGLQTLQKMDPNVSDSKHSIANAKFLETAKKDSDQSWVSDVVKVDLTQSSVTNASSGNDHLNMEKEKYVSYISPLSAVSVMEDKLHKRSPPPETIKSKLNTSVDTHKIKSSPSPEVVKPKITHSPDSVKSKATYVNSQATGERRLANKIEHELSRCSFHPIPTRSSTLETTKSPLIIDKNEHFTVYRDPALIGSETGANHISPFLSQHPFPLHSSSHRTCLNPGTHHPALTPAPHLLAGSSSQTPLPTINTHPLTSGPHHAVHHPHLLPTVLPGVPTASLLGGHPRLESAHASSLSHLALAHQQQQQLLQHQSPHLLGQAHPSASYNQLGLYPIIWQYPNGTHAYSGLGLPSSKWVHPENAVNAEASLRRNSPSPWLHQPTPVTSADGIGLLSHIPVRPSSAEPHRPLKITAHSSPPLTKTLVDHHKEELERKAFMEPLRSVASTSAKNDLDLNRSQTGKDCHLHRHFVDPVLNQLQRPPQETGERLNKYKEEHRRILQESIDVAPFTTKIKGLEGERENYSRVASSSSSPKSHIIKQDMDVERSVSDLYKMKHSVPQSLPQSNYFTTLSNSVVNEPPRSYPSKEVSNIYGDKQSNALAAAAANPQTLTSFITSLSKPPPLIKHQPESEGLVGKIPEHLPHQIASHSVTTFRNDCRSPTHLTVSSTNTLRSMPALHRAPVFHPPIHHSLERKEGSYSSLSPPTLTPVMPVNAGGKVQESQKPPTLIPEPKDSQANFKSSSEQSLTEMWRPNNNLSKEKTEWHVEKSSGKLQAAMASVIVRPSSSTKTDSMPAMQLASKDRVSERSSAGAHKTDCLKLAEAGETGRIILPNVNSDSVHTKSEKNFQAVSQGSVPSSVMSAVNTMCNTKTDVITSAADTTSVSSWGGSEVISSLSNTILASTSSECVSSKSVSQPVAQKQECKVSTTAPVTLASSKTGSVVQPSSGFSGTTDFIHLKKHKAALAAAQYKSSNASETEPNAIKNQTLSASLPLDSTVICSTINKANSVGNGQASQTSQPNYHTKLKKAWLTRHSEEDKNTNKMENSGNSVSEIIKPCSVNLIASTSSDIQNSVDSKIIVDKYVKDDKVNRRKAKRTYESGSESGDSDESESKSEQRTKRQPKPTYKKKQNDLQKRKGEIEEDLKPNGVLSRSAKERSKLKLQSNSNSCHLVKTE

SEQ ID NO: 5940 - DNA, 934 bp, Homo sapiens
caggaattctcaagaaatttgaggaagaagatttggatgacattttaaggaaaagattgaaggactcaagtgaaatacctggtgctctgtggcatatttatgctgggaaagatgttgacaagataagggaatttcttcaaaaggtataagttagtttgcaaataatatctcttcccctcaagcaaggacttattcattgttgccgtaccttcacttggcattcaacaatataagaccattacataatttttacttcaaagtagatgggagtttttgttgaaagtcaaaaccctgtttctcttgctcctctttgaaagtctgttaacattttgagggttttgaatggtgatttgttcccagttggtagtgtgcctccattccctgttaataaaagactgatctgttcttgagccagatattagttgggtggcgaaaagtagctatctggagtcgcgggatgtaaaaacaaatatttcatggaaacgtctaaagaaggtaggatctttattttctttgaatctgatagatatttttggctgctgacctagggaatgattctactctatcacatctgatactatgatacttactgagtagactcagattttgagtaatcataccttgactgtagttggcatatactctgaaagaaatttatatatcaacctgaaataattggttgaaaccctttgctcaggtactttttaaacttcgtaattatggaaatttgttttaagaaatgttcagtgctgatacatcatctttctgaaaggatgtaagttctgtctgtgatcaatgtgaagtaaaagaagtcccttgaaattgatttttcaagtgttagaaggttagccatgtaaaggtatttatacttacctcaaaaaaggatcaataaatgtttatgaaatccatacatatgaatggtttggcttttggt

SEQ ID NO: 5941 - protein, 48 aa, Homo sapiens
GILKKFEEEDLDDILRKRLKDSSEIPGALWHIYAGKDVDKIREFLQKV

SEQ ID NO: 5942 - DNA, 331 bp, Homo sapiens
gaggaatgatcatgaaatgcccttatatatcatgctaaggagttttaacattatactctaggtgatagttttaattgtggaatctgtataatcaaattgacattttataataactgacagcaaggcagattagaagttgagttagaagagaataataccattggcaaggagtctaatcagaaagctttacaggcctggtgctgtggctcttgcctataatcccaacattttgggaggccaaggcaggtggatcacttgaagtcaggagtttgagaccagctagccaacgtagtgaaacccagtctctattaaaaatacaaaaattatttgg

SEQ ID NO: 5943 - protein, 50 aa, Homo sapiens [sequence omitted]

SEQ ID NO: 5944 - DNA, 1123 bp, Homo sapiens
gatagaagattagctacaaagatagaggtcactaataataatgactggtaatttttagaaaggctatcattatatccattttgtgtcagtgtttttataaaatcaggaaatggtggaactgtttttcctgacttgtttcagaaccaaacatctaaagcatatcattgacattttatttcattatttttatttttttctttttctctttggctgtgactctagccaactatgaaacattttatataatcgttaagttctttacactatcaatttataattatgaaaccatgagtgtgatatacaagttttattatcttacagataaagaactatatgcttggatgaagtgtgtgaagggacagcctcatgatcacaaacatttaatgccaacccaaattatacctggttctgttttgacagatcttctagatgccatgcacactcttagggaaaaatatggtattaaatcccattgtcattgtactaacaaacagaatttacaagttggaaattttcctacaatgaatggtgtatctcaagtgagtaaaaatctctggttattcaaataaaatctgtggttaaattagtcaactttgatatttatttgaaatttggtttaggacttatgtatgaattaggtttgctgtgtttctgtgtaaattttttgtatctatactactaattgaattattgaagaaagtgtttaaaaatgtaattgttctacctttgtaggttttacagaatgttcttaatcacagtaataaaatttctctgtgcatgcctgagtctcagcagcaaaatactcctccgaagtctgagaaaaatggtggcagcagcccagagagtgatgtaggcacagataacaagttaactcctccagaatcccagtcaccactgcactggttagcagatcttgcagagcaaaaagccagagaggaaaaaaaaggtaaacataattgattatctaggcatgtgtgagaggagtatagtataactaaccaacaatgtactattgtacaataaagtactgttaatattgaggtaaacaatttactttggtctttttcttgaattatgggttaggttcaatgtaaaacattttgtcttcacttattaggaacta

SEQ ID NO: 5945 - protein, 93 aa, Homo sapiens
MSVIYKFYYLTDKELYAWMKCVKGQPHDHKHLMPTQIIPGSVLTDLLDAMHTLREKYGIKSHCHCTNKQNLQVGNFPTMNGVSQVSKNLWLFK

SEQ ID NO: 5946 - DNA, 510 bp, Homo sapiens
ggttgaataatcaaaactgtaatagatggaagagaatggagaaaaatggaagaaatttaaagggcacaagaaaacctccgttattcccaattataatacaaaatattgtaagaaaaaaattttacagcattaacaactagtggtaatctttttattaactaccattttattttgtagttttgacagatcttctagatgccatgcacactcttagggaaaaatatggtattaaatcccattgtcattgtactaacaaacagaatttacaagttggaaattttcctacaatgaatggtgtatctcaagttttacagaatgttcttaatcacagtaataaaatttctctgtgcatgcctgagtctcagcagcaaaatactcctccgaagtctgagaaaaatggtggcagcagcccagagagtgatgtaggcacagataacaagttaactcctccagaatcccagtcaccactgcactggttagcagatcttgcagagcaaaaagccagagagg

SEQ ID NO: 5947 - protein, 102 aa, Homo sapiens
MHTLREKYGIKSHCHCTNKQNLQVGNFPTMNGVSQVLQNVLNHSNKISLCMPESQQQNTPPKSEKNGGSSPESDVGTDNKLTPPESQSPLHWLADLAEQKAR

SEQ ID NO: 5948 - DNA, 895 bp, Homo sapiens
cccttctctcagtgtgccctaagccaagtactcgttctcatttgggtgtctgcactgttggaagctactgcactgtgtttccacgcagacagagtacagtgggaaaggctttctccagctgatggatggctgttctctttatttggagtatcttactggttatgtaagcgacctcgagagaaattatcctgacccagatcggaggatgcagtagtgcttcagctgcaggatttcttagtcgttaacaccacagtgctgatgacaaagagcgagttgtaatcctcatcactgccagggctgagccagagcagacagaaaatcgtcatttgctcgttggagacttgttaggttacagctcctgcttcgttctgtggtcttggcttttcttcctatacaatgacgccgctgcaagtgagctcagaaatgcttggtttgagagccatttgcctgtgatttttgaagactaaagaagtatttacactagatactcttccagaacaaaatagaaatttcagcaaatacttactgacctttaaagccttgttgtggatttctgagatttaaagatactttaaaattctcaagaacaaaactttcaaacctctggttgaaagaaatatacccagttcagtcactgcagtagaattccttgtagataagcaactggattttttaactgaagatagtgcctttcagccctaccaggtccttattccttaaatggatacagagtgagagtatatagacaagactctgccacccagtggtttactggcataattactcatcatgatctcttcacccgcaccatgatcgttatgaatgatcaggtgaaaatattggcattacatcacgacgcaggtctcgtgccaatcaaaacgtcaacgctgttcac

SEQ ID NO: 5949 - protein, 30 aa, Homo sapiens
MDGCSLYLEYLTGYVSDLERNYPDPDRRMQ

SEQ ID NO: 5950 - DNA, 475 bp, Homo sapiens
tggcttccagattgttgctgacatcatcagttttaacaaacaaggaggtaatggggaaataattgtagagccttgttgacttatactgcacaagaaacagatgtttgccagatggaaatgaacaaaaccagtgcaaaaaaggtgtcttattcaagtttctaagaggacaaacaatgaaacgattaggaaaaactggaagaggcatattactagcttttgaccaaaaaaggtcaggaaatcagtcatatgcaaacgtatatgtcctactccttgaggatggtgtgcttgacaggactcaagattgaggacattttattttaggttaacctcagtttctcctgtgatttttatgagtattaacattttaacacaagcattgcttttatggttgagttgatttaatggtataatatttcttattcccacgtgcccggcctcaactgcctatctctaatgtcttggcaatgccatgatt

SEQ ID NO: 5951 - protein, 43 aa, Homo sapiens [sequence omitted]

SEQ ID NO: 5952 - DNA, 1397 bp, Homo sapiens
cccaaatttattcttctgccagcactaaaaggcttttacttgggggtgggggaaatatacatataatggcaatgaagtaactttctctatttgtttcacccttttagaaattgaatttcagcagataaaaccacagttgtgtaggcttatttacattgatgaagcaaagtattggaatgaaggtgaagcatgtttacatagaaacgtatttttaagccccagatattattattattgtgttctcataacacttgccccttttcagattgtaggctgtcctgttttttgttttagtttttttgaggcgaggtctcagtctgtggctcacgctggagtacagtggtgcattcacagctcactgtagcatcagcctcctgggctcaagcgattctcctacctcagcctcctcggtagctgggactacaggtggatgccaccacaccgggctaatttttgtattttttgtagagatggggtctcactgtgttgcctaggctaatctcaatctcctggactcaagcaatcttcctgtctcggtctcccaaactgctgggattacaggcatgagccaccatgcccagcccctggttttgtttgttttttgttttgagacagagtttcactcttgttgcccaggctggagtgcaatggcacgatctcggctcactgcaacctctgcttcctgggttcaagcaattctcctgcctcagcatcccgattagctgagattataggcacccaccaccacgctaggctgattttgtattttaagtaatgtgtcagtgtccaatgtctgtccacctctccgcctccaccagtctgatgtggaccttcagtgtttcatgttaggctttataggcagtatcttataacattactgatttcttgccattgtaataaattgttaccatattttattatctttatttatttatttatttatttatttatttatttatttatttatttttgagatggaattgcgctctgtctcccagctggagtacagtgtattttgagtagagacagggtttcaccatgttggtcgggctggtcttgaactcttgacctcaaatgatccgcctgtctcggccttccaaagtgctgggattacaggcgtgagccaccgcgtctggccattttatcatctttaaacacggctttcactgtgttattacacttctcagaaattgttacgcttccccgtcaattacaaatgtcatttcttatttgtcacctattcatgttgctcattgttcctctatgtggatacttcattacgtgaaagatgttcttagttgtactaaaatatattatgctcacatatgcatctttgtcttcattatattgctgttgtcatttaaaataattttttataattcaaaaacaactgtgct

SEQ ID NO: 5953 - protein, 52 aa, Homo sapiens
MSHHAQPLVLFVFCFETEFHSCCPGWSAMARSRLTATSASWVQAILLPQHPD

SEQ ID NO: 5954 - DNA, 1231 bp, Homo sapiens
tactttcccgcggccctcttcattttttcgtctcccgctgccgccgccgccgccgcctctggatctggacggacccagtggccgctgccgcctccgcagggccgggcactactttccgtctgcggtggttccgccgaccctcccgcggctgctgccccgcccgcgccggcggaaggagacgcgctgcgcgccgccgctgcccggggagggagacggagcagtactggccgcggcgcggtggcggcggctgggctgcctcggggtcttcgacggccgcgttgggttttgtttcagttttcttgtgtggcgctgcagcacaaggctgcgaatctgggagtccaaaggagtgtttgcggggagggcccgaggtcgctgtgtccggggcagagcggccggttcgtcccgagtctgcgctctttcgggtccgctgctgtgtcccggtccgctctcctcagcatgagcggccggtaggagtgaggtttcatcggttccctcgcactggaggaggcagcggccgcttcggcagcgacagctatggcggtagagacgcgggcagagctggtgggtaagcggttcctgtgtgtggcggtcggcgacgaggcacgttcggagcgctgggagagcggacgcggctggcgaagctggcgagcgggggtcatccgagccgtgtcacacagggacagccgcaatccggacctggcggtgtatgtggaatttgatgatcttgaatgggataaacgagagtgggttaaagtttatgaagatttttcaactttcttggtggaataccacttaatctgggccaaaaggaatgaccctagccagactcagggatcaaagagcaaacagattcagtggcctgcattggtaagatctattcctgtttcattaagcattttcatttgttcgtttaaaacaaagaacaacaacaacaaaacaaaggccaggtttggtgactgacacctgtaaaactagcactttgagaggctgaagcaggacaattgcttgaagccaggagttggagatcagcctgggcaaaaaagcgagaccccatctctaccaaaaaaaaaaaaaaaaaatagctggatgtggtggcacatacctgtggtcccagctacttgggaggctgaggtgggaggatcacgtgagcccaagaatccaagtcaatgtgagttactgtcacactgctgcactccagcttgagtaacagagtgagaccccatctcttaac

SEQ ID NO: 5955 - protein, 141 aa, Homo sapiens [sequence omitted]

SEQ ID NO: 5956 - DNA, 819 bp, Homo sapiens
atggtgaagtatttcctgggccagggcgtgctccagagttcctgggaccaagtgttcaccgccttctggcatcagtacccaaatccctatagcaaacatgtcttgacggaagacacagtacaccgggaggtgactgctgaccagaaactgctgtcccagcaactcctgaccaagaccaacaggatgtcccactgggccaagcaactgtttcctgccaatgttcttcattcagtgtacatcctggaggactctattgtggacccacagaatcagaccatgaccaccttcacctggaacatcaaccatgcccggctgatggtggtggagaaacagtgtgtttactgtatgaactctaacaacagtggctggaccgaaatccgcagagaagcctgggtctcctctagcttatttggtgtctccagaagtgtccaggaatttggtcttgcccagttcaaaagcaacgtgaccaagactatgaagggttttgaatatatcttggcaaagatgaaatgcaaggccccttctaaaacacttgttgagacagccaaggaagccaaggagcaggcaaaggagatggcactggcagctacagagaaggcaaggacctcaccagcaaggcagccacctagaagcagcagcagcagcagtttgtgtggccagctcattgccaccacagcatcccagacagtttggcttagccccctctgtgctgtccactgtactttatcattaaaaatcaatttccagccctaaaaatacacacaacacacatatatatatattaagacagctgatcaattactttaccaaacatcatag

SEQ ID NO: 5957 - protein, 250 aa, Homo sapiens
MVKYFLGQGVLQSSWDQVFTAFWHQYPNPYSKHVLTEDTVHREVTADQKLLSQQLLTKTNRMSHWAKQLFPANVLHSVYILEDSIVDPQNQTMTTFTWNINHARLMVVEKQCVYCMNSNNSGWTEIRREAWVSSSLFGVSRSVQEFGLAQFKSNVTKTMKGFEYILAKMKCKAPSKTLVETAKEAKEQAKEMALAATEKARTSPARQPPRSSSSSSLCGQLIATTASQTVWLSPLCAVHCTLSLKINFQP

SEQ ID NO: 5958 - DNA, 442 bp, Homo sapiens
ctgctaacggataagacaagagctcactcactggagagcagtggcatgatcacaggtcaccgcatcctggaattcctgggctcatgagatcctcgcacctcagcttcccgagtagctgggactacaaggtgtttaacaccataccggctaatttttgttttgttttgtttcgttcgatgaagacgaactcctgggttcatgcaatcctcccacctcgcttcccaaagtgttaggagtatagacgtgatccactgactctggcaaaactatttttttaaaaaagtgacaatggcttaacacctacattagatgacaataaaaccagtgcagatggtcatgaaaagcaaacaaattcagggattatagactttataaccaagtatatctactggtctgtgaaaggaggaaatgacagagtatgaacaataaaatactataacat

SEQ ID NO: 5959 - protein, 49 aa, Homo sapiens
MRSSHLSFPSSWDYKVFNTIPANFCFVLFRSMKTNSWVHAILPPRFPKC

SEQ ID NO: 5960 - DNA, 703 bp, Homo sapiens
atagcttaaacatgtaattagtatcaccacaaatgagaagaatgaaaggatcacattttccccctcgttttcccttgaagtcatgaacggttggttctgctgtgactttggggcttagttttcagtagaagtgttgtcctgctctgctgctgttactgcgggactgctaattcaggctaactcaggcggcgggcgctgtgtgctctgaacatcaaaccgcgggtgaggcgtcaacccaggagtttattttgtgatcagagtggaaccactacacttcactttcccctcacctccacctctgagggagcaacgaatacaaaggtagacccccaaaagctttgaatagctgtcgcctactttcccgcggccctcttcattttttcgtctcccgctgccgccgccgccgccgcctctggatctggacggacccagtggccgtgcctcggggtcttcgacggccgcgttgggttttgtttcagttttcttgtgtggcgctgcagcacaaggctgcgaatctgggagtccaaaggagtgtttgcggggagggcccgaggtcgctgtgtccggggcagagcggccggttcgtcccgagtctgcgctctttcgggtccgctgctgtgtcccggtccgctctcctcagcatgagcggccggtaggagtgaggtttcatcggttccctcgcactggaggaggcagcggccgc

SEQ ID NO: 5961 - protein, 118 aa, Homo sapiens
LSPTFPRPSSFFRLPLPPPPPPLDLDGPSGRASGSSTAALGFVSVFLCGAAAQGCESGSPKECLRGGPEVAVSGAERPVRPESALFRVRCCVPVRSPQHERPVGVRFHRFPRTGGGSG

SEQ ID NO: 5962 - DNA, 632 bp, Homo sapiens
atagcttaaacatgtaattagtatcaccacaaatgagaagaatgaaaggatcacattttccccctcgttttcccttgaagtcatgaacggttggttctgctgtgactttggggcttagttttcagtagaagtgttgtcctgctctgctgctgttactgcgggactgctaattcaggctaactcaggcggcgggcgctgtgtgctctgaacatcaaaccgcgggtgaggcgtcaacccaggagtttattttgtgatcagagtggaaccactacacttcactttcccctcacctccacctctgagggagcaacgaatacaaaggtagacccccaaaagctttgaatagctgtcgcctactttcccgcggccctcttcattttttcgtctcccgcgaccctcccgcggctgctgccccgcccgcgccggcggaaggagacgcggaatctgggagtccaaaggagtgtttgcggggagggcccgaggtcgctgtgtccggggcagagcggccggttcgtcccgagtctgcgctctttcgggtccgctgctgtgtcccggtccgctctcctcagcatgagcggccggtaggagtgaggtttcatcggttccctcgcactggaggaggcagcggccgc

SEQ ID NO: 5963 - protein, 109 aa, Homo sapiens
GSNEYKGRPPKALNSCRLLSRGPLHFFVSRDPPAAAAPPAPAEGDAESGSPKECLRGGPEVAVSGAERPVRPESALFRVRCCVPVRSPQHERPVGVRFHRFPRTGGGSG

SEQ ID NO: 5964 - DNA, 331 bp, Homo sapiens
gccgccgcctctggatctggacggacccagtggccgctgccgcctccgcagggccgggcactactttccgtctgcggtggttccgccgaccctcccgcggctgctgccccgcccgcgccggcggaaggagacgcgctgcgcgccgccgctgcccggggagggagacggagcagtactggccgcggcgcggtggcggcggctgggctgcctcggggtcttcgacggccgcgttgggttttgtttcagttttcttgtgtggcgctgcagcacaaggctgcgaatctgggatgaggtttcatcggttccctcgcactggaggaggcagcggccg

SEQ ID NO: 5965 - protein, 109 aa, Homo sapiens
PPPLDLDGPSGRCRLRRAGHYFPSAVVPPTLPRLLPRPRRRKETRCAPPLPGEGDGAVLAAARWRRLGCLGVFDGRVGFCFSFLVWRCSTRLRIWDEVSSVPSHWRRQR

SEQ ID NO: 5966 - DNA, 789 bp, Homo sapiens
catcagccgcgggatacaaaggctcggcactgccgtcgcatcctcgggaggatcgcggagcctcccgcgctcggcgtctgcggagcctgcgcagggagcagctgcgaggcgcgccgctcccgggcccgcagggcggtgccgcgctgcgcggggagcaggagcggggagcgcgcgccgcctgccctgagcgcctgcccacccagcgccgccggagcaggggcgccgcgccgcaccgcacgcagccgagcagcgccacagccgccgccgccgtcgcagccgcagtcgccgcagctaggccctcggccgtcgcagggagctccgcagcgacgtggaccaagatagactgtgagcttctcaaggataaaggtcctatctccagaaccttgcaggatgtgacccacatagatatcactgaaaattaggattcaggcatttttgcatttttacaattgcatcatgcccatggtcacaaagcagatcattgatgacttggtatctggatgttgatctccctactcttttatccttacatatgttgaattattgtcaccaagtcactttactggttccttaatctacactgattttagaaatcttcatctgtaattcttaagataatttgctaagtattatacagtgtacactgaaaaagtggacttggaaataaaattgcccaagcaaaattttttctctcaacttgccgatatgcatttttgggtatgttttgctgttttaatttattacaggttttttgtttgtttgtttgttttcggggggactgagttttgc

SEQ ID NO: 5967 - protein, 139 aa, Homo sapiens [sequence omitted]

SEQ ID NO: 5968 - DNA, 720 bp, Homo sapiens
ggggacgggcgggggaccgacctctgcgcagcccaggccgccgcgcgcacacaccgggcccggctcctgagggcgccagcgcggccccggggagcgcgaggagccggcgaagcgcgcggcctgccgttggcggcctggtccgcagcgccctgcgcccacccgccccggacgtggggcccaagcccccgtgaagatggtgtcctggatgatctccagagccgtggtgctggtgtttggaatgctttatcctgcatattattcatacaaagctgtgaaaacaaaaaacgtgaaggaatatgttcgatggatgatgtactggattgtttttgctctctatactgtgattgaaacagtagccgatcaaacagttgcttggtttcccctgtactatgagctgaagattgcttttgtcatatggctgctttctccctataccaaaggagcaagtttaatatatagaaaattccttcatccacttctttcttcaaaggaaagggagattgatgattatattgtacaagcaaaggaacgaggctatgaaaccatggtaaactttggacggcaaggtttaaaccttgcagctactgctgctgttactgcagcagtaaagagccaaggagcaataactgaacgtttaagaagcttcagtatgcatgatttaacaactatccaaggtgatgagcctgtgggacaaagaccataccaacctctaccagaagc

SEQ ID NO: 5969 - protein, 174 aa, Homo sapiens
MVSWMISRAVVLVFGMLYPAYYSYKAVKTKNVKEYVRWMMYWIVFALYTVIETVADQTVAWFPLYYELKIAFVIWLLSPYTKGASLIYRKFLHPLLSSKEREIDDYIVQAKERGYETMVNFGRQGLNLAATAAVTAAVKSQGAITERLRSFSMHDLTTIQGDEPVGQRPYQPLP

SEQ ID NO: 5970 - DNA, 1069 bp, Homo sapiens
ggggacgggcgggggaccgacctctgcgcagcccaggccgccgcgcgcacacaccgggcccggctcctgagggcgccagcgcggccccggggagcgcgaggagccggcgaagcgcgcggcctgccgttggcggcctggtccgcagcgccctgcgcccacccgccccggacgtggggcccaagcccccgtgaagatggtgtcctggatgatctccagagccgtggtgctggtgtttggaatgctttatcctgcatattattcatacaaagctgtgaaaacaaaaaacgtgaaggaatatgttcgatggatgatgtactggattgtttttgctctctatactgtgattgaaacagtagccgatcaaacagttgcttggtttcccctgtactatgagctgaagattgcttttgtcatatggctgctttctccctataccaaaggagcaagtttaatatatagaaaattccttcatccacttctttcttcaaaggaaagggagattgatgattatattgtacaagcaaaggaacgaggctatgaaaccatggtaaactttggacggcaaggtttaaaccttgcagctactgctgctgttactgcagcagtaaagagccaaggagcaataactgaacgtttaagaagcttcagtatgcatgatttaacaactatccaaggtgatgagcctgtgggacaaagaccataccaacctctaccagaagcaaaaaagaaaagtaaaccagcccccagtgaatcagcaggttatggaattccactgaaagacggagatgagaaaacagatgaagaagcagaggggccatattcagataatgagatgttaacacacaaagggcttcgaagatcgcaaagcatgaaatctgtgaaaaccaccaaaggccgcaaagaggtgcggtacgggtcactaaaatacaaagtgaagaaacgaccacaagtgtatttttagtcatctacacgtcaaatatcccaagacagattatgctaaatacatcgacttcatcttctaacatgatatattcaggatttacacattaaaatgattatttaaattgtg

SEQ ID NO: 5971 - protein, 255 aa, Homo sapiens; identical to SEQ ID NO: 782

SEQ ID NO: 5972 - DNA, 2303 bp, Homo sapiens
ggggacgggcgggggaccgacctctgcgcagcccaggccgccgcgcgcacacaccgggcccggctcctgagggcgccagcgcggccccggggagcgcgaggagccggcgaagcgcgcggcctgccgttggcggcctggtccgcagcgccctgcgcccacccgccccggacgtggggcccaagcccccgtgaagatggtgtcctggatgatctccagagccgtggtgctggtgtttggaatgctttatcctgcatattattcatacaaagctgtgaaaacaaaaaacgtgaaggaatatgttcgatggatgatgtactggattgtttttgctctctatactgtgattgaaacagtagccgatcaaacagttgcttggtttcccctgtactatgagctgaagattgcttttgtcatatggctgctttctccctataccaaaggagcaagtttaatatatagaaaattccttcatccacttctttcttcaaaggaaagggagattgatgattatattgtacaagcaaaggaacgaggctatgaaaccatggtaaactttggacggcaaggtttaaaccttgcagctactgctgctgttactgcagcagtaaagagccaaggagcaataactgaacgtttaagaagcttcagtatgcatgatttaacaactatccaaggtgatgagcctgtgggacaaagaccataccaacctctaccagaagcaaaaaagaaaagtaaaccagcccccagtgaatcagcaggttatggaattccactgaaagacggagatgagaaaacagatgaagaagcagaggggccatattcagataatgagatgttaacacacaaagggcttcgaagatcgcaaagcatgaaatctgtgaaaaccaccaaaggccgcaaagaggtgcggtacgggtcactaaaatacaaagtgaagaaacgaccacaagtgtatttttagtcatctacacgtcaaatatcccaagacagattatgctaaatacatcgacttcatcttctaacatgatatattcaggatttacacattaaaatgattatttaaattgtggcagtgatggggtttactttcatgaatttaaattgtttttatttctgtaacaattgcttccaaatattgactactaaaggcagttctgcaagatgtactaaatatgtatattagaaattatagaaaatcatgttgtccgttttcaaattcatcaacagcctagagtgcctgagatataagatgaaacacaaatccacagtatacttgaaaggagcctttttacggttcaggataaatcagcctttgtgatgtactgtgtttacctccttttgtgttgtatctggtaattaaataggcctcagattcagcagtgacataacaaggacataatgtaagataataaagtaggttttatatattctttaaatttttacttatataatactttctagtttttccaccatcagctgaaagtttttgaaacaaatatttgaaaaccaggtatccacacatagcacttttattcctgactagttttgcacacttgaaaattgtttacttattttacaactgttttactgatgctatctttattgtttttgccgtattctgacatgtcaaatctatgccttgaattatatcatctcttttcctgtgggtttcatttgttaaattcattggattttaataatataaaagtatagctaattgttcagttttaactatttttaattatcttcttaacaaataagaagttgctttaaacattaaccaattttctatatttagctatacagagtaattgaacttaacatgtttttgtcaacaccaattacattttcagcttttaaaaatggtagcttttgtgaaatagaatcagtgaccagtatagcacttagatcccttctaactcatataatttttctcagccaatccattcacaagcttggcattgacatgtgctgctagtttataaactggcattgacgaaaatcatttgaatctcttctggctgagataatttgccaatgcaaaatacagttgtcattaatcctgcacattagaaattattagaaacatattactttttaactttaaatctcaaagagattttgagttattgaattcttaaggctttcttagcttgaactgataactatgcattatgaaccctaagtcaatatatttttggtggttttagtgatcagtaatcaaatttgtacttattatgcttgttcaggtaatttacttgactgttctatttgtttgtccaaaagataaaatgatgagagag

SEQ ID NO: 5973 - protein, 255 aa, Homo sapiens; identical to SEQ ID NO: 782

SEQ ID NO: 5974 - DNA, 4669 bp, Homo sapiens
ggggacgggcgggggaccgacctctgcgcagcccaggccgccgcgcgcacacaccgggcccggctcctgagggcgccagcgcggccccggggagcgcgaggagccggcgaagcgcgcggcctgccgttggcggcctggtccgcagcgccctgcgcccacccgccccggacgtggggcccaagcccccgtgaagatggtgtcctggatgatctccagagccgtggtgctggtgtttggaatgctttatcctgcatattattcatacaaagctgtgaaaacaaaaaacgtgaaggaatatgttcgatggatgatgtactggattgtttttgctctctatactgtgattgaaacagtagccgatcaaacagttgcttggtttcccctgtactatgagctgaagattgcttttgtcatatggctgctttctccctataccaaaggagcaagtttaatatatagaaaattccttcatccacttctttcttcaaaggaaagggagattgatgattatattgtacaagcaaaggaacgaggctatgaaaccatggtaaactttggacggcaaggtttaaaccttgcagctactgctgctgttactgcagcagtaaagagccaaggagcaataactgaacgtttaagaagcttcagtatgcatgatttaacaactatccaaggtgatgagcctgtgggacaaagaccataccaacctctaccagaagcaaaaaagaaaagtaaaccagcccccagtgaatcagcaggttatggaattccactgaaagacggagatgagaaaacagatgaagaagcagaggggccatattcagataatgagatgttaacacacaaagggcttcgaagatcgcaaagcatgaaatctgtgaaaaccaccaaaggccgcaaagaggtgcggtacgggtcactaaaatacaaagtgaagaaacgaccacaagtgtatttttagtcatctacacgtcaaatatcccaagacagattatgctaaatacatcgacttcatcttctaacatgatatattcaggatttacacattaaaatgattatttaaattgtggcagtgatggggtttactttcatgaatttaaattgtttttatttctgtaacaattgcttccaaatattgactactaaaggcagttctgcaagatgtactaaatatgtatattagaaattatagaaaatcatgttgtccgttttcaaattcatcaacagcctagagtgcctgagatataagatgaaacacaaatccacagtatacttgaaaggagcctttttacggttcaggataaatcagcctttgtgatgtactgtgtttacctccttttgtgttgtatctggtaattaaataggcctcagattcagcagtgacataacaaggacataatgtaagataataaagtaggttttatatattctttaaatttttacttatataatactttctagtttttccaccatcagctgaaagtttttgaaacaaatatttgaaaaccaggtatccacacatagcacttttattcctgactagttttgcacacttgaaaattgtttacttattttacaactgttttactgatgctatctttattgtttttgccgtattctgacatgtcaaatctatgccttgaattatatcatctcttttcctgtgggtttcatttgttaaattcattggattttaataatataaaagtatagctaattgttcagttttaactatttttaattatcttcttaacaaataagaagttgctttaaacattaaccaattttctatatttagctatacagagtaattgaacttaacatgtttttgtcaacaccaattacattttcagcttttaaaaatggtagcttttgtgaaatagaatcagtgaccagtatagcacttagatcccttctaactcatataatttttctcagccaatccattcacaagcttggcattgacatgtgctgctagtttataaactggcattgacgaaaatcatttgaatctcttctggctgagataatttgccaatgcaaaatacagttgtcattaatcctgcacattagaaattattagaaacatattactttttaactttaaatctcaaagagattttgagttattgaattcttaaggctttcttagcttgaactgataactatgcattatgaaccctaagtcaatatatttttggtggttttagtgatcagtaatcaaatttgtacttattatgcttgttcaggtaatttacttgactgttctatttgtttgtccaaaagataaaatgatgagagagattcgagaggtctttgatctgtctcccttttaagaaatgaagccagctggtaatgtatattcaggacttcctcagagtattggccaagaacataatgtttacacaggagtaccttggtataatgcatacattgtctcatgatactagtcataaaatattttatggattatttcacattcttcatatataacaagtaaaattaattcagttttcttctcccaacgtttaattctgaataactctatctactttaccctaatttttagcctcttaatttctggaaggactctaatttctattccaaatttctatgaattctaattgtaaattatcggaacagagttttatttatatgacctggtactagacttcttaatataactgttacactgtccttgtctttcctactcaaagacagtatcatctgaagttgcctaataaggtcatgtgagtcaagaactttatctgtgggagctgatttgcaccattttaccttttttttttttttttttttgagacggagtcttgctctgtcaccaggctggagtgcagtggcgcgatctcggctcactacaacctctgcctcccgggttcgagcgattctcctgcctcggcctcccgagtaactgggtctacaggcccgtgctaccacgcccagctaatttttgtctttttagtagagacagggtttaaccatgttgcccaggatggtctccatctcttgacctcgtgatccgcccgcctcggcctcccaaacttctgggattacaggcgtgagccaccgcacccagccaccattttatctctctaaagtctggtcccagtattaaacctattctttagtaaactcatattactgttctaaattgaagaaattatttattactctgtacttctagactcaaaattctttatcaaagatagtctcaaagaggtagtacaagtcctgtttaactgcactttttcacattcacagtgcttcctctgatatctttccttacatcattatacactgttgatatcattttactcttctttctcttctacatttcttaaattttggttcttttcctgtacatgtgttttagcggggcccttttctttgaactttgtctaattagcctgtacatttttgtttcttttaaggtagaacagatctttttttgtttctccttttaagtctactggttttaaaagaggtaaatgtatccatagaccacagtgccttgctttttcctctgccagcacatggagcacgggattagatgcacaaacctatttagggaactattttggtagatgtttgagtttatacagaaattgcagctggtattttattttgctgtacatttactcaacttgtccattagtatttaactatttccagagtttgtttaggagtaagaattgacccattcgttagtttaccatattttttcctggtataaaaaggagccagaaataagccttattgctaaataattaattatgtaagcccacctaggtcctgcataagatccccctcacatacttcacaatatatatgtgtgtgtgtgtgtgtgtgtgtgtgtgtgtgtgtgtgtgtgtatttggctaaaaaattatactgccaaaattactgattataaatacttgactacactgattgatgggacaaaatgattaaagtattttcagggatcttattccatatgtcaccaccaaagatttctacagtgttataaagtatataaatattccaaatttctgtggttaaatatttttttcttttttttccttttttagaataacacagtctgtgctttccaaaaatgcttgaacttttatgttgttaagaaatatataatgatatcttacattaagcatgagtctaatttgtattaattgggatggactaaattttcatttgattatcaggaaaattaaggagttatatatttaaaagcaattttctgtgttttcttctttgtaagttgactcatttgtgaagcaattaggcaaattttgagaagatcattgttattgtggtttgcagtatatatttcttagtaaatatcacttaagattaaatttttcagaaagaaaattatagcttttttcccaaaatatttttaagatttaatctttttgtagtatgctacagatttaattatattaactcttttttaagacattgaccatgacttaacattttgccttctaacaccttttaaatctatgtactttaatagttaagagaaaataagtttgcagatttttaataatctgtttgtaaaaggctatctctaagcctagtatgtgggtaattttacaggtgtgttttttgataactttaatataaaataaactcattttatttgtggcaa

SEQ ID NO: 5975 - protein, 255 aa, Homo sapiens; identical to SEQ ID NO: 782

SEQ ID NO: 5976 - DNA, 5208 bp, Homo sapiens
ggggacgggcgggggaccgacctctgcgcagcccaggccgccgcgcgcacacaccgggcccggctcctgagggcgccagcgcggccccggggagcgcgaggagccggcgaagcgcgcggcctgccgttggcggcctggtccgcagcgccctgcgcccacccgccccggacgtggggcccaagcccccgtgaagatggtgtcctggatgatctccagagccgtggtgctggtgtttggaatgctttatcctgcatattattcatacaaagctgtgaaaacaaaaaacgtgaaggaatatgttcgatggatgatgtactggattgtttttgctctctatactgtgattgaaacagtagccgatcaaacagttgcttggtttcccctgtactatgagctgaagattgcttttgtcatatggctgctttctccctataccaaaggagcaagtttaatatatagaaaattccttcatccacttctttcttcaaaggaaagggagattgatgattatattgtacaagcaaaggaacgaggctatgaaaccatggtaaactttggacggcaaggtttaaaccttgcagctactgctgctgttactgcagcagtaaagagccaaggagcaataactgaacgtttaagaagcttcagtatgcatgatttaacaactatccaaggtgatgagcctgtgggacaaagaccataccaacctctaccagaagcaaaaaagaaaagtaaaccagcccccagtgaatcagcaggttatggaattccactgaaagacggagatgagaaaacagatgaagaagcagaggggccatattcagataatgagatgttaacacacaaagggcttcgaagatcgcaaagcatgaaatctgtgaaaaccaccaaaggccgcaaagaggtgcggtacgggtcactaaaatacaaagtgaagaaacgaccacaagtgtatttttagtcatctacacgtcaaatatcccaagacagattatgctaaatacatcgacttcatcttctaacatgatatattcaggatttacacattaaaatgattatttaaattgtggcagtgatggggtttactttcatgaatttaaattgtttttatttctgtaacaattgcttccaaatattgactactaaaggcagttctgcaagatgtactaaatatgtatattagaaattatagaaaatcatgttgtccgttttcaaattcatcaacagcctagagtgcctgagatataagatgaaacacaaatccacagtatacttgaaaggagcctttttacggttcaggataaatcagcctttgtgatgtactgtgtttacctccttttgtgttgtatctggtaattaaataggcctcagattcagcagtgacataacaaggacataatgtaagataataaagtaggttttatatattctttaaatttttacttatataatactttctagtttttccaccatcagctgaaagtttttgaaacaaatatttgaaaaccaggtatccacacatagcacttttattcctgactagttttgcacacttgaaaattgtttacttattttacaactgttttactgatgctatctttattgtttttgccgtattctgacatgtcaaatctatgccttgaattatatcatctcttttcctgtgggtttcatttgttaaattcattggattttaataatataaaagtatagctaattgttcagttttaactatttttaattatcttcttaacaaataagaagttgctttaaacattaaccaattttctatatttagctatacagagtaattgaacttaacatgtttttgtcaacaccaattacattttcagcttttaaaaatggtagcttttgtgaaatagaatcagtgaccagtatagcacttagatcccttctaactcatataatttttctcagccaatccattcacaagcttggcattgacatgtgctgctagtttataaactggcattgacgaaaatcatttgaatctcttctggctgagataatttgccaatgcaaaatacagttgtcattaatcctgcacattagaaattattagaaacatattactttttaactttaaatctcaaagagattttgagttattgaattcttaaggctttcttagcttgaactgataactatgcattatgaaccctaagtcaatatatttttggtggttttagtgatcagtaatcaaatttgtacttattatgcttgttcaggtaatttacttgactgttctatttgtttgtccaaaagataaaatgatgagagagattcgagaggtctttgatctgtctcccttttaagaaatgaagccagctggtaatgtatattcaggacttcctcagagtattggccaagaacataatgtttacacaggagtaccttggtataatgcatacattgtctcatgatactagtcataaaatattttatggattatttcacattcttcatatataacaagtaaaattaattcagttttcttctcccaacgtttaattctgaataactctatctactttaccctaatttttagcctcttaatttctggaaggactctaatttctattccaaatttctatgaattctaattgtaaattatcggaacagagttttatttatatgacctggtactagacttcttaatataactgttacactgtccttgtctttcctactcaaagacagtatcatctgaagttgcctaataaggtcatgtgagtcaagaactttatctgtgggagctgatttgcaccattttaccttttttttttttttttttttgagacggagtcttgctctgtcaccaggctggagtgcagtggcgcgatctcggctcactacaacctctgcctcccgggttcgagcgattctcctgcctcggcctcccgagtaactgggtctacaggcccgtgctaccacgcccagctaatttttgtctttttagtagagacagggtttaaccatgttgcccaggatggtctccatctcttgacctcgtgatccgcccgcctcggcctcccaaacttctgggattacaggcgtgagccaccgcacccagccaccattttatctctctaaagtctggtcccagtattaaacctattctttagtaaactcatattactgttctaaattgaagaaattatttattactctgtacttctagactcaaaattctttatcaaagatagtctcaaagaggtagtacaagtcctgtttaactgcactttttcacattcacagtgcttcctctgatatctttccttacatcattatacactgttgatatcattttactcttctttctcttctacatttcttaaattttggttcttttcctgtacatgtgttttagcggggcccttttctttgaactttgtctaattagcctgtacatttttgtttcttttaaggtagaacagatctttttttgtttctccttttaagtctactggttttaaaagaggtaaatgtatccatagaccacagtgccttgctttttcctctgccagcacatggagcacgggattagatgcacaaacctatttagggaactattttggtagatgtttgagtttatacagaaattgcagctggtattttattttgctgtacatttactcaacttgtccattagtatttaactatttccagagtttgtttaggagtaagaattgacccattcgttagtttaccatattttttcctggtataaaaaggagccagaaataagccttattgctaaataattaattatgtaagcccacctaggtcctgcataagatccccctcacatacttcacaatatatatgtgtgtgtgtgtgtgtgtgtgtgtgtgtgtgtgtgtgtgtgtatttggctaaaaaattatactgccaaaattactgattataaatacttgactacactgattgatgggacaaaatgattaaagtattttcagggatcttattccatatgtcaccaccaaagatttctacagtgttataaagtatataaatattccaaatttctgtggttaaatatttttttcttttttttccttttttagaataacacagtctgtgctttccaaaaatgcttgaacttttatgttgttaagaaatatataatgatatcttacattaagcatgagtctaatttgtattaattgggatggactaaattttcatttgattatcaggaaaattaaggagttatatatttaaaagcaattttctgtgttttcttctttgtaagttgactcatttgtgaagcaattaggcaaattttgagaagatcattgttattgtggtttgcagtatatatttcttagtaaatatcacttaagattaaatttttcagaaagaaaattatagcttttttcccaaaatatttttaagatttaatctttttgtagtatgctacagatttaattatattaactcttttttaagacattgaccatgacttaacattttgccttctaacaccttttaaatctatgtactttaatagttaagagaaaataagtttgcagatttttaataatctgtttgtaaaaggctatctctaagcctagtatgtgggtaattttacaggtgtgttttttgataactttaatataaaataaactcattttatttgtggcaattcgcgtttctttttttatgccagagtacatatgttggattccatgaattggtattacttattattatgtgttgattaaatatatgcacacacttaggattacagatcacagagcaaattatgaaaatcataaacattctggtatggtcatccataggattatgaaaaagaaatactgaattgttaaatttggatgttagaaaggaaagataggaaaaacaatgagtacagaaatcctcaccatcaatttggatgggttagctgtctcaggcataaaatgtaacacaaaattcagatttatgtatcctggaaatgttctggggttccatctgttttaaagttagacgtctgtctgcctcacatttaagctttagagagaaatcctatgttttaagaagtttctttgtgttacttcattatgacacataatgcgtgttaaggtctttctagatagcattttaaatggaattattttcattttcattatgaggtatatacttgtaatgatctaaagaggttagaaatataaataaaaattc

SEQ ID NO: 5977 - protein, 255 aa, Homo sapiens; identical to SEQ ID NO: 782

SEQ ID NO: 5978 - DNA, 2507 bp, Homo sapiens
atttgccaatgcaaaatacagttgtcattaatcctgcacattagaaattattagaaacatattactttttaactttaaatctcaaagagattttgagttattgaattcttaaggctttcttagcttgaactgataactatgcattatgaaccctaagtcaatatatttttggtggttttagtgatcagtaatcaaatttgtacttattatgcttgttcaggtaatttacttgactgttctatttgtttgtccaaaagataaaatgatgagagagattcgagaggtctttgatctgtctcccttttaagaaatgaagccagctggtaatgtatattcaggacttcctcagagtattggccaagaacataatgtttacacaggagtaccttggtataatgcatacattgtctcatgatactagtcataaaatattttatggattatttcacattcttcatatataacaagtaaaattaattcagttttcttctcccaacgtttaattctgaataactctatctactttaccctaatttttagcctcttaatttctggaaggactctaatttctattccaaatttctatgaattctaattgtaaattatcggaacagagttttatttatatgacctggtactagacttcttaatataactgttacactgtccttgtctttcctactcaaagacagtatcatctgaagttgcctaataaggtcatgtgagtcaagaactttatctgtgggagctgatttgcaccattttaccttttttttttttttttttttgagacggagtcttgctctgtcaccaggctggagtgcagtggcgcgatctcggctcactacaacctctgcctcccgggttcgagcgattctcctgcctcggcctcccaaacttctgggattacaggcgtgagccaccgcacccagccaccattttatctctctaaagtctggtcccagtattaaacctattctttagtaaactcatattactgttctaaattgaagaaattatttattactctgtacttctagactcaaaattctttatcaaagatagtctcaaagaggtagtacaagtcctgtttaactgcactttttcacattcacagtgcttcctctgatatctttccttacatcattatacactgttgatatcattttactcttctttctcttctacatttcttaaattttggttcttttcctgtacatgtgttttagcggggcccttttctttgaactttgtctaattagcctgtacatttttgtttcttttaaggtagaacagatctttttttgtttctccttttaagtctactggttttaaaagaggtaaatgtatccatagaccacagtgccttgctttttcctctgccagcacatggagcacgggattagatgcacaaacctatttagggaactattttggtagatgtttgagtttatacagaaattgcagctggtattttattttgctgtacatttactcaacttgtccattagtatttaactatttccagagtttgtttaggagtaagaattgacccattcgttagtttaccatattttttcctggtataaaaaggagccagaaataagccttattgctaaataattaattatgtaagcccacctaggtcctgcataagatccccctcacatacttcacaatatatatgtgtgtgtgtgtgtgtgtgtgtgtgtgtgtgtgtgtgtgtgtatttggctaaaaaattatactgccaaaattactgattataaatacttgactacactgattgatgggacaaaatgattaaagtattttcagggatcttattccatatgtcaccaccaaagatttctacagtgttataaagtatataaatattccaaatttctgtggttaaatatttttttcttttttttccttttttagaataacacagtctgtgctttccaaaaatgcttgaacttttatgttgttaagaaatatataatgatatcttacattaagcatgagtctaatttgtattaattgggatggactaaattttcatttgattatcaggaaaattaaggagttatatatttaaaagcaattttctgtgttttcttctttgtaagttgactcatttgtgaagcaattaggcaaattttgagaagatcattgttattgtggtttgcagtatatatttcttagtaaatatcacttaagattaaatttttcagaaagaaaattatagcttttttcccaaaatatttttaagatttaatctttttgtagtatgctacagatttaattatattaactcttttttaagacattgaccatgacttaacattttgccttctaacaccttttaaatctatgtactttaatagttaagagaaaataagtttgcagatttttaataatctgtttgtaaaaggctatctctaagcctagtatgtgggtaattttacaggtgtgttttttgataactttaatataaaataaactcattttatttgtggcaa

SEQ ID NO: 5979 - protein, 45 aa, Homo sapiens
MYIQDFLRVLAKNIMFTQEYLGIMHTLSHDTSHKIFYGLFHILHI

SEQ ID NO: 5980 - DNA, 3046 bp, Homo sapiens
atttgccaatgcaaaatacagttgtcattaatcctgcacattagaaattattagaaacatattactttttaactttaaatctcaaagagattttgagttattgaattcttaaggctttcttagcttgaactgataactatgcattatgaaccctaagtcaatatatttttggtggttttagtgatcagtaatcaaatttgtacttattatgcttgttcaggtaatttacttgactgttctatttgtttgtccaaaagataaaatgatgagagagattcgagaggtctttgatctgtctcccttttaagaaatgaagccagctggtaatgtatattcaggacttcctcagagtattggccaagaacataatgtttacacaggagtaccttggtataatgcatacattgtctcatgatactagtcataaaatattttatggattatttcacattcttcatatataacaagtaaaattaattcagttttcttctcccaacgtttaattctgaataactctatctactttaccctaatttttagcctcttaatttctggaaggactctaatttctattccaaatttctatgaattctaattgtaaattatcggaacagagttttatttatatgacctggtactagacttcttaatataactgttacactgtccttgtctttcctactcaaagacagtatcatctgaagttgcctaataaggtcatgtgagtcaagaactttatctgtgggagctgatttgcaccattttaccttttttttttttttttttttgagacggagtcttgctctgtcaccaggctggagtgcagtggcgcgatctcggctcactacaacctctgcctcccgggttcgagcgattctcctgcctcggcctcccaaacttctgggattacaggcgtgagccaccgcacccagccaccattttatctctctaaagtctggtcccagtattaaacctattctttagtaaactcatattactgttctaaattgaagaaattatttattactctgtacttctagactcaaaattctttatcaaagatagtctcaaagaggtagtacaagtcctgtttaactgcactttttcacattcacagtgcttcctctgatatctttccttacatcattatacactgttgatatcattttactcttctttctcttctacatttcttaaattttggttcttttcctgtacatgtgttttagcggggcccttttctttgaactttgtctaattagcctgtacatttttgtttcttttaaggtagaacagatctttttttgtttctccttttaagtctactggttttaaaagaggtaaatgtatccatagaccacagtgccttgctttttcctctgccagcacatggagcacgggattagatgcacaaacctatttagggaactattttggtagatgtttgagtttatacagaaattgcagctggtattttattttgctgtacatttactcaacttgtccattagtatttaactatttccagagtttgtttaggagtaagaattgacccattcgttagtttaccatattttttcctggtataaaaaggagccagaaataagccttattgctaaataattaattatgtaagcccacctaggtcctgcataagatccccctcacatacttcacaatatatatgtgtgtgtgtgtgtgtgtgtgtgtgtgtgtgtgtgtgtgtgtatttggctaaaaaattatactgccaaaattactgattataaatacttgactacactgattgatgggacaaaatgattaaagtattttcagggatcttattccatatgtcaccaccaaagatttctacagtgttataaagtatataaatattccaaatttctgtggttaaatatttttttcttttttttccttttttagaataacacagtctgtgctttccaaaaatgcttgaacttttatgttgttaagaaatatataatgatatcttacattaagcatgagtctaatttgtattaattgggatggactaaattttcatttgattatcaggaaaattaaggagttatatatttaaaagcaattttctgtgttttcttctttgtaagttgactcatttgtgaagcaattaggcaaattttgagaagatcattgttattgtggtttgcagtatatatttcttagtaaatatcacttaagattaaatttttcagaaagaaaattatagcttttttcccaaaatatttttaagatttaatctttttgtagtatgctacagatttaattatattaactcttttttaagacattgaccatgacttaacattttgccttctaacaccttttaaatctatgtactttaatagttaagagaaaataagtttgcagatttttaataatctgtttgtaaaaggctatctctaagcctagtatgtgggtaattttacaggtgtgttttttgataactttaatataaaataaactcattttatttgtggcaattcgcgtttctttttttatgccagagtacatatgttggattccatgaattggtattacttattattatgtgttgattaaatatatgcacacacttaggattacagatcacagagcaaattatgaaaatcataaacattctggtatggtcatccataggattatgaaaaagaaatactgaattgttaaatttggatgttagaaaggaaagataggaaaaacaatgagtacagaaatcctcaccatcaatttggatgggttagctgtctcaggcataaaatgtaacacaaaattcagatttatgtatcctggaaatgttctggggttccatctgttttaaagttagacgtctgtctgcctcacatttaagctttagagagaaatcctatgttttaagaagtttctttgtgttacttcattatgacacataatgcgtgttaaggtctttctagatagcattttaaatggaattattttcattttcattatgaggtatatacttgtaatgatctaaagaggttagaaatataaataaaaattc

SEQ ID NO: 5981 - protein, 45 aa, Homo sapiens; identical to SEQ ID NO: 5979

SEQ ID NO: 5982 - DNA, 1123 bp, Homo sapiens
aaaagaaaaaaatatttaaccacagaaatttggaatatttatatactttataacactgtagaaatctttggtggtgacatatggaataagatccctgaaaatactttaatcattttgtcccatcaatcagtgtagtcaagtatttataatcagtaattttggcagtataattttttagccaaatacacacacacacacacacacacacacacacacacacacacacatatatattgtgaagtatgtgagggggatcttatgcaggacctaggtgggcttacataattaattatttagcaataaggcttatttctggctcctttttataccaggaaaaaatatggtaaactaacgaatgggtcaattcttactcctaaacaaactctggaaatagttaaatactaatggacaagttgagtaaatgtacagcaaaataaaataccagctgcaatttctgtataaactcaaacatctaccaaaatagttccctaaataggtttgtgcatctaatcccgtgctccatgtgctggcagaggaaaaagcaaggcactgtggtctatggatacatttacctcttttaaaaccagtagacttaaaaggagaaacaaaaaaagatctgttctaccttaaaagaaacaaaaatgtacaggctaattagacaaagttcaaagaaaagggccccgctaaaacacatgtacaggaaaagaaccaaaatttaagaaatgtagaagagaaagaagagtaaaatgatatcaacagtgtataatgatgtaaggaaagatatcagaggaagcactgtgaatgtgaaaaagtgcagttaaacaggacttgtactacctctttgagactatctttgataaagaattttgagtctagaagtacagagtaataaataatttcttcaatttagaacagtaatatgagtttactaaagaataggtttaatactgggaccagactttagagagataaaatggtggctgggtgcggtgcacgggcctgtagacccagttactcgggaggccgaggcaggagaatcgctcgaacccgggaggcagaggttgtagtgagccgagatcgcgccactgcactccagcctggtgacagagcaagactccgtctc

SEQ ID NO: 5983 - protein, 49 aa, Homo sapiens
MVAGCGARACRPSYSGGRGRRIARTREAEVVVSRDRATALQPGDRARLR

SEQ ID NO: 5984 - DNA, 896 bp, Homo sapiens
caagatggcggcgggccgcttccaaaatgggatggtggcaagcctcttgttctctgacctggggttcttggcctcgcagattccaaggaatgaaatcttgggccatgcgctccccaaatactggcagctgaaaaaaatgagtgaatgaagaaggaggaagccaggggagacaaagaaacaggatacacaacacaggggaaagatgaaaaggactccccaggatggtggtgaagagagttgctaggatgacaactgtgcatcaagcttaaaacccagattggagcgtgtgaaccaagagatatatatggcatcatctttttgaactaaaaatggctgcgtgaacctggcccagtgtttatctgtacttggctttcctgggtcacatgtagatgaagtaccgatctcttctccttcttgggtcagctgaggacagtcattccctccatagggatgttctgctcggacctgttcctgagagctggaggttggtcaaggccatcaagctccagatgatcctcagtgagggataccgctctctcagtattcaagagtcacccttccacagagaagccctagactgcccatcagtggaatatgagagaggtaaaatcctgcccctgtctccttctgacctggctggataccattttcaccaacagattcacccacacagtcaccctgccttgacagctagcaagaggccaagacacacagaacaacgactaccacccctctgacagcaggaagcagttacagaagactgacctttgtccattttcccaaagaattgggtcttggactcttgggggcaggaatgttagagtaggtagttaggcagatgtgaggaaggcaggggaggaccccccaccccaggaatgtcaggcgaccatcacgtg

SEQ ID NO: 5985 - protein, 115 aa, Homo sapiens
MKYRSLLLLGSAEDSHSLHRDVLLGPVPESWRLVKAIKLQMILSEGYRSLSIQESPFHREALDCPSVEYERGKILPLSPSDLAGYHFHQQIHPHSHPALTASKRPRHTEQRLPPL

SEQ ID NO: 5986 - DNA, 7903 bp, Homo sapiens
ggacccgggcggctggcaaaggacgaggcggaggctgaggaaggcagcggggagacccaggctgcagcaacaaagggcagcgagcgattggccgggctgcaggcgagatttgcctgaagacctggataatctccatttttgtcatggactgttaaaacgtttgaagttccaattctggtcttgatttcccagttaaagatgttcttcacccgaatgcagtctttcctgttggtaaaataagacaaccatcaacattgcctgtttgtctgcttttgaatctcttaaggatggatgtttgtaagatgttgcttaatacagtctggaatactctgtccatttgttgaattgtaaatgactttcaaatgtgcaagttctgttaaatacaaagagaacctctatgggtaacttttgtgttgaagaagtcatttgtcaaccatggtaaaacttgcaaacccactttatacagagtggattcttgaagctatacagaaaataaaaaagcaaaagcaaaggccctctgaagagagaatctgccatgcggtcagtacttcccatgggttggataagaagacagtctctgaacagctggaactcagtgttcaggatggctcagttctcaaagtcaccaacaaaggccttgcctcctataaggacccagacaaccctgggcgcttttcatcagttaaaccaggcacttttcctaagtcagccaaggggtctagaggatcatgtaatgatctccgcaatgtggattggaataaacttttaaggagagcaattgaaggacttgaggagccgaatggctcctccctgaagaacatagagaagtatctcagaagtcaaagtgatctcacaagcaccaccaacaacccagcctttcagcagcggctgcgactgggggccaaacgcgctgtgaataatgggaggttactgaaagacggaccgcagtacagggtcaattatgggagcttagatggcaaaggggcacctcagtatcccagtgcattcccatcctcgctcccacctgtcagccttctaccccatgagaaagaccagccccgtgctgatcccattccaatatgtagcttctgtttggggactaaagaatcaaatcgtgaaaagaaaccagaagaactcctctcttgtgcagattgtggcagtagtggacacccatcctgtttgaaattttgtcctgaattaacaacaaatgtaaaggccttaaggtggcagtgcatcgaatgcaagacatgcagtgcctgtagagtccaaggcagaaatgctgataatatgcttttttgtgattcctgtgatagaggatttcatatggaatgctgtgacccaccactttccagaatgccaaaagggatgtggatttgccaagtctgcagaccaaagaaaaagggaagaaaactacttcatgagaaagctgcacaaataaaacgacgatatgcaaaacccattggacgaccgaaaaataaattaaagcaacgattgttgtctgtaaccagtgatgaaggatccatgaatgcattcacaggaagggggtcacctggtaggggtcaaaagactaaagtctgtaccacaccttcatctggtcatgctgcatctgggaaggactcaagcagcagattggctgttacagaccccactcggcctggtgccaccaccaaaatcaccaccacctccacctacatttctgcctctacacttaaagttaacaagaaaaccaaagggctcattgatggccttactaagttttttacaccatcacctgatggtcgcagatcacgaggtgaaattatagacttttcaaagcactatcgtccaaggaaaaaggtctctcagaaacagtcatgcacttctcatgtgttggctacaggtaccacacaaaagctaaaacctccaccttcttcacttccacccccaacccccatctccggtcagagccccagttcacaaaagtccagcacggccacttcttctccctctccccagagttcttccagccagtgcagtgtgccctccctgagcagccttaccactaacagccagctgaaggcactctttgatgggctttctcatatctataccactcagggacagtctcgcaaaaagggacacccgagttatgcaccacccaaacgtatgcgtcgtaaaactgaattatcttccacggcaaaatctaaagcccacttctttggcaaaagagatattagaagtcggtttatttctcactcctcctcctctagctgggggatggctagaggaagtatttttaaagcaattgctcacttcaagcgaacaactttccttaaaaagcacaggatgctaggcagattaaaatataaagtgacccctcagatggggaccccctcaccagggaaggggagcttgacagacggaaggattaaacctgatcaggatgatgatactgaaataaaaataaacatcaaacaagaaagtgcagatgtaaatgtgattggaaacaaggatgtcgttactgaagaggatttggatgtttttaagcaggcccaggaactttcttgggagaaaatagagtgtgagagtggggtggaagactgtggccggtacccttctgtgattgaatttggtaaatatgaaatccaaacctggtactcctcgccttacccacaggaatatgcaagattaccaaagctttacctgtgtgaattctgtcttaaatatatgaaaagtaaaaatattttgctaagacactccaagaagtgtggatggtttcatcctccagcaaatgaaatttaccgaaggaaagacctttcagtatttgaggttgatgggaatatgagcaaaatttattgccaaaacctttgcttgttagccaagctcttcctggaccacaaaacgttgtattatgatgtcgagccattccttttttatgtccttacaaaaaatgatgaaaagggctgtcatctggttggatacttctctaaggaaaagctttgccagcagaagtataatgtctcctgcataatgatcatgccccagcaccaaaggcaaggatttggacggtttctcattgatttcagctatttgctttctagaagagaaggccaagcagggtctcctgaaaagcctctctccgatctgggccgtctctcctacctggcatattggaagagcgtcatcttggagtatctctaccaccaccatgagaggcacatcagcatcaaggcaattagcagagcgacgggcatgtgcccacatgacattgccaccactctgcagcacctccacatgatcgacaagagagatggcagatttgtcatcattagacgggaaaagttgatattgagccacatggaaaagctgaaaacctgttccagagccaatgaacttgatccagacagtctgaggtggaccccaattttaatttctaatgctgcagtgtctgaagaagagcgagaagctgagaaagaggctgagcggctaatggaacaagctagctgctgggagaaggaggaacaagaaatcctgtcaactagagctaacagtaggcaatcacctgcaaaagtacaatcgaaaaataaatatttgcattccccggagagccggccagtcacaggggagcgagggcagctgctggagctgtctaaagagagcagtgaagaagaagaggaggaggaggacgaggaggaggaagaagaggaggaagaagaggaagaggatgaagaggaggaagaagaggaagaagaagaagaagaagaagaaaatattcaaagctctcccccaagattgacgaaaccacagtcagttgccataaagagaaagaggccttttgtactaaagaagaaaaggggtcgtaaacgcaggaggatcaacagcagtgtaacaacagagaccatttcagagacgacagaagtactgaatgagccctttgacaactcagatgaagagaggccaatgccacagctggagcctacctgtgagattgaagtggaggaagatggcaggaagccagtcctgagaaaagcattccagcatcagcctgggaagaaaagacaaacagaggaagaggaaggaaaagacaatcattgcttcaagaatgctgacccttgtagaaacaatatgaatgatgattcaagtaacttgaaagaaggcagtaaagacaatcccgaacctctaaagtgcaaacaagtgtggccaaaaggaacaaagcgcggtctatctaagtggaggcaaaacaaagagaggaagaccggatttaaactgaatttgtacaccccgccagaaacacccatggagcctgacgagcaggtaacagtggaagaacagaaggagacttcagaaggaaaaaccagccccagtcccatcaggattgaggaggaggtcaaggaaactggggaagccctgttgcctcaagaggaaaacagaagggaagaaacatgtgcccctgtaagtccaaacacatcaccaggtgaaaaaccagaagatgatctcatcaaacctgaggaagaggaagaggaggaggaggaggaagaggaagaagaggaagaagaggaaggggaagaagaagaaggaggaggaaatgtagaaaaagatccagatggtgctaaaagccaagaaaaagaggaaccagaaatctccacggaaaaagaagactctgcacgtttggatgatcacgaagaggaggaggaagaggatgaagagccatcccacaacgaggaccatgatgccgatgacgaggatgacagccacatggagtctgccgaagtggagaaggaagagctgcccagagaaagcttcaaagaagtactggaaaaccaggagacttttttagaccttaatgtgcagcctggtcactcgaacccagaggtcttaatggactgtggcgtcgacctgacagcttcttgtaacagtgagcccaaggagcttgctggggaccctgaagctgtacccgaatctgacgaggagccacccccaggagaacaggcacagaagcaggaccaaaagaacagcaaggaagtcgatacagagttcaaagagggaaacccagcaaccatggaaatcgactctgagactgtccaggccgttcagtctttgacccaggagagcagcgaacaggacgacacctttcaggattgtgccgagactcaagaggcctgtagaagcctacagaactacacccgtgcagaccaaagtccacagattgccaccacgctcgacgattgccaacagtcggaccacagtagcccagtttcatccgtccactcccatcctggccagtccgtacgttctgtcaacagcccaagtgtccctgctctggaaaacagctacgcccaaatcagcccagatcaaagtgccatctcagtgccatctctgcagaacatggaaaccagtcccatgatggatgtcccatcagtttcagatcattcacagcaagtcgtagacagtggatttagtgacctgggcagtatcgagagcacaactgagaactacgaaaacccaagcagctacgattctactatgggaggcagcatctgtggaaacggctcttcacagaacagctgctcctatagcaacctcacctccagcagtctgacacagagcagctgtgctgtcacccagcagatgtccaacatcagcgggagctgcagcatgctgcagcaaaccagcatcagctcccctccgacctgcagcgtcaagtctcctcaaggctgtgtggtggagaggcctccgagcagcagccagcagctggctcagtgcagcatggctgctaacttcaccccacccatgcagctggctgaaatccccgagacgagcaacgccaacattggcttatacgagcgaatgggtcagagtgattttggggctgggcattacccgcagccgtcagccaccttcagccttgccaaactgcagcagttaactaatacacttattgatcattcattgccttacagccattccgctgctgtgacttcctatgcaaacagtgcctctttgtccacaccattaagtaacacagggcttgttcaactttctcagtctccacactccgtccctgggggaccccaagcacaagctaccatgaccccaccccccaacctgactcctcctccaatgaatctgccgccgcctcttttgcaacggaacatggctgcatcaaatattggcatctctcacagccaaagactgcaaacccagattgccagcaagggccacatctccatgagaaccaagtcagcgtctctgtcaccagccgctgccacccatcagtcacaaatctatgggcgctcccagactgtagccatgcagggtcctgcacggactttaacgatgcaaagaggcatgaacatgagtgtgaacctgatgccagcgccagcctacaatgtcaactctgtgaacatgaacatgaacactctcaacgccatgaatgggtacagcatgtcccagccaatgatgaacagtggctaccacagcaatcatggctatatgaatcaaacgccccaataccctatgcagatgcagatgggcatgatgggcacccagccatatgcccagcagccaatgcagaccccaccccacggtaacatgatgtacacggcccccggacatcacggctacatgaacacaggcatgtccaaacagtctctcaatggctcctacatgagaaggtagacaacgtgggcagtccacaaaacctacggggcatcactattggattgatctgcacaaatacctttgaagagtacgatttcaaaaccagcaattggtgtgaatgcaaaaacatttgttggcaccatttatttaaaaaaaaaaaaagctgtatgcagcagaaagccttatacaagttgtttttctttttttcctttttcttttttttggtaccttcatttctgttacttttatataaaattctctgcaaaggaaggcctctctttggactacaatttggaggcagccacttgttgtgcctgcttctgttaaacaatgtggatatcaagcccccccaaattatctgttttaatattgaacctagagctttttttttcccttccctgtccactccatgtaaatgcctttagcatttcagttattgtatattttgtttaaggtgacacttcagcatgccgctaatgtctttgttagtgacagtgcattttgtagtactgtacaagtgttgtgctaacagtaagccatttcttaagttttttgccttgattagggtgccctaatttgagggttttaaaaaaaactatatttttgttaattataaaactgtaaagagctataaaagctattcccatttggttagtcaaaagggttttattgctaaatgtttggtgtaaagttgagacccttttccattttggtgacagatttctttggggaaaaaaggcagctttctgttttataaatgcagacttctgtttattgaatgaagcatatctcagtgtttatctgtcaggttttgaaacatttcatatatgtccaaatacttggcaggatttaaaaaaaaatagtgaatttggtgtaaagttgctattttatggaaatgcctctaactttacattttcattccatctgtagatttttctatctttataaaatattggagttattttttaaggaaaaatagaaaagtagcttgtgaatagctcaaactaagcttacaaatcgcatgtaaaaaagcaaaaaagttatttgtgtctgtttatattgcttccttttttgtagcctttgtacctgtacagggtgacagtaagggccaagcaggagaggcgtaatccttgtataaaataggatccagcgacactcttgtatttatctgttctctttttagtcagtcacttcaaaaaaacaaaaaacaaacaaaaaaaagctgtacattttaacataaaataaattatgatgagccattttt

SEQ ID NO: 5987 - protein, 2073 aa, Homo sapiens; identical to SEQ ID NO: 784

SEQ ID NO: 5988 - DNA, 8192 bp, Homo sapiens
ggacccgggcggctggcaaaggacgaggcggaggctgaggaaggcagcggggagacccaggctgcagcaacaaagggcagcgagcgattggccgggctgcaggcgagatttgcctgaagacctggataatctccatttttgtcatggactgttaaaacgtttgaagttccaattctggtcttgatttcccagttaaagatgttcttcacccgaatgcagtctttcctgttggtaaaataagacaaccatcaacattgcctgtttgtctgcttttgaatctcttaaggatggatgtttgtaagatgttgcttaatacagtctggaatactctgtccatttgttgaattgtaaatgactttcaaatgtgcaagttctgttaaatacaaagagaacctctatgggtaacttttgtgttgaagaagtcatttgtcaaccatggtaaaacttgcaaacccactttatacagagtggattcttgaagctatacagaaaataaaaaagcaaaagcaaaggccctctgaagagagaatctgccatgcggtcagtacttcccatgggttggataagaagacagtctctgaacagctggaactcagtgttcaggatggctcagttctcaaagtcaccaacaaaggccttgcctcctataaggacccagacaaccctgggcgcttttcatcagttaaaccaggcacttttcctaagtcagccaaggggtctagaggatcatgtaatgatctccgcaatgtggattggaataaacttttaaggagagcaattgaaggacttgaggagccgaatggctcctccctgaagaacatagagaagtatctcagaagtcaaagtgatctcacaagcaccaccaacaacccagcctttcagcagcggctgcgactgggggccaaacgcgctgtgaataatgggaggttactgaaagacggaccgcagtacagggtcaattatgggagcttagatggcaaaggggcacctcagtatcccagtgcattcccatcctcgctcccacctgtcagccttctaccccatgagaaagaccagccccgtgctgatcccattccaatatgtagcttctgtttggggactaaagaatcaaatcgtgaaaagaaaccagaagaactcctctcttgtgcagattgtggcagtagtggacacccatcctgtttgaaattttgtcctgaattaacaacaaatgtaaaggccttaaggtggcagtgcatcgaatgcaagacatgcagtgcctgtagagtccaaggcagaaatgctgataatatgcttttttgtgattcctgtgatagaggatttcatatggaatgctgtgacccaccactttccagaatgccaaaagggatgtggatttgccaagtctgcagaccaaagaaaaagggaagaaaactacttcatgagaaagctgcacaaataaaacgacgatatgcaaaacccattggacgaccgaaaaataaattaaagcaacgattgttgtctgtaaccagtgatgaaggatccatgaatgcattcacaggaagggggtcacctggtaggggtcaaaagactaaagtctgtaccacaccttcatctggtcatgctgcatctgggaaggactcaagcagcagattggctgttacagaccccactcggcctggtgccaccaccaaaatcaccaccacctccacctacatttctgcctctacacttaaagttaacaagaaaaccaaagggctcattgatggccttactaagttttttacaccatcacctgatggtcgcagatcacgaggtgaaattatagacttttcaaagcactatcgtccaaggaaaaaggtctctcagaaacagtcatgcacttctcatgtgttggctacaggtaccacacaaaagctaaaacctccaccttcttcacttccacccccaacccccatctccggtcagagccccagttcacaaaagtccagcacggccacttcttctccctctccccagagttcttccagccagtgcagtgtgccctccctgagcagccttaccactaacagccagctgaaggcactctttgatgggctttctcatatctataccactcagggacagtctcgcaaaaagggacacccgagttatgcaccacccaaacgtatgcgtcgtaaaactgaattatcttccacggcaaaatctaaagcccacttctttggcaaaagagatattagaagtcggtttatttctcactcctcctcctctagctgggggatggctagaggaagtatttttaaagcaattgctcacttcaagcgaacaactttccttaaaaagcacaggatgctaggcagattaaaatataaagtgacccctcagatggggaccccctcaccagggaaggggagcttgacagacggaaggattaaacctgatcaggatgatgatactgaaataaaaataaacatcaaacaagaaagtgcagatgtaaatgtgattggaaacaaggatgtcgttactgaagaggatttggatgtttttaagcaggcccaggaactttcttgggagaaaatagagtgtgagagtggggtggaagactgtggccggtacccttctgtgattgaatttggtaaatatgaaatccaaacctggtactcctcgccttacccacaggaatatgcaagattaccaaagctttacctgtgtgaattctgtcttaaatatatgaaaagtaaaaatattttgctaagacactccaagaagtgtggatggtttcatcctccagcaaatgaaatttaccgaaggaaagacctttcagtatttgaggttgatgggaatatgagcaaaatttattgccaaaacctttgcttgttagccaagctcttcctggaccacaaaacgttgtattatgatgtcgagccattccttttttatgtccttacaaaaaatgatgaaaagggctgtcatctggttggatacttctctaaggaaaagctttgccagcagaagtataatgtctcctgcataatgatcatgccccagcaccaaaggcaaggatttggacggtttctcattgatttcagctatttgctttctagaagagaaggccaagcagggtctcctgaaaagcctctctccgatctgggccgtctctcctacctggcatattggaagagcgtcatcttggagtatctctaccaccaccatgagaggcacatcagcatcaaggcaattagcagagcgacgggcatgtgcccacatgacattgccaccactctgcagcacctccacatgatcgacaagagagatggcagatttgtcatcattagacgggaaaagttgatattgagccacatggaaaagctgaaaacctgttccagagccaatgaacttgatccagacagtctgaggtggaccccaattttaatttctaatgctgcagtgtctgaagaagagcgagaagctgagaaagaggctgagcggctaatggaacaagctagctgctgggagaaggaggaacaagaaatcctgtcaactagagctaacagtaggcaatcacctgcaaaagtacaatcgaaaaataaatatttgcattccccggagagccggccagtcacaggggagcgagggcagctgctggagctgtctaaagagagcagtgaagaagaagaggaggaggaggacgaggaggaggaagaagaggaggaagaagaggaagaggatgaagaggaggaagaagaggaagaagaagaagaagaagaagaaaatattcaaagctctcccccaagattgacgaaaccacagtcagttgccataaagagaaagaggccttttgtactaaagaagaaaaggggtcgtaaacgcaggaggatcaacagcagtgtaacaacagagaccatttcagagacgacagaagtactgaatgagccctttgacaactcagatgaagagaggccaatgccacagctggagcctacctgtgagattgaagtggaggaagatggcaggaagccagtcctgagaaaagcattccagcatcagcctgggaagaaaagacaaacagaggaagaggaaggaaaagacaatcattgcttcaagaatgctgacccttgtagaaacaatatgaatgatgattcaagtaacttgaaagaaggcagtaaagacaatcccgaacctctaaagtgcaaacaagtgtggccaaaaggaacaaagcgcggtctatctaagtggaggcaaaacaaagagaggaagaccggatttaaactgaatttgtacaccccgccagaaacacccatggagcctgacgagcaggtaacagtggaagaacagaaggagacttcagaaggaaaaaccagccccagtcccatcaggattgaggaggaggtcaaggaaactggggaagccctgttgcctcaagaggaaaacagaagggaagaaacatgtgcccctgtaagtccaaacacatcaccaggtgaaaaaccagaagatgatctcatcaaacctgaggaagaggaagaggaggaggaggaggaagaggaagaagaggaagaagaggaaggggaagaagaagaaggaggaggaaatgtagaaaaagatccagatggtgctaaaagccaagaaaaagaggaaccagaaatctccacggaaaaagaagactctgcacgtttggatgatcacgaagaggaggaggaagaggatgaagagccatcccacaacgaggaccatgatgccgatgacgaggatgacagccacatggagtctgccgaagtggagaaggaagagctgcccagagaaagcttcaaagaagtactggaaaaccaggagacttttttagaccttaatgtgcagcctggtcactcgaacccagaggtcttaatggactgtggcgtcgacctgacagcttcttgtaacagtgagcccaaggagcttgctggggaccctgaagctgtacccgaatctgacgaggagccacccccaggagaacaggcacagaagcaggaccaaaagaacagcaaggaagtcgatacagagttcaaagagggaaacccagcaaccatggaaatcgactctgagactgtccaggccgttcagtctttgacccaggagagcagcgaacaggacgacacctttcaggattgtgccgagactcaagaggcctgtagaagcctacagaactacacccgtgcagaccaaagtccacagattgccaccacgctcgacgattgccaacagtcggaccacagtagcccagtttcatccgtccactcccatcctggccagtccgtacgttctgtcaacagcccaagtgtccctgctctggaaaacagctacgcccaaatcagcccagatcaaagtgccatctcagtgccatctctgcagaacatggaaaccagtcccatgatggatgtcccatcagtttcagatcattcacagcaagtcgtagacagtggatttagtgacctgggcagtatcgagagcacaactgagaactacgaaaacccaagcagctacgattctactatgggaggcagcatctgtggaaacggctcttcacagaacagctgctcctatagcaacctcacctccagcagtctgacacagagcagctgtgctgtcacccagcagatgtccaacatcagcgggagctgcagcatgctgcagcaaaccagcatcagctcccctccgacctgcagcgtcaagtctcctcaaggctgtgtggtggagaggcctccgagcagcagccagcagctggctcagtgcagcatggctgctaacttcaccccacccatgcagctggctgaaatccccgagacgagcaacgccaacattggcttatacgagcgaatgggtcagagtgattttggggctgggcattacccgcagccgtcagccaccttcagccttgccaaactgcagcagttaactaatacacttattgatcattcattgccttacagccattccgctgctgtgacttcctatgcaaacagtgcctctttgtccacaccattaagtaacacagggcttgttcaactttctcagtctccacactccgtccctgggggaccccaagcacaagctaccatgaccccaccccccaacctgactcctcctccaatgaatctgccgccgcctcttttgcaacggaacatggctgcatcaaatattggcatctctcacagccaaagactgcaaacccagattgccagcaagggccacatctccatgagaaccaagtcagcgtctctgtcaccagccgctgccacccatcagtcacaaatctatgggcgctcccagactgtagccatgcagggtcctgcacggactttaacgatgcaaagaggcatgaacatgagtgtgaacctgatgccagcgccagcctacaatgtcaactctgtgaacatgaacatgaacactctcaacgccatgaatgggtacagcatgtcccagccaatgatgaacagtggctaccacagcaatcatggctatatgaatcaaacgccccaataccctatgcagatgcagatgggcatgatgggcacccagccatatgcccagcagccaatgcagaccccaccccacggtaacatgatgtacacggcccccggacatcacggctacatgaacacaggcatgtccaaacagtctctcaatggctcctacatgagaaggtagacaacgtgggcagtccacaaaacctacggggcatcactattggattgatctgcacaaatacctttgaagagtacgatttcaaaaccagcaattggtgtgaatgcaaaaacatttgttggcaccatttatttaaaaaaaaaaaaagctgtatgcagcagaaagccttatacaagttgtttttctttttttcctttttcttttttttggtaccttcatttctgttacttttatataaaattctctgcaaaggaaggcctctctttggactacaatttggaggcagccacttgttgtgcctgcttctgttaaacaatgtggatatcaagcccccccaaattatctgttttaatattgaacctagagctttttttttcccttccctgtccactccatgtaaatgcctttagcatttcagttattgtatattttgtttaaggtgacacttcagcatgccgctaatgtctttgttagtgacagtgcattttgtagtactgtacaagtgttgtgctaacagtaagccatttcttaagttttttgccttgattagggtgccctaatttgagggttttaaaaaaaactatatttttgttaattataaaactgtaaagagctataaaagctattcccatttggttagtcaaaagggttttattgctaaatgtttggtgtaaagttgagacccttttccattttggtgacagatttctttggggaaaaaaggcagctttctgttttataaatgcagacttctgtttattgaatgaagcatatctcagtgtttatctgtcaggttttgaaacatttcatatatgtccaaatacttggcaggatttaaaaaaaaatagtgaatttggtgtaaagttgctattttatggaaatgcctctaactttacattttcattccatctgtagatttttctatctttataaaatattggagttattttttaaggaaaaatagaaaagtagcttgtgaatagctcaaactaagcttacaaatcgcatgtaaaaaagcaaaaaagttatttgtgtctgtttatattgcttccttttttgtagcctttgtacctgtacagggtgacagtaagggccaagcaggagaggcgtaatccttgtataaaataggatccagcgacactcttgtatttatctgttctctttttagtcagtcacttcaaaaaaacaaaaaacaaacaaaaaaaagctgtacattttaacataaaataaattatgatgagccatttttagcctcttgtgtcctgtcatattatgattgatagagaatgaccaatggaactgtatcatgtgtcacgcctcagaacacatacacattttgggaaaataaattatttagtgtaaattggagttatgggattttctgatttgttttgactttgggggaggggttggcaataaataagagtaatatctaataaaaccatcacatataccaaatacctatttaataaattaatttataatggattttaatgcttttcatgaaagtttattttatgcgagtgcataccttctgt

SEQ ID NO: 5989 - protein, 2073 aa, Homo sapiens; identical to SEQ ID NO: 784

SEQ ID NO: 5990 - DNA, 7961 bp, Homo sapiens
caacgacaacaacagggggacacaaaatggcggcggcttagctcctacccctggcggcggcggcagcggtggcggaggcgacggcacctcctccaggcggcagccgcagtttctcaggcagcggcagcgcccccggcaggcgcggtggcggtggcgcgcagccagatttgcctgaagacctggataatctccatttttgtcatggactgttaaaacgtttgaagttccaattctggtcttgatttcccagttaaagatgttcttcacccgaatgcagtctttcctgttggtaaaataagacaaccatcaacattgcctgtttgtctgcttttgaatctcttaaggatggatgtttgtaagatgttgcttaatacagtctggaatactctgtccatttgttgaattgtaaatgactttcaaatgtgcaagttctgttaaatacaaagagaacctctatgggtaacttttgtgttgaagaagtcatttgtcaaccatggtaaaacttgcaaacccactttatacagagtggattcttgaagctatacagaaaataaaaaagcaaaagcaaaggccctctgaagagagaatctgccatgcggtcagtacttcccatgggttggataagaagacagtctctgaacagctggaactcagtgttcaggatggctcagttctcaaagtcaccaacaaaggccttgcctcctataaggacccagacaaccctgggcgcttttcatcagttaaaccaggcacttttcctaagtcagccaaggggtctagaggatcatgtaatgatctccgcaatgtggattggaataaacttttaaggagagcaattgaaggacttgaggagccgaatggctcctccctgaagaacatagagaagtatctcagaagtcaaagtgatctcacaagcaccaccaacaacccagcctttcagcagcggctgcgactgggggccaaacgcgctgtgaataatgggaggttactgaaagacggaccgcagtacagggtcaattatgggagcttagatggcaaaggggcacctcagtatcccagtgcattcccatcctcgctcccacctgtcagccttctaccccatgagaaagaccagccccgtgctgatcccattccaatatgtagcttctgtttggggactaaagaatcaaatcgtgaaaagaaaccagaagaactcctctcttgtgcagattgtggcagtagtggacacccatcctgtttgaaattttgtcctgaattaacaacaaatgtaaaggccttaaggtggcagtgcatcgaatgcaagacatgcagtgcctgtagagtccaaggcagaaatgctgataatatgcttttttgtgattcctgtgatagaggatttcatatggaatgctgtgacccaccactttccagaatgccaaaagggatgtggatttgccaagtctgcagaccaaagaaaaagggaagaaaactacttcatgagaaagctgcacaaataaaacgacgatatgcaaaacccattggacgaccgaaaaataaattaaagcaacgattgttgtctgtaaccagtgatgaaggatccatgaatgcattcacaggaagggggtcacctggtaggggtcaaaagactaaagtctgtaccacaccttcatctggtcatgctgcatctgggaaggactcaagcagcagattggctgttacagaccccactcggcctggtgccaccaccaaaatcaccaccacctccacctacatttctgcctctacacttaaagttaacaagaaaaccaaagggctcattgatggccttactaagttttttacaccatcacctgatggtcgcagatcacgaggtgaaattatagacttttcaaagcactatcgtccaaggaaaaaggtctctcagaaacagtcatgcacttctcatgtgttggctacaggtaccacacaaaagctaaaacctccaccttcttcacttccacccccaacccccatctccggtcagagccccagttcacaaaagtccagcacggccacttcttctccctctccccagagttcttccagccagtgcagtgtgccctccctgagcagccttaccactaacagccagctgaaggcactctttgatgggctttctcatatctataccactcagggacagtctcgcaaaaagggacacccgagttatgcaccacccaaacgtatgcgtcgtaaaactgaattatcttccacggcaaaatctaaagcccacttctttggcaaaagagatattagaagtcggtttatttctcactcctcctcctctagctgggggatggctagaggaagtatttttaaagcaattgctcacttcaagcgaacaactttccttaaaaagcacaggatgctaggcagattaaaatataaagtgacccctcagatggggaccccctcaccagggaaggggagcttgacagacggaaggattaaacctgatcaggatgatgatactgaaataaaaataaacatcaaacaagaaagtgcagatgtaaatgtgattggaaacaaggatgtcgttactgaagaggatttggatgtttttaagcaggcccaggaactttcttgggagaaaatagagtgtgagagtggggtggaagactgtggccggtacccttctgtgattgaatttggtaaatatgaaatccaaacctggtactcctcgccttacccacaggaatatgcaagattaccaaagctttacctgtgtgaattctgtcttaaatatatgaaaagtaaaaatattttgctaagacactccaagaagtgtggatggtttcatcctccagcaaatgaaatttaccgaaggaaagacctttcagtatttgaggttgatgggaatatgagcaaaatttattgccaaaacctttgcttgttagccaagctcttcctggaccacaaaacgttgtattatgatgtcgagccattccttttttatgtccttacaaaaaatgatgaaaagggctgtcatctggttggatacttctctaaggaaaagctttgccagcagaagtataatgtctcctgcataatgatcatgccccagcaccaaaggcaaggatttggacggtttctcattgatttcagctatttgctttctagaagagaaggccaagcagggtctcctgaaaagcctctctccgatctgggccgtctctcctacctggcatattggaagagcgtcatcttggagtatctctaccaccaccatgagaggcacatcagcatcaaggcaattagcagagcgacgggcatgtgcccacatgacattgccaccactctgcagcacctccacatgatcgacaagagagatggcagatttgtcatcattagacgggaaaagttgatattgagccacatggaaaagctgaaaacctgttccagagccaatgaacttgatccagacagtctgaggtggaccccaattttaatttctaatgctgcagtgtctgaagaagagcgagaagctgagaaagaggctgagcggctaatggaacaagctagctgctgggagaaggaggaacaagaaatcctgtcaactagagctaacagtaggcaatcacctgcaaaagtacaatcgaaaaataaatatttgcattccccggagagccggccagtcacaggggagcgagggcagctgctggagctgtctaaagagagcagtgaagaagaagaggaggaggaggacgaggaggaggaagaagaggaggaagaagaggaagaggatgaagaggaggaagaagaggaagaagaagaagaagaagaagaaaatattcaaagctctcccccaagattgacgaaaccacagtcagttgccataaagagaaagaggccttttgtactaaagaagaaaaggggtcgtaaacgcaggaggatcaacagcagtgtaacaacagagaccatttcagagacgacagaagtactgaatgagccctttgacaactcagatgaagagaggccaatgccacagctggagcctacctgtgagattgaagtggaggaagatggcaggaagccagtcctgagaaaagcattccagcatcagcctgggaagaaaagacaaacagaggaagaggaaggaaaagacaatcattgcttcaagaatgctgacccttgtagaaacaatatgaatgatgattcaagtaacttgaaagaaggcagtaaagacaatcccgaacctctaaagtgcaaacaagtgtggccaaaaggaacaaagcgcggtctatctaagtggaggcaaaacaaagagaggaagaccggatttaaactgaatttgtacaccccgccagaaacacccatggagcctgacgagcaggtaacagtggaagaacagaaggagacttcagaaggaaaaaccagccccagtcccatcaggattgaggaggaggtcaaggaaactggggaagccctgttgcctcaagaggaaaacagaagggaagaaacatgtgcccctgtaagtccaaacacatcaccaggtgaaaaaccagaagatgatctcatcaaacctgaggaagaggaagaggaggaggaggaggaagaggaagaagaggaagaagaggaaggggaagaagaagaaggaggaggaaatgtagaaaaagatccagatggtgctaaaagccaagaaaaagaggaaccagaaatctccacggaaaaagaagactctgcacgtttggatgatcacgaagaggaggaggaagaggatgaagagccatcccacaacgaggaccatgatgccgatgacgaggatgacagccacatggagtctgccgaagtggagaaggaagagctgcccagagaaagcttcaaagaagtactggaaaaccaggagacttttttagaccttaatgtgcagcctggtcactcgaacccagaggtcttaatggactgtggcgtcgacctgacagcttcttgtaacagtgagcccaaggagcttgctggggaccctgaagctgtacccgaatctgacgaggagccacccccaggagaacaggcacagaagcaggaccaaaagaacagcaaggaagtcgatacagagttcaaagagggaaacccagcaaccatggaaatcgactctgagactgtccaggccgttcagtctttgacccaggagagcagcgaacaggacgacacctttcaggattgtgccgagactcaagaggcctgtagaagcctacagaactacacccgtgcagaccaaagtccacagattgccaccacgctcgacgattgccaacagtcggaccacagtagcccagtttcatccgtccactcccatcctggccagtccgtacgttctgtcaacagcccaagtgtccctgctctggaaaacagctacgcccaaatcagcccagatcaaagtgccatctcagtgccatctctgcagaacatggaaaccagtcccatgatggatgtcccatcagtttcagatcattcacagcaagtcgtagacagtggatttagtgacctgggcagtatcgagagcacaactgagaactacgaaaacccaagcagctacgattctactatgggaggcagcatctgtggaaacggctcttcacagaacagctgctcctatagcaacctcacctccagcagtctgacacagagcagctgtgctgtcacccagcagatgtccaacatcagcgggagctgcagcatgctgcagcaaaccagcatcagctcccctccgacctgcagcgtcaagtctcctcaaggctgtgtggtggagaggcctccgagcagcagccagcagctggctcagtgcagcatggctgctaacttcaccccacccatgcagctggctgaaatccccgagacgagcaacgccaacattggcttatacgagcgaatgggtcagagtgattttggggctgggcattacccgcagccgtcagccaccttcagccttgccaaactgcagcagttaactaatacacttattgatcattcattgccttacagccattccgctgctgtgacttcctatgcaaacagtgcctctttgtccacaccattaagtaacacagggcttgttcaactttctcagtctccacactccgtccctgggggaccccaagcacaagctaccatgaccccaccccccaacctgactcctcctccaatgaatctgccgccgcctcttttgcaacggaacatggctgcatcaaatattggcatctctcacagccaaagactgcaaacccagattgccagcaagggccacatctccatgagaaccaagtcagcgtctctgtcaccagccgctgccacccatcagtcacaaatctatgggcgctcccagactgtagccatgcagggtcctgcacggactttaacgatgcaaagaggcatgaacatgagtgtgaacctgatgccagcgccagcctacaatgtcaactctgtgaacatgaacatgaacactctcaacgccatgaatgggtacagcatgtcccagccaatgatgaacagtggctaccacagcaatcatggctatatgaatcaaacgccccaataccctatgcagatgcagatgggcatgatgggcacccagccatatgcccagcagccaatgcagaccccaccccacggtaacatgatgtacacggcccccggacatcacggctacatgaacacaggcatgtccaaacagtctctcaatggctcctacatgagaaggtagacaacgtgggcagtccacaaaacctacggggcatcactattggattgatctgcacaaatacctttgaagagtacgatttcaaaaccagcaattggtgtgaatgcaaaaacatttgttggcaccatttatttaaaaaaaaaaaaagctgtatgcagcagaaagccttatacaagttgtttttctttttttcctttttcttttttttggtaccttcatttctgttacttttatataaaattctctgcaaaggaaggcctctctttggactacaatttggaggcagccacttgttgtgcctgcttctgttaaacaatgtggatatcaagcccccccaaattatctgttttaatattgaacctagagctttttttttcccttccctgtccactccatgtaaatgcctttagcatttcagttattgtatattttgtttaaggtgacacttcagcatgccgctaatgtctttgttagtgacagtgcattttgtagtactgtacaagtgttgtgctaacagtaagccatttcttaagttttttgccttgattagggtgccctaatttgagggttttaaaaaaaactatatttttgttaattataaaactgtaaagagctataaaagctattcccatttggttagtcaaaagggttttattgctaaatgtttggtgtaaagttgagacccttttccattttggtgacagatttctttggggaaaaaaggcagctttctgttttataaatgcagacttctgtttattgaatgaagcatatctcagtgtttatctgtcaggttttgaaacatttcatatatgtccaaatacttggcaggatttaaaaaaaaatagtgaatttggtgtaaagttgctattttatggaaatgcctctaactttacattttcattccatctgtagatttttctatctttataaaatattggagttattttttaaggaaaaatagaaaagtagcttgtgaatagctcaaactaagcttacaaatcgcatgtaaaaaagcaaaaaagttatttgtgtctgtttatattgcttccttttttgtagcctttgtacctgtacagggtgacagtaagggccaagcaggagaggcgtaatccttgtataaaataggatccagcgacactcttgtatttatctgttctctttttagtcagtcacttcaaaaaaacaaaaaacaaacaaaaaaaagctgtacattttaacataaaataaattatgatgagccattttt

SEQ ID NO: 5991 - protein, 2073 aa, Homo sapiens; identical to SEQ ID NO: 784

SEQ ID NO: 5992 - DNA, 8192 bp, Homo sapiens; identical to SEQ ID NO: 783

SEQ ID NO: 5993 - protein, 2073 aa, Homo sapiens; identical to SEQ ID NO: 784

SEQ ID NO: 5994 - DNA, 7872 bp, Homo sapiens
acacaaaatggcggcggcttagctcctacccctggcggcggcggcagcggtggcggaggcgacggcacctcctccaggcggcagccgcagtttctcaggcagcggcagcgcccccggcaggcgcggtggcggtggcgcgcagccaggtcttgatttcccagttaaagatgttcttcacccgaatgcagtctttcctgttggtaaaataagacaaccatcaacattgcctgtttgtctgcttttgaatctcttaaggatggatgtttgtaagatgttgcttaatacagtctggaatactctgtccatttgttgaattgtaaatgactttcaaatgtgcaagttctgttaaatacaaagagaacctctatgggtaacttttgtgttgaagaagtcatttgtcaaccatggtaaaacttgcaaacccactttatacagagtggattcttgaagctatacagaaaataaaaaagcaaaagcaaaggccctctgaagagagaatctgccatgcggtcagtacttcccatgggttggataagaagacagtctctgaacagctggaactcagtgttcaggatggctcagttctcaaagtcaccaacaaaggccttgcctcctataaggacccagacaaccctgggcgcttttcatcagttaaaccaggcacttttcctaagtcagccaaggggtctagaggatcatgtaatgatctccgcaatgtggattggaataaacttttaaggagagcaattgaaggacttgaggagccgaatggctcctccctgaagaacatagagaagtatctcagaagtcaaagtgatctcacaagcaccaccaacaacccagcctttcagcagcggctgcgactgggggccaaacgcgctgtgaataatgggaggttactgaaagacggaccgcagtacagggtcaattatgggagcttagatggcaaaggggcacctcagtatcccagtgcattcccatcctcgctcccacctgtcagccttctaccccatgagaaagaccagccccgtgctgatcccattccaatatgtagcttctgtttggggactaaagaatcaaatcgtgaaaagaaaccagaagaactcctctcttgtgcagattgtggcagtagtggacacccatcctgtttgaaattttgtcctgaattaacaacaaatgtaaaggccttaaggtggcagtgcatcgaatgcaagacatgcagtgcctgtagagtccaaggcagaaatgctgataatatgcttttttgtgattcctgtgatagaggatttcatatggaatgctgtgacccaccactttccagaatgccaaaagggatgtggatttgccaagtctgcagaccaaagaaaaagggaagaaaactacttcatgagaaagctgcacaaataaaacgacgatatgcaaaacccattggacgaccgaaaaataaattaaagcaacgattgttgtctgtaaccagtgatgaaggatccatgaatgcattcacaggaagggggtcacctggtaggggtcaaaagactaaagtctgtaccacaccttcatctggtcatgctgcatctgggaaggactcaagcagcagattggctgttacagaccccactcggcctggtgccaccaccaaaatcaccaccacctccacctacatttctgcctctacacttaaagttaacaagaaaaccaaagggctcattgatggccttactaagttttttacaccatcacctgatggtcgcagatcacgaggtgaaattatagacttttcaaagcactatcgtccaaggaaaaaggtctctcagaaacagtcatgcacttctcatgtgttggctacaggtaccacacaaaagctaaaacctccaccttcttcacttccacccccaacccccatctccggtcagagccccagttcacaaaagtccagcacggccacttcttctccctctccccagagttcttccagccagtgcagtgtgccctccctgagcagccttaccactaacagccagctgaaggcactctttgatgggctttctcatatctataccactcagggacagtctcgcaaaaagggacacccgagttatgcaccacccaaacgtatgcgtcgtaaaactgaattatcttccacggcaaaatctaaagcccacttctttggcaaaagagatattagaagtcggtttatttctcactcctcctcctctagctgggggatggctagaggaagtatttttaaagcaattgctcacttcaagcgaacaactttccttaaaaagcacaggatgctaggcagattaaaatataaagtgacccctcagatggggaccccctcaccagggaaggggagcttgacagacggaaggattaaacctgatcaggatgatgatactgaaataaaaataaacatcaaacaagaaagtgcagatgtaaatgtgattggaaacaaggatgtcgttactgaagaggatttggatgtttttaagcaggcccaggaactttcttgggagaaaatagagtgtgagagtggggtggaagactgtggccggtacccttctgtgattgaatttggtaaatatgaaatccaaacctggtactcctcgccttacccacaggaatatgcaagattaccaaagctttacctgtgtgaattctgtcttaaatatatgaaaagtaaaaatattttgctaagacactccaagaagtgtggatggtttcatcctccagcaaatgaaatttaccgaaggaaagacctttcagtatttgaggttgatgggaatatgagcaaaatttattgccaaaacctttgcttgttagccaagctcttcctggaccacaaaacgttgtattatgatgtcgagccattccttttttatgtccttacaaaaaatgatgaaaagggctgtcatctggttggatacttctctaaggaaaagctttgccagcagaagtataatgtctcctgcataatgatcatgccccagcaccaaaggcaaggatttggacggtttctcattgatttcagctatttgctttctagaagagaaggccaagcagggtctcctgaaaagcctctctccgatctgggccgtctctcctacctggcatattggaagagcgtcatcttggagtatctctaccaccaccatgagaggcacatcagcatcaaggcaattagcagagcgacgggcatgtgcccacatgacattgccaccactctgcagcacctccacatgatcgacaagagagatggcagatttgtcatcattagacgggaaaagttgatattgagccacatggaaaagctgaaaacctgttccagagccaatgaacttgatccagacagtctgaggtggaccccaattttaatttctaatgctgcagtgtctgaagaagagcgagaagctgagaaagaggctgagcggctaatggaacaagctagctgctgggagaaggaggaacaagaaatcctgtcaactagagctaacagtaggcaatcacctgcaaaagtacaatcgaaaaataaatatttgcattccccggagagccggccagtcacaggggagcgagggcagctgctggagctgtctaaagagagcagtgaagaagaagaggaggaggaggacgaggaggaggaagaagaggaggaagaagaggaagaggatgaagaggaggaagaagaggaagaagaagaagaagaagaagaaaatattcaaagctctcccccaagattgacgaaaccacagtcagttgccataaagagaaagaggccttttgtactaaagaagaaaaggggtcgtaaacgcaggaggatcaacagcagtgtaacaacagagaccatttcagagacgacagaagtactgaatgagccctttgacaactcagatgaagagaggccaatgccacagctggagcctacctgtgagattgaagtggaggaagatggcaggaagccagtcctgagaaaagcattccagcatcagcctgggaagaaaagacaaacagaggaagaggaaggaaaagacaatcattgcttcaagaatgctgacccttgtagaaacaatatgaatgatgattcaagtaacttgaaagaaggcagtaaagacaatcccgaacctctaaagtgcaaacaagtgtggccaaaaggaacaaagcgcggtctatctaagtggaggcaaaacaaagagaggaagaccggatttaaactgaatttgtacaccccgccagaaacacccatggagcctgacgagcaggtaacagtggaagaacagaaggagacttcagaaggaaaaaccagccccagtcccatcaggattgaggaggaggtcaaggaaactggggaagccctgttgcctcaagaggaaaacagaagggaagaaacatgtgcccctgtaagtccaaacacatcaccaggtgaaaaaccagaagatgatctcatcaaacctgaggaagaggaagaggaggaggaggaggaagaggaagaagaggaagaagaggaaggggaagaagaagaaggaggaggaaatgtagaaaaagatccagatggtgctaaaagccaagaaaaagaggaaccagaaatctccacggaaaaagaagactctgcacgtttggatgatcacgaagaggaggaggaagaggatgaagagccatcccacaacgaggaccatgatgccgatgacgaggatgacagccacatggagtctgccgaagtggagaaggaagagctgcccagagaaagcttcaaagaagtactggaaaaccaggagacttttttagaccttaatgtgcagcctggtcactcgaacccagaggtcttaatggactgtggcgtcgacctgacagcttcttgtaacagtgagcccaaggagcttgctggggaccctgaagctgtacccgaatctgacgaggagccacccccaggagaacaggcacagaagcaggaccaaaagaacagcaaggaagtcgatacagagttcaaagagggaaacccagcaaccatggaaatcgactctgagactgtccaggccgttcagtctttgacccaggagagcagcgaacaggacgacacctttcaggattgtgccgagactcaagaggcctgtagaagcctacagaactacacccgtgcagaccaaagtccacagattgccaccacgctcgacgattgccaacagtcggaccacagtagcccagtttcatccgtccactcccatcctggccagtccgtacgttctgtcaacagcccaagtgtccctgctctggaaaacagctacgcccaaatcagcccagatcaaagtgccatctcagtgccatctctgcagaacatggaaaccagtcccatgatggatgtcccatcagtttcagatcattcacagcaagtcgtagacagtggatttagtgacctgggcagtatcgagagcacaactgagaactacgaaaacccaagcagctacgattctactatgggaggcagcatctgtggaaacggctcttcacagaacagctgctcctatagcaacctcacctccagcagtctgacacagagcagctgtgctgtcacccagcagatgtccaacatcagcgggagctgcagcatgctgcagcaaaccagcatcagctcccctccgacctgcagcgtcaagtctcctcaaggctgtgtggtggagaggcctccgagcagcagccagcagctggctcagtgcagcatggctgctaacttcaccccacccatgcagctggctgaaatccccgagacgagcaacgccaacattggcttatacgagcgaatgggtcagagtgattttggggctgggcattacccgcagccgtcagccaccttcagccttgccaaactgcagcagttaactaatacacttattgatcattcattgccttacagccattccgctgctgtgacttcctatgcaaacagtgcctctttgtccacaccattaagtaacacagggcttgttcaactttctcagtctccacactccgtccctgggggaccccaagcacaagctaccatgaccccaccccccaacctgactcctcctccaatgaatctgccgccgcctcttttgcaacggaacatggctgcatcaaatattggcatctctcacagccaaagactgcaaacccagattgccagcaagggccacatctccatgagaaccaagtcagcgtctctgtcaccagccgctgccacccatcagtcacaaatctatgggcgctcccagactgtagccatgcagggtcctgcacggactttaacgatgcaaagaggcatgaacatgagtgtgaacctgatgccagcgccagcctacaatgtcaactctgtgaacatgaacatgaacactctcaacgccatgaatgggtacagcatgtcccagccaatgatgaacagtggctaccacagcaatcatggctatatgaatcaaacgccccaataccctatgcagatgcagatgggcatgatgggcacccagccatatgcccagcagccaatgcagaccccaccccacggtaacatgatgtacacggcccccggacatcacggctacatgaacacaggcatgtccaaacagtctctcaatggctcctacatgagaaggtagacaacgtgggcagtccacaaaacctacggggcatcactattggattgatctgcacaaatacctttgaagagtacgatttcaaaaccagcaattggtgtgaatgcaaaaacatttgttggcaccatttatttaaaaaaaaaaaaagctgtatgcagcagaaagccttatacaagttgtttttctttttttcctttttcttttttttggtaccttcatttctgttacttttatataaaattctctgcaaaggaaggcctctctttggactacaatttggaggcagccacttgttgtgcctgcttctgttaaacaatgtggatatcaagcccccccaaattatctgttttaatattgaacctagagctttttttttcccttccctgtccactccatgtaaatgcctttagcatttcagttattgtatattttgtttaaggtgacacttcagcatgccgctaatgtctttgttagtgacagtgcattttgtagtactgtacaagtgttgtgctaacagtaagccatttcttaagttttttgccttgattagggtgccctaatttgagggttttaaaaaaaactatatttttgttaattataaaactgtaaagagctataaaagctattcccatttggttagtcaaaagggttttattgctaaatgtttggtgtaaagttgagacccttttccattttggtgacagatttctttggggaaaaaaggcagctttctgttttataaatgcagacttctgtttattgaatgaagcatatctcagtgtttatctgtcaggttttgaaacatttcatatatgtccaaatacttggcaggatttaaaaaaaaatagtgaatttggtgtaaagttgctattttatggaaatgcctctaactttacattttcattccatctgtagatttttctatctttataaaatattggagttattttttaaggaaaaatagaaaagtagcttgtgaatagctcaaactaagcttacaaatcgcatgtaaaaaagcaaaaaagttatttgtgtctgtttatattgcttccttttttgtagcctttgtacctgtacagggtgacagtaagggccaagcaggagaggcgtaatccttgtataaaataggatccagcgacactcttgtatttatctgttctctttttagtcagtcacttcaaaaaaacaaaaaacaaacaaaaaaaagctgtacattttaacataaaataaattatgatgagccattttt

SEQ ID NO: 5995 - protein, 2073 aa, Homo sapiens; identical to SEQ ID NO: 784

SEQ ID NO: 5996 - DNA, 8192 bp, Homo sapiens
acacaaaatggcggcggcttagctcctacccctggcggcggcggcagcggtggcggaggcgacggcacctcctccaggcggcagccgcagtttctcaggcagcggcagcgcccccggcaggcgcggtggcggtggcgcgcagccaggtcttgatttcccagttaaagatgttcttcacccgaatgcagtctttcctgttggtaaaataagacaaccatcaacattgcctgtttgtctgcttttgaatctcttaaggatggatgtttgtaagatgttgcttaatacagtctggaatactctgtccatttgttgaattgtaaatgactttcaaatgtgcaagttctgttaaatacaaagagaacctctatgggtaacttttgtgttgaagaagtcatttgtcaaccatggtaaaacttgcaaacccactttatacagagtggattcttgaagctatacagaaaataaaaaagcaaaagcaaaggccctctgaagagagaatctgccatgcggtcagtacttcccatgggttggataagaagacagtctctgaacagctggaactcagtgttcaggatggctcagttctcaaagtcaccaacaaaggccttgcctcctataaggacccagacaaccctgggcgcttttcatcagttaaaccaggcacttttcctaagtcagccaaggggtctagaggatcatgtaatgatctccgcaatgtggattggaataaacttttaaggagagcaattgaaggacttgaggagccgaatggctcctccctgaagaacatagagaagtatctcagaagtcaaagtgatctcacaagcaccaccaacaacccagcctttcagcagcggctgcgactgggggccaaacgcgctgtgaataatgggaggttactgaaagacggaccgcagtacagggtcaattatgggagcttagatggcaaaggggcacctcagtatcccagtgcattcccatcctcgctcccacctgtcagccttctaccccatgagaaagaccagccccgtgctgatcccattccaatatgtagcttctgtttggggactaaagaatcaaatcgtgaaaagaaaccagaagaactcctctcttgtgcagattgtggcagtagtggacacccatcctgtttgaaattttgtcctgaattaacaacaaatgtaaaggccttaaggtggcagtgcatcgaatgcaagacatgcagtgcctgtagagtccaaggcagaaatgctgataatatgcttttttgtgattcctgtgatagaggatttcatatggaatgctgtgacccaccactttccagaatgccaaaagggatgtggatttgccaagtctgcagaccaaagaaaaagggaagaaaactacttcatgagaaagctgcacaaataaaacgacgatatgcaaaacccattggacgaccgaaaaataaattaaagcaacgattgttgtctgtaaccagtgatgaaggatccatgaatgcattcacaggaagggggtcacctggtaggggtcaaaagactaaagtctgtaccacaccttcatctggtcatgctgcatctgggaaggactcaagcagcagattggctgttacagaccccactcggcctggtgccaccaccaaaatcaccaccacctccacctacatttctgcctctacacttaaagttaacaagaaaaccaaagggctcattgatggccttactaagttttttacaccatcacctgatggtcgcagatcacgaggtgaaattatagacttttcaaagcactatcgtccaaggaaaaaggtctctcagaaacagtcatgcacttctcatgtgttggctacaggtaccacacaaaagctaaaacctccaccttcttcacttccacccccaacccccatctccggtcagagccccagttcacaaaagtccagcacggccacttcttctccctctccccagagttcttccagccagtgcagtgtgccctccctgagcagccttaccactaacagccagctgaaggcactctttgatgggctttctcatatctataccactcagggacagtctcgcaaaaagggacacccgagttatgcaccacccaaacgtatgcgtcgtaaaactgaattatcttccacggcaaaatctaaagcccacttctttggcaaaagagatattagaagtcggtttatttctcactcctcctcctctagctgggggatggctagaggaagtatttttaaagcaattgctcacttcaagcgaacaactttccttaaaaagcacaggatgctaggcagattaaaatataaagtgacccctcagatggggaccccctcaccagggaaggggagcttgacagacggaaggattaaacctgatcaggatgatgatactgaaataaaaataaacatcaaacaagaaagtgcagatgtaaatgtgattggaaacaaggatgtcgttactgaagaggatttggatgtttttaagcaggcccaggaactttcttgggagaaaatagagtgtgagagtggggtggaagactgtggccggtacccttctgtgattgaatttggtaaatatgaaatccaaacctggtactcctcgccttacccacaggaatatgcaagattaccaaagctttacctgtgtgaattctgtcttaaatatatgaaaagtaaaaatattttgctaagacactccaagaagtgtggatggtttcatcctccagcaaatgaaatttaccgaaggaaagacctttcagtatttgaggttgatgggaatatgagcaaaatttattgccaaaacctttgcttgttagccaagctcttcctggaccacaaaacgttgtattatgatgtcgagccattccttttttatgtccttacaaaaaatgatgaaaagggctgtcatctggttggatacttctctaaggaaaagctttgccagcagaagtataatgtctcctgcataatgatcatgccccagcaccaaaggcaaggatttggacggtttctcattgatttcagctatttgctttctagaagagaaggccaagcagggtctcctgaaaagcctctctccgatctgggccgtctctcctacctggcatattggaagagcgtcatcttggagtatctctaccaccaccatgagaggcacatcagcatcaaggcaattagcagagcgacgggcatgtgcccacatgacattgccaccactctgcagcacctccacatgatcgacaagagagatggcagatttgtcatcattagacgggaaaagttgatattgagccacatggaaaagctgaaaacctgttccagagccaatgaacttgatccagacagtctgaggtggaccccaattttaatttctaatgctgcagtgtctgaagaagagcgagaagctgagaaagaggctgagcggctaatggaacaagctagctgctgggagaaggaggaacaagaaatcctgtcaactagagctaacagtaggcaatcacctgcaaaagtacaatcgaaaaataaatatttgcattccccggagagccggccagtcacaggggagcgagggcagctgctggagctgtctaaagagagcagtgaagaagaagaggaggaggaggacgaggaggaggaagaagaggaggaagaagaggaagaggatgaagaggaggaagaagaggaagaagaagaagaagaagaagaaaatattcaaagctctcccccaagattgacgaaaccacagtcagttgccataaagagaaagaggccttttgtactaaagaagaaaaggggtcgtaaacgcaggaggatcaacagcagtgtaacaacagagaccatttcagagacgacagaagtactgaatgagccctttgacaactcagatgaagagaggccaatgccacagctggagcctacctgtgagattgaagtggaggaagatggcaggaagccagtcctgagaaaagcattccagcatcagcctgggaagaaaagacaaacagaggaagaggaaggaaaagacaatcattgcttcaagaatgctgacccttgtagaaacaatatgaatgatgattcaagtaacttgaaagaaggcagtaaagacaatcccgaacctctaaagtgcaaacaagtgtggccaaaaggaacaaagcgcggtctatctaagtggaggcaaaacaaagagaggaagaccggatttaaactgaatttgtacaccccgccagaaacacccatggagcctgacgagcaggtaacagtggaagaacagaaggagacttcagaaggaaaaaccagccccagtcccatcaggattgaggaggaggtcaaggaaactggggaagccctgttgcctcaagaggaaaacagaagggaagaaacatgtgcccctgtaagtccaaacacatcaccaggtgaaaaaccagaagatgatctcatcaaacctgaggaagaggaagaggaggaggaggaggaagaggaagaagaggaagaagaggaaggggaagaagaagaaggaggaggaaatgtagaaaaagatccagatggtgctaaaagccaagaaaaagaggaaccagaaatctccacggaaaaagaagactctgcacgtttggatgatcacgaagaggaggaggaagaggatgaagagccatcccacaacgaggaccatgatgccgatgacgaggatgacagccacatggagtctgccgaagtggagaaggaagagctgcccagagaaagcttcaaagaagtactggaaaaccaggagacttttttagaccttaatgtgcagcctggtcactcgaacccagaggtcttaatggactgtggcgtcgacctgacagcttcttgtaacagtgagcccaaggagcttgctggggaccctgaagctgtacccgaatctgacgaggagccacccccaggagaacaggcacagaagcaggaccaaaagaacagcaaggaagtcgatacagagttcaaagagggaaacccagcaaccatggaaatcgactctgagactgtccaggccgttcagtctttgacccaggagagcagcgaacaggacgacacctttcaggattgtgccgagactcaagaggcctgtagaagcctacagaactacacccgtgcagaccaaagtccacagattgccaccacgctcgacgattgccaacagtcggaccacagtagcccagtttcatccgtccactcccatcctggccagtccgtacgttctgtcaacagcccaagtgtccctgctctggaaaacagctacgcccaaatcagcccagatcaaagtgccatctcagtgccatctctgcagaacatggaaaccagtcccatgatggatgtcccatcagtttcagatcattcacagcaagtcgtagacagtggatttagtgacctgggcagtatcgagagcacaactgagaactacgaaaacccaagcagctacgattctactatgggaggcagcatctgtggaaacggctcttcacagaacagctgctcctatagcaacctcacctccagcagtctgacacagagcagctgtgctgtcacccagcagatgtccaacatcagcgggagctgcagcatgctgcagcaaaccagcatcagctcccctccgacctgcagcgtcaagtctcctcaaggctgtgtggtggagaggcctccgagcagcagccagcagctggctcagtgcagcatggctgctaacttcaccccacccatgcagctggctgaaatccccgagacgagcaacgccaacattggcttatacgagcgaatgggtcagagtgattttggggctgggcattacccgcagccgtcagccaccttcagccttgccaaactgcagcagttaactaatacacttattgatcattcattgccttacagccattccgctgctgtgacttcctatgcaaacagtgcctctttgtccacaccattaagtaacacagggcttgttcaactttctcagtctccacactccgtccctgggggaccccaagcacaagctaccatgaccccaccccccaacctgactcctcctccaatgaatctgccgccgcctcttttgcaacggaacatggctgcatcaaatattggcatctctcacagccaaagactgcaaacccagattgccagcaagggccacatctccatgagaaccaagtcagcgtctctgtcaccagccgctgccacccatcagtcacaaatctatgggcgctcccagactgtagccatgcagggtcctgcacggactttaacgatgcaaagaggcatgaacatgagtgtgaacctgatgccagcgccagcctacaatgtcaactctgtgaacatgaacatgaacactctcaacgccatgaatgggtacagcatgtcccagccaatgatgaacagtggctaccacagcaatcatggctatatgaatcaaacgccccaataccctatgcagatgcagatgggcatgatgggcacccagccatatgcccagcagccaatgcagaccccaccccacggtaacatgatgtacacggcccccggacatcacggctacatgaacacaggcatgtccaaacagtctctcaatggctcctacatgagaaggtagacaacgtgggcagtccacaaaacctacggggcatcactattggattgatctgcacaaatacctttgaagagtacgatttcaaaaccagcaattggtgtgaatgcaaaaacatttgttggcaccatttatttaaaaaaaaaaaaagctgtatgcagcagaaagccttatacaagttgtttttctttttttcctttttcttttttttggtaccttcatttctgttacttttatataaaattctctgcaaaggaaggcctctctttggactacaatttggaggcagccacttgttgtgcctgcttctgttaaacaatgtggatatcaagcccccccaaattatctgttttaatattgaacctagagctttttttttcccttccctgtccactccatgtaaatgcctttagcatttcagttattgtatattttgtttaaggtgacacttcagcatgccgctaatgtctttgttagtgacagtgcattttgtagtactgtacaagtgttgtgctaacagtaagccatttcttaagttttttgccttgattagggtgccctaatttgagggttttaaaaaaaactatatttttgttaattataaaactgtaaagagctataaaagctattcccatttggttagtcaaaagggttttattgctaaatgtttggtgtaaagttgagacccttttccattttggtgacagatttctttggggaaaaaaggcagctttctgttttataaatgcagacttctgtttattgaatgaagcatatctcagtgtttatctgtcaggttttgaaacatttcatatatgtccaaatacttggcaggatttaaaaaaaaatagtgaatttggtgtaaagttgctattttatggaaatgcctctaactttacattttcattccatctgtagatttttctatctttataaaatattggagttattttttaaggaaaaatagaaaagtagcttgtgaatagctcaaactaagcttacaaatcgcatgtaaaaaagcaaaaaagttatttgtgtctgtttatattgcttccttttttgtagcctttgtacctgtacagggtgacagtaagggccaagcaggagaggcgtaatccttgtataaaataggatccagcgacactcttgtatttatctgttctctttttagtcagtcacttcaaaaaaacaaaaaacaaacaaaaaaaagctgtacattttaacataaaataaattatgatgagccatttttagcctcttgtgtcctgtcatattatgattgatagagaatgaccaatggaactgtatcatgtgtcacgcctcagaacacatacacattttgggaaaataaattatttagtgtaaattggagttatgggattttctgatttgttttgactttgggggaggggttggcaataaataagagtaatatctaataaaaccatcacatataccaaatacctatttaataaattaatttataatggattttaatgcttttcatgaaagtttattttatgcgagtgcataccttctgtatgccaatcattgtctttaaaataaagtgaa

SEQ ID NO: 5997 - protein, 2073 aa, Homo sapiens; identical to SEQ ID NO: 784

SEQ ID NO: 5998 - DNA, 6513 bp, Homo sapiens
gtttttccaactaatactctcccaccttttattatttatttccattcgtagtgacactaggacccccagatgccttcatagcattgcttatggctttgtagtcccgcatgagtagccactgccatgcttctgccatgctctcccccatgtcacctctgcagccacagcgctgttcagttgtgtgctgtcagtgcttccaacagggggtgtttcagctcttccctctgctccattgctttctcatgacaaagttcatcctgcttccgtctcagcaaagcctgatctgtgactctgtgatgtgtgcttttggatgtgagtgtgtctgtgtgtgtatccaccttagggagaaaacggatttcataatttcattgaacaaattggcccattacatttgctaccctttatcaaacaaaaaccgaaactgtgtcatttggacaaagtggtagaatttattatctcaaaagtgataatgggaatgctataactagacatcgataaaacttctaatcttggttgaaaaatatgatttcactttgtattgctcttactttccctcatatatttattaaagctgtaaaaagatgacagtgataaattcaaataaaaatttgagtatagcagggaaaggatactgctggatctatgagcagtgcttagatgtaaaagcttatttataaagctttaaaaaaaatccctatttgcccagtatgctaatttggtgccattttggtaatatatggtggttactcatgattcaagtcagtgaatacactttctgctggttttaaatgacagatactgaaataaaaataaacatcaaacaagaaagtgcagatgtaaatgtgattggaaacaaggatgtcgttactgaagaggatttggatgtttttaagcaggcccaggaactttcttgggagaaaatagagtgtgagagtggggtggaagactgtggccggtacccttctgtgattgaatttggtaaatatgaaatccaaacctggtactcctcgccttacccacaggaatatgcaagattaccaaagctttacctgtgtgaattctgtcttaaatatatgaaaagtaaaaatattttgctaagacactccaagaagtgtggatggtttcatcctccagcaaatgaaatttaccgaaggaaagacctttcagtatttgaggtaagcgcgtgtaaataaaaaaattcagctttttgaaatctagtactcctaattgttgactatgtgctgatttgtgtttagaaggtacaaagtatacttaattttggcactgaaattcagactgccctttaaaacatctccatgttttggaatgtttatctaaccatattaagcaaccatttagactgatgaagaatccctacttcatcacattaacatttttgtcttccccaaaatccctgtctacactagatatattcaccatgaatttatgatctcctcagctctttgtaaattctactttctttggcaggagaaatgagctttgttcagcagctccagccaatgtctggcaggtgctcactcttccagggaattgagcagctgtacatatctcctcaatacacaaccacctgtgtttccatccacttcttggcagtgtggataatccttttggtgagaccctagcagatgttgggactccctcccatctgggtagatggccacccctgaagaactctgctgttcacaggaaccccttgtggccatatgtctgtcattgtgggtttcttgaagacattttgtatttccagaattgatttcgtagcaggcctttgcctctatatagttgcattgtttaattatgtatctgttgtcagtttcagggattccgttaagctgagtcagtttcaccttgaggagaccatgcctttctcacaggttactgtctgtctgcagggcttttcacgtttctcctttatgctcttccctccacttgcacacttctgttgtctgctgcattttctcctctgtgacccattgtggtgtgcattggtgctcattcctaggtgcttgaaacaagcctaccttgtacagcaaacgtgatgtcctctttctctggaatatagtttcacttctggattttctttttctgaattgttcaggctgaaacttattattctgccttacagttctctttatttctggcctgcagtgtcttgccatcctattaaataaagggaaggttgtaggtttctcacatggaccaggctccttctcagacaggtctgggcccactagtttttccccaagactgatcagagaacatgggaaactccagttgtgtcttatgatttttttaaagctttctctttttctatcagctctttcggtaagcttggaggaagaagggtattgttgctgggaagattaggtgatatattagttcttactaaaagctaggcacttttgacatttcaagctggttagttctttgttgtaggggctatgctatacagcgtaggatgtttagcagcatctctggcctctgctaattggatgccagtagcaccaccaccccttccagttgtgccaaccaaaaatgtctccagacgtagccaaacatcccctgggggcgcagaatcacccccagtaagaaccagtgggctagaaggaaggctgaatgcacgttgcctgaccttcctgttggtatgctatcctgccagccccagccagctgaggtgacagagctgctcacagttgaagcttagctaatgtcacaagttcagctttcctattggctccttccttgatgccttagatcttttcttccaaccaaaacattgtttctcaaagctcaaaacacattgttggccttaagtaattatttcataaatcagcatgagtcagcactgggattgaagctctcataaatccatggaacgtcttctcatgggcaagggaatcagtcttgttaggatggtaagaatgggctgttctttcagggcaggtgcttttggaccatccagagatgagaggggagacatcagaagcatgtatgtaaaattcacttatacgaataaggagttggatttgataagtaccgaggtccctattctagaatctgagttaatagagtataacatttgggcaacttttctcctagcagtttcttacaaaacttataaaataaaggaggaataatcacacattacgattttctggccttccctttctttattcctcttacacttttcacaaccaatcagaattttcttcagcactgtcatctctgtatttttctggttcacagttatgtatatctccatctttcctttttgtaatatactaccatttccaaaagggccatactctcaaatacatgtaaacttcctttaattaaagggagaattgtatcctctgtgcccattgcccatatttgattgtgttgctatgtatgggacctaggttccatccgagggaaatagttatatgaaatctaaaaataatttgtgcaagatgagaacccgtatggtccacaggagacctgagaatggtcaagttcattgtttcagagctctggttagcaaatatccatttcccttaagaaaagtgctagggaaattcttcttgaatctgctgtgttttctattttcaaagagtaactacatttgatcaaagaaattggcatctgtgcctagcctcctgtctatagccatcagtatcacagcttgattcttttattttgaagagaagtagactgtaatcatagtgcttattgtaggttgaaattcatatcactttctctgtaagtattcccaacatagatattttatcttttccaattatatttaagatgatgcttgggataaaaccaaaatggaaacctctttgctaatccacacttctgaggaatcagaataatacagttcatttattttagttttatgtgaaacccttttgaaacaacataaagtttaacttacttgagaagtattttgatctgtttatatttccttaatacagatttattcggttcagatagagaggacatgcctgatcatttttagctcagaataaattacaagtaaaaattactcctttactagtggtttggcccttctttggtagcttaaagagaaattttaactaccttaaatgtaccctaatttaagagaaaatgtggaattctgatttgccagtgacagctgttttctggttaaagctgtacttgcttaatagagtgttttaatctctcagtttaggatttggaaataaaatgatgtactttctgaaataccatatagaagaaacaattttatatggtgcagtatttttatgttaaataatgttgtctgtttctttttgctaggttgatgggaatatgagcaaaatttattgccaaaacctttgcttgttagccaagctcttcctggaccacaaaacgttgtattatgatgtcgagccattccttttttatgtccttacaaaaaatgatgaaaagggctgtcatctggttggatacttctctaaggaaaagctttgccagcagaagtataatgtctcctgcataatgatcatgccccagcaccaaaggcaaggatttggacggtttctcattgatttcagctatttgctttctagaagagaaggccaagcagggtctcctgaaaagcctctctccgatctgggccgtctctcctacctggcatattggaagagcgtcatcttggagtatctctaccaccaccatgagaggcacatcagcatcaaggcaattagcagagcgacgggcatgtgcccacatgacattgccaccactctgcagcacctccacatgatcgacaagagagatggcagatttgtcatcattagacgggaaaagttgatattgagccacatggaaaagctgaaaacctgttccagagccaatgaacttgatccagacagtctgaggtggaccccaattttaatttctaatgctgcagtgtctgaagaagagcgagaagctgagaaagaggctgagcggctaatggaacaagctagctgctgggagaaggaggaacaagaaatcctgtcaactagagctaacagtaggcaatcacctgcaaaagtacaatcgaaaaataaatatttgcattccccggagagccggccagtcacaggggagcgagggcagctgctggagctgtctaaagagagcagtgaagaagaagaggaggaggaggacgaggaggaggaagaagaggaggaagaagaggaagaggatgaagaggaggaagaagaggaagaagaagaagaagaagaagaaaatattcaaagctctcccccaagattgacgaaaccacagtcagttgccataaagagaaagaggccttttgtactaaagaagaaaaggggtcgtaaacgcaggaggatcaacagcagtgtaacaacagagaccatttcagagacgacagaagtactgaatgagccctttgacaactcagatgaagagaggccaatgccacagctggagcctacctgtgagattgaagtggaggaagatggcaggaagccagtcctgagaaaagcattccagcatcagcctgggaagaaaagacaaacagaggaagaggaaggaaaagacaatcattgcttcaagaatgctgacccttgtagaagtaagtagaggaatgataaaaaccttacccttgagaatgtctgtatctgactgggtgccaaagagcaggcctctggcgtgatgcccagaggcacctgcgaagtggtgctgatgcacctggagcaagtgcccatctgccctttcccatccttacaagcttctctcccttcttcctggaattggattttatgttaaacaacttctaaggccagaacattcctctaggtgggttcatcttacttaccagaaattggcttatccccaaaaactttgaagtctgttgacaagaaacacattacatttctttgattctaatatgtacttttttttttcacatttagttatttctgaaatcaaggtatatattattatcagtgtgagcattgaatggaatcgtttcttttttcctggaaaacaaatattagtaaatcaatagtacattttataatcagtagtgtcgtagtatatactactataaagattcatctaaactaagctgggcatgatggcttacacctgtaatcccagcactttgggaggctgaggcaggtggatcacttgagcccaggagtttgagaccaacctaggcaacatggcaaagcccctactctaaaaaaaatacaaaaattaatcagatgtagtggtgtgcacctgtagtctcagcacttttggagactgaggcagctggatcacttgagcccaggagtttgagaccagcctgagcgacatggcaaaaccccatctctacaaaagatacaaaaattagtcagcagtggtggtgtgtgcctatagtcccagctacttgggaggctgaggtgggaggatcacctgagctcagggtgagccatgatcgtgccactgcactccagcctgggtgacagaatgagaccctttctc

SEQ ID NO: 5999 - protein, 428 aa, Homo sapiens
MSKIYCQNLCLLAKLFLDHKTLYYDVEPFLFYVLTKNDEKGCHLVGYFSKEKLCQQKYNVSCIMIMPQHQRQGFGRFLIDFSYLLSRREGQAGSPEKPLSDLGRLSYLAYWKSVILEYLYHHHERHISIKAISRATGMCPHDIATTLQHLHMIDKRDGRFVIIRREKLILSHMEKLKTCSRANELDPDSLRWTPILISNAAVSEEEREAEKEAERLMEQASCWEKEEQEILSTRANSRQSPAKVQSKNKYLHSPESRPVTGERGQLLELSKESSEEEEEEEDEEEEEEEEEEEEDEEEEEEEEEEEEEENIQSSPPRLTKPQSVAIKRKRPFVLKKKRGRKRRRINSSVTTETISETTEVLNEPFDNSDEERPMPQLEPTCEIEVEEDGRKPVLRKAFQHQPGKKRQTEEEEGKDNHCFKNADPCRSK

SEQ ID NO: 6000 - DNA, 307 bp, Homo sapiens
cctttgccaaggaaccttcacagtaatgctgtaaaatgcgttcaaaagcttaagatctgctgggagaaggaggaacaagaaatcctgtcaactagagctaacagtaggcaatcacctgcaaaagtacaatcgaaaaataaatatttgcattccccggagagccggccagtcacaggggagcgagggcagctgctggagctgtctaaagagagcagtgaagaagaagaggaggaggaggacgaggaggaggaagaagaggaggaagaagaggaagaggatgaagaggaggaagaagaggaagaagaag

SEQ ID NO: 6001 - protein, 101 aa, Homo sapiens
PLPRNLHSNAVKCVQKLKICWEKEEQEILSTRANSRQSPAKVQSKNKYLHSPESRPVTGERGQLLELSKESSEEEEEEEDEEEEEEEEEEEEDEEEEEEEE

SEQ ID NO: 6002 - DNA, 2138 bp, Homo sapiens
ctgtgtggtggagaggcctccgagcagcagccagcagctggctcagtgcagcatggctgctaacttcaccccacccatgcagctggctgaaatcccgcagccgtcagccaccttcagccttgccaaactgcagcagttaactaatacacttattgatcattcattgccttacagccattccgctgctgtgacttcctatgcaaacagtgcctctttgtccacaccattaagtaacacagggcttgttcaactttctcagtctccacactccgtccctgggggaccccaagcacaagctaccatgaccccaccccccaacctgactcctcctccaatgaatctgccgccgcctcttttgcaacggaacatggctgcatcaaatattggcatctctcacagccaaagactgcaaacccagattgccagcaagggccacatctccatgagaaccaagtcagcgtctctgtcaccagccgctgccacccatcagtcacaaatctatgggcgctcccagactgtagccatgcagggtcctgcacggactttaacgatgcaaagaggcatgaacatgagtgtgaacctgatgccagcgccagcctacaatgtcaactctgtgaacatgaacatgaacactctcaacgccatgaatgggtacagcatgtcccagccaatgatgaacagtggctaccacagcaatcatggctatatgaatcaaacgccccaataccctatgcagatgcagatgggcatgatgggcacccagccatatgcccagcagccaatgcagaccccaccccacggtaacatgatgtacacggcccccggacatcacggctacatgaacacaggcatgtccaaacagtctctcaatggctcctacatgagaaggtagacaacgtgggcagtccacaaaacctacggggcatcactattggattgatctgcacaaatacctttgaagagtacgatttcaaaaccagcaattggtgtgaatgcaaaaacatttgttggcaccatttatttaaaaaaaaaaaaagctgtatgcagcagaaagccttatacaagttgtttttctttttttcctttttcttttttttggtaccttcatttctgttacttttatataaaattctctgcaaaggaaggcctctctttggactacaatttggaggcagccacttgttgtgcctgcttctgttaaacaatgtggatatcaagcccccccaaattatctgttttaatattgaacctagagctttttttttcccttccctgtccactccatgtaaatgcctttagcatttcagttattgtatattttgtttaaggtgacacttcagcatgccgctaatgtctttgttagtgacagtgcattttgtagtactgtacaagtgttgtgctaacagtaagccatttcttaagttttttgccttgattagggtgccctaatttgagggttttaaaaaaaactatatttttgttaattataaaactgtaaagagctataaaagctattcccatttggttagtcaaaagggttttattgctaaatgtttggtgtaaagttgagacccttttccattttggtgacagatttctttggggaaaaaaggcagctttctgttttataaatgcagacttctgtttattgaatgaagcatatctcagtgtttatctgtcaggttttgaaacatttcatatatgtccaaatacttggcaggatttaaaaaaaaatagtgaatttggtgtaaagttgctattttatggaaatgcctctaactttacattttcattccatctgtagatttttctatctttataaaatattggagttattttttaaggaaaaatagaaaagtagcttgtgaatagctcaaactaagcttacaaatcgcatgtaaaaaagcaaaaaagttatttgtgtctgtttatattgcttccttttttgtagcctttgtacctgtacagggtgacagtaagggccaagcaggagaggcgtaatccttgtataaaataggatccagcgacactcttgtatttatctgttctctttttagtcagtcacttcaaaaaaacaaaaaacaaacaaaaaaaagctgtacattttaacataaaataaattatgatgagccattttt

SEQ ID NO: 6003 - protein, 279 aa, Homo sapiens
MAANFTPPMQLAEIPQPSATFSLAKLQQLTNTLIDHSLPYSHSAAVTSYANSASLSTPLSNTGLVQLSQSPHSVPGGPQAQATMTPPPNLTPPPMNLPPPLLQRNMAASNIGISHSQRLQTQIASKGHISMRTKSASLSPAAATHQSQIYGRSQTVAMQGPARTLTMQRGMNMSVNLMPAPAYNVNSVNMNMNTLNAMNGYSMSQPMMNSGYHSNHGYMNQTPQYPMQMQMGMMGTQPYAQQPMQTPPHGNMMYTAPGHHGYMNTGMSKQSLNGSYMRR

SEQ ID NO: 6004 - DNA, 2475 bp, Homo sapiens
ctgtgtggtggagaggcctccgagcagcagccagcagctggctcagtgcagcatggctgctaacttcaccccacccatgcagctggctgaaatcccgcagccgtcagccaccttcagccttgccaaactgcagcagttaactaatacacttattgatcattcattgccttacagccattccgctgctgtgacttcctatgcaaacagtgcctctttgtccacaccattaagtaacacagggcttgttcaactttctcagtctccacactccgtccctgggggaccccaagcacaagctaccatgaccccaccccccaacctgactcctcctccaatgaatctgccgccgcctcttttgcaacggaacatggctgcatcaaatattggcatctctcacagccaaagactgcaaacccagattgccagcaagggccacatctccatgagaaccaagtcagcgtctctgtcaccagccgctgccacccatcagtcacaaatctatgggcgctcccagactgtagccatgcagggtcctgcacggactttaacgatgcaaagaggcatgaacatgagtgtgaacctgatgccagcgccagcctacaatgtcaactctgtgaacatgaacatgaacactctcaacgccatgaatgggtacagcatgtcccagccaatgatgaacagtggctaccacagcaatcatggctatatgaatcaaacgccccaataccctatgcagatgcagatgggcatgatgggcacccagccatatgcccagcagccaatgcagaccccaccccacggtaacatgatgtacacggcccccggacatcacggctacatgaacacaggcatgtccaaacagtctctcaatggctcctacatgagaaggtagacaacgtgggcagtccacaaaacctacggggcatcactattggattgatctgcacaaatacctttgaagagtacgatttcaaaaccagcaattggtgtgaatgcaaaaacatttgttggcaccatttatttaaaaaaaaaaaaagctgtatgcagcagaaagccttatacaagttgtttttctttttttcctttttcttttttttggtaccttcatttctgttacttttatataaaattctctgcaaaggaaggcctctctttggactacaatttggaggcagccacttgttgtgcctgcttctgttaaacaatgtggatatcaagcccccccaaattatctgttttaatattgaacctagagctttttttttcccttccctgtccactccatgtaaatgcctttagcatttcagttattgtatattttgtttaaggtgacacttcagcatgccgctaatgtctttgttagtgacagtgcattttgtagtactgtacaagtgttgtgctaacagtaagccatttcttaagttttttgccttgattagggtgccctaatttgagggttttaaaaaaaactatatttttgttaattataaaactgtaaagagctataaaagctattcccatttggttagtcaaaagggttttattgctaaatgtttggtgtaaagttgagacccttttccattttggtgacagatttctttggggaaaaaaggcagctttctgttttataaatgcagacttctgtttattgaatgaagcatatctcagtgtttatctgtcaggttttgaaacatttcatatatgtccaaatacttggcaggatttaaaaaaaaatagtgaatttggtgtaaagttgctattttatggaaatgcctctaactttacattttcattccatctgtagatttttctatctttataaaatattggagttattttttaaggaaaaatagaaaagtagcttgtgaatagctcaaactaagcttacaaatcgcatgtaaaaaagcaaaaaagttatttgtgtctgtttatattgcttccttttttgtagcctttgtacctgtacagggtgacagtaagggccaagcaggagaggcgtaatccttgtataaaataggatccagcgacactcttgtatttatctgttctctttttagtcagtcacttcaaaaaaacaaaaaacaaacaaaaaaaagctgtacattttaacataaaataaattatgatgagccatttttagcctcttgtgtcctgtcatattatgattgatagagaatgaccaatggaactgtatcatgtgtcacgcctcagaacacatacacattttgggaaaataaattatttagtgtaaattggagttatgggattttctgatttgttttgactttgggggaggggttggcaataaataagagtaatatctaataaaaccatcacatataccaaatacctatttaataaattaatttataatggattttaatgcttttcatgaaagtttattttatgcgagtgcataccttctgtatgccaatcattgtctttaaaataaagtgaaattgtttttttcttttg

SEQ ID NO: 6005 - protein, 279 aa, Homo sapiens; identical to SEQ ID NO: 6003

SEQ ID NO: 6006 - DNA, 741 bp, Homo sapiens
atgacatctggagaagtgaagacaagcctcaagaatgcctactcatctgccaagaggctgtcgccgaagatggaggaggaaggggaggaggaggactactgcacccctggagcctttgagctggagcggctcttctggaagggcagtccccagtacacccacgtcaacgaggtctggcccaagctctacattggcgatgaggcgacggcgctggaccgctataggctgcagaaggcggggttcacgcacgtgctgaacgcggcccacggccgctggaacgtggacactgggcccgactactaccgcgacatggacatccagtaccacggcgtggaggccgacgacctgcccaccttcgacctcagtgtcttcttctacccggcggcagccttcatcgacagagcgctaagcgacgaccacagccggaagcgggatgtgcgcgtgcgaaatctttgtcgcaaagctgggccactggggctgcttgtggccgagggtaaaggtaagatcctggttcactgcgtcatgggccgcagccggtcagccaccctggtcctggcctacctgatgatccacaaggacatgaccctggtggacgccatccagcaagtggccaagaaccgctgcgtcctcccgaaccggggctttttgaagcagctccgggagctggacaagcagctggtgcagcagaggcgacggtcccagcgccaggacggtgaggaggaggatggcagggagctgtag

SEQ ID NO: 6007 - protein, 246 aa, Homo sapiens
MTSGEVKTSLKNAYSSAKRLSPKMEEEGEEEDYCTPGAFELERLFWKGSPQYTHVNEVWPKLYIGDEATALDRYRLQKAGFTHVLNAAHGRWNVDTGPDYYRDMDIQYHGVEADDLPTFDLSVFFYPAAAFIDRALSDDHSRKRDVRVRNLCRKAGPLGLLVAEGKGKILVHCVMGRSRSATLVLAYLMIHKDMTLVDAIQQVAKNRCVLPNRGFLKQLRELDKQLVQQRRRSQRQDGEEEDGREL

SEQ ID NO: 6008 - DNA, 655 bp, Homo sapiens
agcccttagactgtgtctccttcgagctgtttgcagacaaagtttcaaagacagcagaaaactttcgtgctctgagcactggagagaaaggatttggttgtaagggttcctgctttcacagaattattccagggtttatgtgtcagggtggtgacttcacatgccataatggcactggtggcaagtccatctactgggagaaatttgatgatgagaacttcatcctaaagcatacaggtcctggcatcttatccatggcaaatgctggacccaacacaaatggttcccagtttttcatctgcactgccaagactaagtggttggatggcaagcatgtggcctttggcaaggtgaaagaaggcatgaatattgtggaggccatggagggtccaggaatggcaagaccagcaagaagatcaccattgctgactgtggacaactctaataagtttgacttgtgttttatcttaacctccagaccattccttctgtaactcaggagagcatccttccacccaatttgctcgcagtatcctagaatctttgtgctctcactgcagttccctttgggtgccatgttttccttgttcccttccatgcccagctggattgcagagttaagtttatgattatgaaataaaaactaaatgccaaa

SEQ ID NO: 6009 - protein, 118 aa, Homo sapiens [sequence omitted]

SEQ ID NO: 6010 - DNA, 921 bp, Homo sapiens
tgttccgctcaggcagagtcctgcccctgcacccactcccccattcccggccccaggccatgccccaggatggactcactgcagaagcaggacctccggaggcccaagatccatggggcagtccaggcatctccctaccagccgcccacattggcttcgctgcagcgcttgctgtgggtccgtcaggctgccacactgaaccatatcgatgaggtctggcccagcctcttcctgggagatgcgtacgcagcccgggacaagagcaagctgatccagctgggaatcacccacgttgtgaatgccgctgcaggcaagttccaggtggacacaggtgccaaattctaccgtggaatgtccctggagtactatggcatcgaggcggacgacaaccccttcttcgacctcagtgtctactttctgcctgttgctcgatacatccgagctgccctcagtgttccccaaggccgcgtgctggtacactgtgccatgggggtaagccgctctgccacacttgtcctggccttcctcatgatctgtgagaacatgacgctggtagaggccatccagacggtgcaggcccaccgcaatatctgccctaactcaggcttcctccggcagctccaggttctggacaaccgactggggcgggagacggggcggttctgatctggcaggcagccaggatccctgacccttggcccaaccccaccagcctggccctgggaacagcaggctctgctgtttctagtgaccctgagatgtaaacagcaagtgggggctgaggcagaggcagggatagctgggtggtgacctcttagcgggtggatttccctgacccaattcagagattctttatgcaaaagtgagttcagtccatctctataataaaatattcatcgtcataaagacaggtgatctttt

SEQ ID NO: 6011 - protein, 198 aa, Homo sapiens; identical to SEQ ID NO: 796

SEQ ID NO: 6012 - DNA, 1125 bp, Homo sapiens
agaggcagaggggtgggcgggctggcccatggctgagacctctctcccagagctggggggagaggacaaagccacgccttgccccagcatcctggagctggaggagctcctgcgggcagggaagtcttcttgcagccgtgtggacgaagtttggcccaaccttttcataggagatgcaaacagcatcaagtgtgcggagacaggcggctgaaagccagcagcacgaactgcccgtcagagaagtgcacagcctgggccagatactcccacaggatggactcactgcagaagcaggacctccggaggcccaagatccatggggcagtccaggcatctccctaccagccgcccacattggcttcgctgcagcgcttgctgtgggtccgtcaggctgccacactgaaccatatcgatgaggtctggcccagcctcttcctgggagatgcgtacgcagcccgggacaagagcaagctgatccagctgggaatcacccacgttgtgaatgccgctgcaggcaagttccaggtggacacaggtgccaaattctaccgtggaatgtccctggagtactatggcatcgaggcggacgacaaccccttcttcgacctcagtgtctactttctgcctgttgctcgatacatccgagctgccctcagtgttccccaaggccgcgtgctggtacactgtgccatgggggtaagccgctctgccacacttgtcctggccttcctcatgatctgtgagaacatgacgctggtagaggccatccagacggtgcaggcccaccgcaatatctgccctaactcaggcttcctccggcagctccaggttctggacaaccgactggggcgggagacggggcggttctgatctggcaggcagccaggatccctgacccttggcccaaccccaccagcctggccctgggaacagcaggctctgctgtttctagtgaccctgagatgtaaacagcaagtgggggctgaggcagaggcagggatagctgggtggtgacctcttagcgggtggatttccctgacccaattcagagattctttatgcaaaagtgagttcagtccatctctataataaaatattcatcgtcataaagacaggtgatctttt

SEQ ID NO: 6013 - protein, 198 aa, Homo sapiens; identical to SEQ ID NO: 796

SEQ ID NO: 6014 - DNA, 1771 bp, Homo sapiens
agagaggagtgaccacagaggcagaggggtgggcgggctggcccatggctgagacctctctcccagagctggggggagaggacaaagccacgccttgccccagcatcctggagctggaggagctcctgcgggcagggaagtcttcttgcagccgtgtggacgaagtttggcccaaccttttcataggagatgcggccacggcaaacaaccgctttgagctgtggaagctgggcatcacccacgtgctgaacgccgcccacaagggcctctactgtcagggcggccctgacttctacggcagcagtgtgagctacctgggggtgccagcccacgacctccctgattttgacatcagtgcctacttctcctctgcggctgacttcatccaccgtgccctcaacacgcctggggccaaggtcctggtgcactgtgtggtgggcgtgagccgctctgccacgctggtcctggcctacctcatgctgcaccagcggctgtccctgcgccaggcggtgatcaccgtgaggcagcaccgatgggtcttccccaaccgaggcttcctgcaccagctctgcaggctggaccagcaactgcggggtgccggccagagctgaggggccagagctggtccttactccctgccatggggctctgccactttgccaccctggcactgatcctgctggtgctgctggaggctctggcccaggcggacacacagaagatggtggaagcccagcgtggggtcggccctagagcctgctactccatctggctcctcctggcgcctacaccccctctcagccactgtcttcagtctccacagaaacagcatcaagtgtgcggagacaggcggctgaaagccagcagcacgaactgcccgtcagagaagtgcacagcctgggccagatactcccacaggatggactcactgcagaagcaggacctccggaggcccaagatccatggggcagtccaggcatctccctaccagccgcccacattggcttcgctgcagcgcttgctgtgggtccgtcaggctgccacactgaaccatatcgatgaggtctggcccagcctcttcctgggagatgcgtacgcagcccgggacaagagcaagctgatccagctgggaatcacccacgttgtgaatgccgctgcaggcaagttccaggtggacacaggtgccaaattctaccgtggaatgtccctggagtactatggcatcgaggcggacgacaaccccttcttcgacctcagtgtctactttctgcctgttgctcgatacatccgagctgccctcagtgttccccaaggccgcgtgctggtacactgtgccatgggggtaagccgctctgccacacttgtcctggccttcctcatgatctgtgagaacatgacgctggtagaggccatccagacggtgcaggcccaccgcaatatctgccctaactcaggcttcctccggcagctccaggttctggacaaccgactggggcgggagacggggcggttctgatctggcaggcagccaggatccctgacccttggcccaaccccaccagcctggccctgggaacagcaggctctgctgtttctagtgaccctgagatgtaaacagcaagtgggggctgaggcagaggcagggatagctgggtggtgacctcttagcgggtggatttccctgacccaattcagagattctttatgcaaaagtgagttcagtccatctctataataaaatattcatcgtcataaagacaggtgatctttt

SEQ ID NO: 6015 - protein, 327 aa, Homo sapiens
MGLPQPRLPAPALQAGPATAGCRPELRGQSWSLLPAMGLCHFATLALILLVLLEALAQADTQKMVEAQRGVGPRACYSIWLLLAPTPPLSHCLQSPQKQHQVCGDRRLKASSTNCPSEKCTAWARYSHRMDSLQKQDLRRPKIHGAVQASPYQPPTLASLQRLLWVRQAATLNHIDEVWPSLFLGDAYAARDKSKLIQLGITHVVNAAAGKFQVDTGAKFYRGMSLEYYGIEADDNPFFDLSVYFLPVARYIRAALSVPQGRVLVHCAMGVSRSATLVLAFLMICENMTLVEAIQTVQAHRNICPNSGFLRQLQVLDNRLGRETGRF

SEQ ID NO: 6016 - DNA, 1574 bp, Homo sapiens
actggagaggcagagaggagtgaccacagaggcagaggggtgggcgggctggcccatggctgagacctctctcccagagctggggggagaggacaaagccacgccttgccccagcatcctggagctggaggagctcctgcgggcagggaagtcttcttgcagccgtgtggacgaagtttggcccaaccttttcataggagatgcggccacggcaaacaaccgctttgagctgtggaagctgggcatcacccacgtgctgaacgccgcccacaagggcctctactgtcagggcggccctgacttctacggcagcagtgtgagctacctgggggtgccagcccacgacctccctgattttgacatcagtgcctacttctcctctgcggctgacttcatccaccgtgccctcaacacgcctggggagctggtccttactccctgccatggggctctgccactttgccaccctggcactgatcctgctggtgctgctggaggctctggcccaggcggacacacagaagatggtggaagcccagcgtggggtcggccctagagcctgctactccatctggctcctcctggcgcctacaccccctctcagccactgtcttcagtctccacagaaacagcatcaagtgtgcggagacaggcggctgaaagccagcagcacgaactgcccgtcagagaagtgcacagcctgggccagatactcccacaggatggactcactgcagaagcaggacctccggaggcccaagatccatggggcagtccaggcatctccctaccagccgcccacattggcttcgctgcagcgcttgctgtgggtccgtcaggctgccacactgaaccatatcgatgaggtctggcccagcctcttcctgggagatgcgtacgcagcccgggacaagagcaagctgatccagctgggaatcacccacgttgtgaatgccgctgcaggcaagttccaggtggacacaggtgccaaattctaccgtggaatgtccctggagtactatggcatcgaggcggacgacaaccccttcttcgacctcagtgtctactttctgcctgttgctcgatacatccgagctgccctcagtgttccccaaggccgcgtgctggtacactgtgccatgggggtaagccgctctgccacacttgtcctggccttcctcatgatctgtgagaacatgacgctggtagaggccatccagacggtgcaggcccaccgcaatatctgccctaactcaggcttcctccggcagctccaggttctggacaaccgactggggcgggagacggggcggttctgatctggcaggcagccaggatccctgacccttggcccaaccccaccagcctggccctgggaacagcaggctctgctgtttctagtgaccctgagatgtaaacagcaagtgggggctgaggcagaggcagggatagctgggtggtgacctcttagcgggtggatttccctgacccaattcagagattctttatgcaaaagtgagttcagtccatctctataataaaatattcatcgtcataaagacaggtgatctttt

SEQ ID NO: 6017 - protein, 291 aa, Homo sapiens; identical to SEQ ID NO: 790

SEQ ID NO: 6018 - DNA, 3642 bp, Homo sapiens
gactcggaccgcggaggtgagcgggagctgaggctgaggagaggggagcttggggggcgcctgctgccaagggcagcggaggaggaaatggcaggtcctaatcaactctgcattcgccgctggactaccaagcatgtagctgtgtggctgaaggatgaaggcttttttgaatatgtggacattttatgcaataagcaccgacttgatggaatcacattgctaacattgactgaatatgatctccggtctcctcctctggaaatcaaagtcttaggggacattaaaaggttaatgctctcagtccgaaaattgcagaaaatacatattgatgttttagaagagatgggctacaacagtgacagtcccatgggttccatgacccctttcatcagtgctcttcagagtacagactggctctgtaatggggagctttcccatgactgtgacggacccataactgacttgaattctgatcagtaccagtacatgaatggtaaaaacaaacattctgttcgaagattggacccagaatactggaagactatactgagttgtatatatgtttttatagtatttggatttacatctttcattatggttatagtccatgagcgagtgcctgacatgcagacctatccaccactcccagatatattcttagacagcgttcctagaatcccatgggcctttgccatgacggaagtatgtggcatgattctgtgctatatttggctcctggttcttcttcttcacaagcacaggtcaatacttctgcgaaggctctgtagtctgatgggaactgtattcttgcttcgctgctttaccatgtttgtgacctccctctccgtgccaggacaacacctgcagtgtactggaaagatatatggcagtgtatgggagaaattacatcgagcctttgccatttggagtggctttggtatgaccctgactggcgttcacacatgtggagattacatgtttagtggccacacagtcgtcctaactatgctgaatttctttgtcaccgaatgtaagtatctttttagtgcttctatgcgtattaggtaactagctgcagtgaaggctgtgggaagggtgtcagatcctgtgaagaatggcaaaacagcctgacctgagaaacgtgactgagaagcattggaaggaatgtagctttaaaatgatctttctgtccttttcctagatacaccaagaagctggaatttcttgcacactttatcctgggttctcaacctctttggaatcttcttcatcttggctgcccatgaacattattctattgatgtgtttattgctttttatataacaacaagactctttttgtactaccatactctggccaataccagagcatatcagcagagtaggagagcaaggatttggtttcccatgttctctttttttgaatgcaatgttaatggcacagtacctaatgaatattgttggccattttcaaaaccagcaataatgaaaagactaattggatgaatactatctttctaatgaatttgtgattaaatatataatagttgttgaaaatgagtaactttgcgttctccccctaggttgttcttagatgcctggcttatgtgttgacaaagtaaagttttctgttctgagcaaagttatgattataaaaagcaagaaagaacaatcaagagtccttatgtagctatttgaacagaaagcttaagtagatgttttctgccccttctctttaggaagacttaatgttgtgattgaagtcaggctgtacccttacctgttgagtatttgcttattgaactttaaacaagtcaacttgagcagtttgctggttgaggaattttcattgatttccagtagggctctagtcaagaaataatatgttttgaagctccttattacctttagaagaagaaaccctaacaagtgacagtacttgttctttggactaatctttgtttcattttaaaaaatgcaaccctgggacatgatctgttttactgacaaagagtttttgccttctgaaccatctttaaatatactgagcataccaggatgcctgaaataagaagagaatgaaagaggccatagatgacgtgacagagtactggctaggatgccattggtctcctcattaatgcaaatgtagggctggcatatttcaccaaagatgcaacaaaagatgcagtgccagtgtgaccctcagtgagtattcatgagggaaaaatggctgcatccataaaaataaatgggcttaatgttagtggtataggtacccagaataacttctttgtgctatagttgttagatgacagttcaattttatgcttttttaatggtgttattaaatgagccaaataggagtgttttaccagatgttagataaagttcttaatgccgttaagtagggaggtatgcatgcaaagaattgttttctcctgaaaagaaacttacagcacgcaaaatataactttttggtttttgaaatttatcattcttggctgttggaagtaaacagtctcagacatacttggatatgaaaaagtttcgttgttttttacttttaaatataatggtgtatatacattctttctatttagtcttaatttggcagtcaggaagtgatataacttagctgctatttacaacactagaaatttagtactttaagtaatttcacatctatgataacatttgttactttatttttaatgatttttttacagtagttatgacagtaggatggttatggaattggaatttaaactcccaactaatgagcttaagctgcttggaatattaattatgtagtttttacattccattttaaaacaaaaacttagaaaaggtgctggcattctgaggcctgcaattaggccacatagcagaagcttgctccttccttatctgggtgaaatattttatttttgcactttgagtcatattcccacccctgtataagctacataggagcctgaatgaattgggtaggaaaggaaattatgcaaacaagtctcagctagtgctgaatgaccccaatttgggtctgctgtgaacatcatttttgtatttctcacttgagaaatgctgcaaggcaattcaacttttatgcttttaaatctcacaactcagaatctgatatcttaaatcactgattctgttacatgctaggaacaaaatgccaacatctcatgtaaagaagttgcataatcatgaaaaataaaggatgtttcctatgccagttagagtggtttgacccttcaggtaaaaagatatgttactgttatttttctacgtgacagaacagactgaatttagctagggaggcagtgatgttggcttttgggaaagggttcaaaaaactgtatggcaacattaatgctaaaatgttaagccgagtgcagtggtgcaaggctatagtcccaggttctgaggaggctgaggcaggaggattgcttgaggccaggagttagaaactagagtgtgttataacgcctatgaataaccactgcattccagcccgggcaaggtagcaagacccattctcttaaaaacatggctgggtgcaatggctcacgcctgtaatcccagcactttgggaggccaaggcaggcggatggcttgaggtcaggagttcga

SEQ ID NO: 6019 - protein, 326 aa, Homo sapiens; identical to SEQ ID NO: 798

SEQ ID NO: 6020 - DNA, 246 bp, Homo sapiens
aaaaaaaaaaaaaaaaaggtacctgtcagaaaaatctagagagcaaaacggtacacatactgaagagtagctctctcttctgttcctctactttttagaagctgtttccttcattctgttcctggcctcaagtgatcctcccgcctccagctaccagagtgctaggattataggtatgagccaccacacctagccaattattctttctaaaacacactctgattatgtcatcctctttttcagcta

SEQ ID NO: 6021 - protein, 31 aa, Homo sapiens
KKKKKGTCQKNLESKTVHILKSSSLFCSSTF

SEQ ID NO: 6022 - DNA, 437 bp, Homo sapiens
cctctttttcagctatctgcagagaatcccattgtgtgtagaatgtttttaacttgacagaggtttccatggctctctcaggtcctcgtttccaagaaggaacaactgttgtgtctaaaagggctactgccttatgcagcctatttgctgcatgaactgtgcatgatgtatgcccagggaatttctgaaacaagtaccttgggcacctatgtgcttccaaagctgtatgtgaagctacataactacatgagttgtgccattcgcagaaaggtagtcaagaatcgaacttgtaaagcctgcaaggaccaaacatgtctacctgacttagacttttgagtgctgccccatgacctccaccaaagtccgtataaggagccgactccttaaggactgaagaaaaactatcttctggaaaaagataaagtggagattatact

SEQ ID NO: 6023 - protein, 57 aa, Homo sapiens
MMYAQGISETSTLGTYVLPKLYVKLHNYMSCAIRRKVVKNRTCKACKDQTCLPDLDF

SEQ ID NO: 6024 - DNA, 1084 bp, Homo sapiens
ggtgaggtgagaagggggtccaaaacctagtttcatactaattttagtcattcaaagttactcaaagacagggaaaagaaacaaaaaacctactcagtctctttccattcttattagtcacctgaagcattctgacctttgatgttactaacaattctcctctacagcagtatgggataattcaggctaaactgcttacaaacactaactgttaaactgtcaagttggcattaaaattgacacctttgctggcttagaaactgtctaaatgaaaccagtactgtttaagaaagcaattggactattctacaagacagctttcttgtctcaaatgcctgaataccttaaagtactggcaaatgactatattatcattacctttagtatgaagaaaatgtaagtctataaaagactataaaataattacatttattaaattagagagtttaaaacaagaatgtggttaacattcttaggcaatttagatctagaatcctttaaaaaagcttactatgaaattaatggtgaaactgccttttgttgaatacagtcaaagaagactagtgttataaatatgactttgtgaatacatgagtaatactttccaaacagatgtttctaaaacagactgtttcttatcagctataaaacaatctggttcctctgtttcccatttacaaattacaggatttctggaattcttagtaaaaacacacaggcagagacagggcacgaaacaccgctgctcacagagtaaagagttataatccctgcaggtctcttgatccaatgggttctggtctctctgtcactgactttttcttctgaatagcccacattattattttattttgttttgtttttttgagatggagtctcgctctgtcacccagactgaagtgtagtggcagtatctcggctcactgcaacctccgcctccttgggctcaagtgatccttctgcctcagcctcccatgtagctgggaccacaggcatgcatcaccacgcccagctaattttctaaacaactttttgtggggatgaggtctcactttgttgcccaggctggtctcttttacctgag

SEQ ID NO: 6025 - protein, 58 aa, Homo sapiens
MSNTFQTDVSKTDCFLSAIKQSGSSVSHLQITGFLEFLVKTHRQRQGTKHRCSQSKEL

SEQ ID NO: 6026 - DNA, 1599 bp, Homo sapiens
tgcactccagctctgggtgacagagcgagactccatctcaaaaaaacaaaacaaaataaaataataatgtgggctattcagaagaaaaagtcagtgacagagagaccagaacccattggatcaagagacctgcagggattataactctttactctgtgagcagcggtgtttcgtgccctgtctctgcctgtgtgtttttactaagaattccagaaatcctgtaatttgtaaatgggaaacagaggaaccagattgttttatagctgataagaaacagtctgttttagaaacatctgtttggaaagtattactcatgtattcacaaagtcatatttataacactagtcttctttgactgtattcaacaaaaggcagtttcaccattaatttcatagtaagcttttttaaaggattctagatctaaattgcctaagaatgttaaccacattcttgttttaaactctctaatttaataaatgtaattattttatagtcttttatagacttacattttcttcatactaaaggtaatgataatatagtcatttgccagtactttaaggtattcaggcatttgagacaagaaagctgtcttgtagaatagtccaattgctttcttaaacagtactggtttcatttagacagtttctaagccagcaaaggtgtcaattttaatgccaacttgacagtttaacagttagtgtttgtaagcagtttagcctgaattatcccatactgctgtagaggagaattgttagtaacatcaaaggtcagaatgcttcaggtgactaataagaatggaaagagactgagtaggttttttgtttcttttccctgtctttgagtaactttgaatgactaaaattagtatgaaactaggttttggacccccttctcacctcacccggatgtaatgccaccaatttcaaataactaaaatgtgaccaattactttgcttcaagttctatacaaatatctctgaaatctgtaagccatatttcagctattctggtttttataatacattctaccctaaattaaccaaaggactttttattcagtgtattccatgtttcagcataaggaaagtttgtgcctgatatggcaggagaaagaacactatggtaatttcattgttacttcaggtctctttcaatctgaagaactgggttgtctggagaattgaacatagccaagcaatattatcaattagtaatgtcatcttaaaaatgttcacttttactaagttttattcagaggatctatgtattattagaaaaatgaagtatttctgacatggaacaaagaaagtggaaactggtacttaatgggggaagcaaaattagctgggactaaaacggacatgttttgttttgtgaattctacctaaatgtctctctatccacagagaaactagtattacttgaagatgtgaaagttcctgtggtagccataccttgaagcacagtgtttgtacataagtaaatatcttgattctaaattaaatccagatttaactaatatatattattttatatctttgttgtattaaaatgtttaaaaacactaaaaataaaacatttgaaagttggattaca

SEQ ID NO: 6027 - protein, 57 aa, Homo sapiens [sequence omitted]

SEQ ID NO: 6028 - DNA, 946 bp, Homo sapiens
aagtaccagtttccactttctttgttccatgtcagaaatacttcatttttctaataatacatagatcctctgaataaaacttagtaaaagtgaacatttttaagatgacattactaattgataatattgcttggctatgttcaattctccagacaacccagttcttcagattgaaagagacctgaagtaacaatgaaattaccatagtgttctttctcctgccatatcaggcacaaactttccttatgctgaaacatggaatacactgaataaaaagtcctttggttaatttagggtagaatgtattataaaaaccagaatagctgaaatatggcttacagatttcagagatatttgtatagaacttgaagcaaagtaattggtcacattttagttatttgaaattggtggcattacatccgggtgaggtgagaagggggtccaaaacctagtttcatactaattttagtcattcaaagttactcaaagacagggaaaagaaacaaaaaacctactcagtctctttccattcttattagtcacctgaagcattctgacctttgatgttactaacaattctcctctacagcagtatgggataattcaggctaaactgcttacaaacactaactgttaaactgtcaagttggcattaaaattgacacctttgctggcttagaaactgtctaaatgaaaccagtatctgtttcccatttacaaattacaggatttctggaattcttagtaaaaacacacaggcagagacagggcacgaaacaccgctgctcacagagtaaagagttataatccctgcaggtctcttgatccaatgggttctggtctctctgtcactgactttttcttctgaatagcccacattattattttattttgttttgtttttttgagatggagtctcgctctgtcacccagactgaagtgtagt

SEQ ID NO: 6029 - protein, 38 aa, Homo sapiens
MKPVSVSHLQITGFLEFLVKTHRQRQGTKHRCSQSKEL

SEQ ID NO: 6030 - DNA, 773 bp, Homo sapiens
cacattttggtctggtttgttgtgctagactagaattaacaaagatgatttttatgagagtgcttaggcttttgtgctgtatggacagtttggggtctttggatacattccagtggctatcaagagtattgtgtcctactgagaatttgatttttgagttgaatggatacgaattaaatagtacctggtttgtttggcttaatacataatattgaattttattgtctcacgtgaataaaactgaacacttcatgattacatgatggggaaacatgtaggggctttgtctctattgaaatatttttcttacagttgtttttgtattttattttaggcaaaagtcaacaactctagcttaattggagtaggctatactcagactctgaggcctggtgtgaagcttacactctctgctctggtagatgggaagagcattaatgctggaggccacaaggttgggctcgccctggagttggaggcttaatccagctgaaagaaacctttgggaatggatatcagaagatttggccttaatatatttccattgtgaccagcagcaggcttttttcccccaagaagatgatcaaaacaaaggatgatctcaacaagagctgtattttaagtatttagacagttctttgttagctggtttctagttggttatctagttaccaatgctgcagtcctgcagtcacctatacattatttaaatgtatttaactgttaaatgcgctacccaccaataatgaaatagacctttatgaaaactgtgc

SEQ ID NO: 6031 - protein, 58 aa, Homo sapiens [sequence omitted]

SEQ ID NO: 6032 - DNA, 1419 bp, Homo sapiens
gaccgcggctccgcgggtagtgccccgacaaggtggagcccggcgggcccgcgagtccgagacctgtcccaggagctccagctcacgtgacctgtcactgcctcccgccgcctcctgcccgcgccatgacccagccggtgccccggctctccgtgcccgccgcgctggccctgggctcagccgcactgggcgccgccttcgccactggcctcttcctgggtgagcaggacctggtcccggcgggcgggtgggcgggcgcagagtagggcgcggcgtggctcaggttaatccaacaccctctccccgtcagggaggcggtgccccccatggcgaggccggcgagagcagtgcctgcttccccccgaggacagccgcctgtggcagtatcttctgagccgctccatgcgggagcacccggcgctgcgaagcctgaggctggtcagcagggcgcgggacggaaacgggcgtccctctcgacccctgcgggtcccacgtggctgtgtgaccttgggctgggccctggccctccctgggcttccggcttccctgggccgggtgcggtgggcgttccgaagggccagtcccccaggccacgcccagaaccgcgcccctggggcttgggacccccagggcgaaggtgggtgacctgcatggctggtgccaccctctcctttcacgcagctgaccctggagcagccgcagggggattctatgatgacctgcgagcaggcccagctcttggccaacctggcgcggctcatccaggccaagaaggcgctggacctgggcaccttcacgggctactccgccctggccctggccctggcgctgcccgcggacgggcgcgtggtgacctgcgaggtggacgcgcagcccccggagctgggacggcccctgtggaggcaggtgagcgcccgcgcctagctctgcagccccaggcgggggcgcaacggctgacccgctccctccgcaggccgaggcggagcacaagatcgacctccggctgaagcccgccttggagaccctggacgagctgctggcggcgggcgaggccggcaccttcgacgtggccgtggtggatgcggacaaggagaactgctccgcctactacgagcgctgcctgcagctgctgcgacccggaggcatcctcgccgtcctcagagtcctgtggcgcgggaaggtgctgcaacctccgaaaggggacgtggcggccgagtgtgtgcgaaacctaaacgaacgcatccggcgggacgtcagggtctacatcagcctcctgcccctgggcgatggactcaccttggccttcaagatctagggctggcccctagtgagtgggctcgagggagggttgcctgggaaccccaggaattgaccctgagttttaaattcgaaaataaagtggggctgggacacacgacc

SEQ ID NO: 6033 - protein, 226 aa, Homo sapiens
MARPARAVPASPRGQPPVAVSSEPLHAGAPGAAKPEAGQQGAGRKRASLSTPAGPTWLCDLGLGPGPPWASGFPGPGAVGVPKGQSPRPRPEPRPWGLGPPGRRWVTCMAGATLSFHAADPGAAAGGFYDDLRAGPALGQPGAAHPGQEGAGPGHLHGLLRPGPGPGAARGRARGDLRGGRAAPGAGTAPVEAGERPRLALQPQAGAQRLTRSLRRPRRSTRSTSG

SEQ ID NO: 6034 - DNA, 845 bp, Homo sapiens
cttgggctgggccctggccctccctgggcttccggcttccctgggccgggtgcggtgggcgttccgaagggccagtcccccaggccacgcccagaaccgcgcccctggggcttgggacccccagggcgaaggtgggtgacctgcatggctggtgccaccctctcctttcacgcagctgaccctggagcagccgcagggggattctatgatgacctgcgagcaggcccagctcttggccaacctggcgcggctcatccaggccaagaaggcgctggacctgggcaccttcacgggctactccgccctggccctggccctggcgctgcccgcggacgggcgcgtggtgacctgcgaggtggacgcgcagcccccggagctgggacggcccctgtggaggcaggccgaggcggagcacaagatcgacctccggctgaagcccgccttggagaccctggacgagctgctggcggcgggcgaggccggcaccttcgacgtggccgtggtggatgcggacaaggagaactgctccgcctactacgagcgctgcctgcagctgctgcgacccggaggcatcctcgccgtcctcagagtcctgtggcgcgggaaggtgctgcaacctccgaaaggggacgtggcggccgagtgtgtgcgaaacctaaacgaacgcatccggcgggacgtcagggtctacatcagcctcctgcccctgggcgatggactcaccttggccttcaagatctagggctggcccctagtgagtgggctcgagggagggttgcctgggaaccccaggaattgaccctgagttttaaattcgaaaataaagtggggctgggacacacgac

SEQ ID NO: 6035 - protein, 232 aa, Homo sapiens
MAGATLSFHAADPGAAAGGFYDDLRAGPALGQPGAAHPGQEGAGPGHLHGLLRPGPGPGAARGRARGDLRGGRAAPGAGTAPVEAGRGGAQDRPPAEARLGDPGRAAGGGRGRHLRRGRGGCGQGELLRLLRALPAAAATRRHPRRPQSPVAREGAATSERGRGGRVCAKPKRTHPAGRQGLHQPPAPGRWTHLGLQDLGLAPSEWARGRVAWEPQELTLSFKFENKVGLGH

SEQ ID NO: 6036 - DNA, 563 bp, Homo sapiens
ctcccgccgcctcctgcccgcgccatgacccagccggtgccccggctctccgtgcccgccgcgctggccctgggctcagccgcactgggcgccgccttcgccactggcctcttcctgggccgaggcggagcacaagatcgacctccggctgaagcccgccttggagaccctggacgagctgctggcggcgggcgaggccggcaccttcgacgtggccgtggtggatgcggacaaggagaactgctccgcctactacgagcgctgcctgcagctgctgcgacccggaggcatcctcgccgtcctcagagtcctgtggcgcgggaaggtgctgcaacctccgaaaggggacgtggcggccgagtgtgtgcgaaacctaaacgaacgcatccggcgggacgtcagggtctacatcagcctcctgcccctgggcgatggactcaccttggccttcaagatctagggctggcccctagtgagtgggctcgagggagggttgcctgggaaccccaggaattgaccctgagttttaaattcgaaaataaagtggggctgggacacacgac

SEQ ID NO: 6037 - protein, 178 aa, Homo sapiens
MTQPVPRLSVPAALALGSAALGAAFATGLFLGRGGAQDRPPAEARLGDPGRAAGGGRGRHLRRGRGGCGQGELLRLLRALPAAAATRRHPRRPQSPVAREGAATSERGRGGRVCAKPKRTHPAGRQGLHQPPAPGRWTHLGLQDLGLAPSEWARGRVAWEPQELTLSFKFENKVGLGH

SEQ ID NO: 6038 - DNA, 976 bp, Homo sapiens
ggcgggcccgcgagtccgagacctgtcccaggagctccagctcacgtgacctgtcactgcctcccgccgcctcctgcccgcgccatgacccagccggtgccccggctctccgtgcccgccgcgctggccctgggctcagccgcactgggcgccgccttcgccactggcctcttcctggggaggcggtgccccccatggcgaggccggcgagagcagtgcctgcttccccccgaggacagccgcctgtggcagtatcttctgagccgctccatgcgggagcacccggcgctgcgaagcctgaggctgctgaccctggagcagccgcagggggattctatgatgacctgcgagcaggcccagctcttggccaacctggcgcggctcatccaggccaagaaggcgctggacctgggcaccttcacgggctactccgccctggccctggccctggcgctgcccgcggacgggcgcgtggtgacctgcgaggtggacgcgcagcccccggagctgggacggcccctgtggaggcaggccgaggcggagcacaagatcgacctccggctgaagcccgccttggagaccctggacgagctgctggcggcgggcgaggccggcaccttcgacgtggccgtggtggatgcggacaaggagaactgctccgcctactacgagcgctgcctgcagctgctgcgacccggaggcatcctcgccgtcctcagagtcctgtggcgcgggaaggtgctgcaacctccgaaaggggacgtggcggccgagtgtgtgcgaaacctaaacgaacgcatccggcgggacgtcagggtctacatcagcctcctgcccctgggcgatggactcaccttggccttcaagatctagggctggcccctagtgagtgggctcgagggagggttgcctgggaaccccaggaattgaccctgagttttaaattcgaaaataaagtggggctgggacacacgac

SEQ ID NO: 6039 - protein, 262 aa, Homo sapiens; identical to SEQ ID NO: 802

SEQ ID NO: 6040 - DNA, 1467 bp, Homo sapiens
cccgacaaggtggagcccggcgggcccgcgagtccgagacctgtcccaggagctccagctcacgtgacctgtcactgcctcccgccgcctcctgcccgcgccatgacccagccggtgccccggctctccgtgcccgccgcgctggccctgggctcagccgcactgggcgccgccttcgccactggcctcttcctgggtgagcaggacctggtcccggcgggcgggtgggcgggcgcagagtagggcgcggcgtggctcaggttaatccaacaccctctccccgtcagggaggcggtgccccccatggcgaggccggcgagagcagtgcctgcttccccccgaggacagccgcctgtggcagtatcttctgagccgctccatgcgggagcacccggcgctgcgaagcctgaggctgctgaccctggagcagccgcagggggattctatgatgacctgcgagcaggcccagctcttggccaacctggcgcggctcatccaggccaagaaggcgctggacctgggcaccttcacgggctactccgccctggccctggccctggcgctgcccgcggacgggcgcgtggtgacctgcgaggtggacgcgcagcccccggagctgggacggcccctgtggaggcaggccgaggcggagcacaagatcgacctccggctgaagcccgccttggagaccctggacgagctgctggcggcgggcgaggccggcaccttcgacgtggccgtggtggatgcggacaaggagaactgctccgcctactacgagcgctgcctgcagctgctgcgacccggaggcatcctcgccgtcctcagagtaagggatccactgcgggggaggagaaagcaccctgtcgggccgggtccccatcttttcccttgactcctcttataccccaaagccccacccagtccagtcacgtaggctacaccccctccggggctccggccccggtacccaggctttcctccgctttggttctgtctccagctctggtcacctcctgcccgggcacctccctccgaggccccgcctcccgcccagacacctccctccgagaccccgccttccgtctgggcacctccctccaagaccccgcctcccgcccgggcacctccctcccagtcccccgccttccgcccgagcacctccctccgaagccccgcctcccacggcccggttggccccgccctcccgcaggtcctgtggcgcgggaaggtgctgcaacctccgaaaggggacgtggcggccgagtgtgtgcgaaacctaaacgaacgcatccggcgggacgtcagggtctacatcagcctcctgcccctgggcgatggactcaccttggccttcaagatctagggctggcccctagtgagtgggctcgagggagggttgcctgggaaccccaggaattgaccctgagttttaaattcgaaaataaagtggggctgggacacacg

SEQ ID NO: 6041 - protein, 387 aa, Homo sapiens
MARPARAVPASPRGQPPVAVSSEPLHAGAPGAAKPEAADPGAAAGGFYDDLRAGPALGQPGAAHPGQEGAGPGHLHGLLRPGPGPGAARGRARGDLRGGRAAPGAGTAPVEAGRGGAQDRPPAEARLGDPGRAAGGGRGRHLRRGRGGCGQGELLRLLRALPAAAATRRHPRRPQSKGSTAGEEKAPCRAGSPSFPLTPLIPQSPTQSSHVGYTPSGAPAPVPRLSSALVLSPALVTSCPGTSLRGPASRPDTSLRDPAFRLGTSLQDPASRPGTSLPVPRLPPEHLPPKPRLPRPGWPRPPAGPVAREGAATSERGRGGRVCAKPKRTHPAGRQGLHQPPAPGRWTHLGLQDLGLAPSEWARGRVAWEPQELTLSFKFENKVGLGH

SEQ ID NO: 6042 - DNA, 792 bp, Homo sapiens
ctcccccagctgcaagggaggctgtgaaatgaagtctctagttggatagcagtaagtcctgctgagttcagcagttgctgttcctaaaaggaagaaatgggtagaatggatattggtggacatttagagacaaggaaactggacaactctagactgttgccaggagtcaggagaagacaacagacgatggtacttaaggctttggctttggaaaaagagatacctggattctgatcctgaagtctctcacttaaactttacaagtctcactttctcatcagataaccttatcttgtacaagattcatgtgttggtgagctcatttccaccagaactcagcccaggctgctgtgggatggaatcacctgcacccggatgttctttctgggctggtacatacagtttcaccagcaacagagaaagcagaagccatcctgggcaaacctggacaggtggtcaccgtgtgaaacctgaagtcccctttgatcctcccatctggttacaaccacccccaatcagagctgcctggaccttgcccggcctcctcctcactcaccgagccaccggaataaagttggaagtgtttgtgctgtactttaatcagcatttaatgacccagtcgaaaattcattgtttggacccaagcactggtgggaaaggcaggaggggaggcctgccttccttcctccctcccgagccctacagcaggccatggagtggtgagcgagttcgtacagtgccaaccacattcccagaaacttccagcagaggttaatcctgctcctctcaggt

SEQ ID NO: 6043 - protein, 139 aa, Homo sapiens
MESPAPGCSFWAGTYSFTSNRESRSHPGQTWTGGHRVKPEVPFDPPIWLQPPPIRAAWTLPGLLLTHRATGIKLEVFVLYFNQHLMTQSKIHCLDPSTGGKGRRGGLPSFLPPEPYSRPWSGERVRTVPTTFPETSSRG

SEQ ID NO: 6044 - DNA, 1142 bp, Homo sapiens
ggcgcgggacgcgtcacatccccttgaccctccaatcacctcgggctcccatttgattggaaggcggcaaaggctttaatctcccccttggtgcagctgcttttgaagtgagtttcctcgccagagccccggctggacacgcagcggctcgcatcgcagagcgcagcgccggcgcggggccgcgagaacgcagcgcaggggagcagcccgaggcggacaccgcgagccgcccggcactcccgcagtccagccggctcctctagcccggccacggctccgctgcgggccacccaggattactcgcgtctggctccaggcgccgagaaggcgcgctgggcgcccgtggccgccgcgccagctcctcctcctcccgctgctcctgctcccggggcgagcgcgcagccccgagcccgccccgcgcctcccggagccctcccccccgctgctcccatgcgcgcgggtgggtcatgagcacagcgccctcgctttctgccctaagaagcagtaagcacagcggcggcggcggcggcggaggcggaggcggcggtgcagaccctgcctggaccagcgcgctctctggaaatagctccggccccggcccaggctcgtccccggccggcagcaccaagccttttgtgcacgccgtgcccccctctgaccccctgcgccaggccaaccgcctgccaatcaaggtgctgaagatgctgacggcacgaactggccacattttgcaccccgagtacctgcagcccctgccttccacgccggtcagccccatcgaggaggaggattgacaccagccacacgtatgtctgctgctgacaaatgtgcgcacgccttggagggcggggccaggcaggacagagccgcccatgacagggggacacctcctgttctagaattcttggactgattatccatcttgacaaaggaggccttgaatcaaatttaatctggtttagtgcacttatcaaagagacatcggagagatcccttgtgccttctgccatgtgagttatagtgagaagacagccatctactaggaatcagaccgtcatcagacaccaaatctgccagcaccttgatcttagatttcccagactccagaactgttagaaataaatttctgttgtttataagcc

SEQ ID NO: 6045 - protein, 108 aa, Homo sapiens
MSTAPSLSALRSSKHSGGGGGGGGGGGADPAWTSALSGNSSGPGPGSSPAGSTKPFVHAVPPSDPLRQANRLPIKVLKMLTARTGHILHPEYLQPLPSTPVSPIEEED

SEQ ID NO: 6046 - DNA, 380 bp, Homo sapiens
tgacaaatgtgcgcacgccttggagggcggggccaggcaggacagagccgcccatgacagggggacacctcctggacagcagccagattacctccaactccagaccaccacattcaacaccacagtgaacatctctttctagaattcttggactgattatccatcttgacaaaggaggccttgaatcaaatttaatctggtttagtgcacttatcaaagagacatcggagagatcccttgtgccttctgccatgtgagttatagtgagaagacagccatctactaggaatcagaccgtcatcagacaccaaatctgccagcaccttgatcttagatttcccagactccagaactgttagaaataaatttctgttgtttat

SEQ ID NO: 6047 - protein, 46 aa, Homo sapiens
DKCAHALEGGARQDRAAHDRGTPPGQQPDYLQLQTTTFNTTVNISF

SEQ ID NO: 6048 - DNA, 2200 bp, Homo sapiens
ctacactcgactgtatgttaacaaacctaattatagccccgtggtaataaattgggccagggccctggctgcacatctctgaggtcatgtctaggagagctgtttgaccctcttgtctcagggaagagaattgtcctggagaggggtccctgtctcagcatggtagaggggctgttttctccctgacctagttgtccagcccctgggaggatgggtggatgccaggaagcatttcagagcggaaggtcatcggcatgagaactgggtattaggatttgctggaggagaccggaagggcagtggcttctgagccattggcccctttcacgttgtgagtggcatcaggatgtctgagaggagagcatggtgtttttgcttcattggatccatgcaggtcttggagggtggtggcccactctttctgggccaagtagagggtggctcagacacccccccttcctccaggcttctcatctgtaactggtgaagcccggaagagcttgttgttcaagaggaaatcttgtgttacttctttatgaaggactccagcctggtggagatgaatgagtcctgaagatggaatcgaagctgtttgggcacaatactttaatcagcatttaatgacccagtcgaaaattcattgtttggacccaagcactggtgggaaaggcaggaggggaggcctgccttccttcctccctcccgagccctacagcaggccatggagtggtgagcgagttcgtacagtgccaaccacattcccagaaacttccagcagaggttaatcctgctcctctcaggtaggagacaatgaatggattttaacaaatggactccctgtgttagctaatgccagtccctactcaacctaggatgactccaatggcgcatgtccccattcccgggccctaaggctgcgctaacatgctatcctgcctgccccttcattctccaccctgccacattcccactcctttcccctcccaacacgaagccatgcctgagctggacacccttccataccaacccaggaaaaagtgattcagctccggtccaccctgggtgcagcggtccttctgccaagatgccttcatatcatacagctattattttcgggaggattccaagtgagggcagtcagggtgggcttggcccattctctagactttggaaggtaatgttctatagaggcctgttctgaagctttaccaggtcaaaccggagaagaacccaacaagtaactcatcccagcctaactattcttcaagggcaatcaacctacagcatccaagcacagagaaatcaaatccatggagaatcttcaaattaggctcagaatccatttgggtcaatgaatttactgttattaagatcttagttgtgttcaaccatgatttgacataccttagagtgagaagatattcttcctggcctcagactagttgaaggtagagagagagacaggcccttgggtgtggggagacctctcctgggataatacacacaaaaaaccaagagctgctcactgtggtgcaggagacagcagggcctgaagccagaggctctgtgtccttgaatacaatgttttactcctctgacccctgttactgtgatttggagaggcagacaatataggatgggctttgcaggcagggaggtccagttataatcccagctcttactaagttgggtaagactcactctgagacttagtttcttctgtcatctctcaatagaatcataaaggtactttcctcttagtgttgttttaaaattcagtaaaataatgcaggcttagcacagggtctgatgtaaattttcaatgaattatcgttgtcaatattgttctggaaaacaagagggcatattagaagatcaaaagtactgccaagcattgaagtgccaattctagatccagtctcagccctctgagaatggatatcattgttttcaagccattcagaaaccaatgtgaattgaacacctagtatgagctctctgagggaagagccaagtcatgcattttttatcttaaggggtcttcaatacctctagcccaaaacagtatctccatcaggattcttctctgatagtgttcatttcttttttctcaatggatgccttaaaaaaaaaatcctacaaggaaacctgtactcctcaaatacaccactcaggtgaccattaaatcatttacattgtt

SEQ ID NO: 6049 - protein, 103 aa, Homo sapiens
MSPFPGPKAALTCYPACPFILHPATFPLLSPPNTKPCLSWTPFHTNPGKSDSAPVHPGCSGPSAKMPSYHTAIIFGRIPSEGSQGGLGPFSRLWKVMFYRGLF

SEQ ID NO: 6050 - DNA, 1858 bp, Homo sapiens
ctacactcgactgtatgttaacaaacctaattatagccccgtggtaataaattgggccagggccctggctgcacatctctgaggtcatgtctaggagagctgtttgaccctcttgtctcagggaagagaattgtcctggagaggggtccctgtctcagcatggtagaggggctgttttctccctgacctagttgtccagcccctgggaggatgggtggatgccaggaagcatttcagagcggaaggtcatcggcatgagaactgggtattaggatttgctggaggagaccggaagggcagtggcttctgagccattggcccctttcacgttgtgagtggcatcaggatgtctgagaggagagcatggtgtttttgcttcattggatccatgcaggtcttggagggtggtggcccactctttctgggccaagtagagggtggctcagacacccccccttcctccaggcttctcatctgtaactggtgaagcccggaagagcttgttgttcaagaggaaatcttgtgttacttctttatgaaggactccagcctggtggagatgaatgagtcctgaagatggaatcgaagctgtttgggcacaatactttaatcagcatttaatgacccagtcgaaaattcattgtttggacccaagcactggtgggaaaggcaggaggggaggcctgccttccttcctccctcccgagccctacagcaggccatggagtggtgagcgagttcgtacagtgccaaccacattcccagaaacttccagcagaggttaatcctgctcctctcaggtgggcttggcccattctctagactttggaaggtaatgttctatagaggcctgttctgaagctttaccaggtcaaaccggagaagaacccaacaagtaactcatcccagcctaactattcttcaagggcaatcaacctacagcatccaagcacagagaaatcaaatccatggagaatcttcaaattaggctcagaatccatttgggtcaatgaatttactgttattaagatcttagttgtgttcaaccatgatttgacataccttagagtgagaagatattcttcctggcctcagactagttgaaggtagagagagagacaggcccttgggtgtggggagacctctcctgggataatacacacaaaaaaccaagagctgctcactgtggtgcaggagacagcagggcctgaagccagaggctctgtgtccttgaatacaatgttttactcctctgacccctgttactgtgatttggagaggcagacaatataggatgggctttgcaggcagggaggtccagttataatcccagctcttactaagttgggtaagactcactctgagacttagtttcttctgtcatctctcaatagaatcataaaggtactttcctcttagtgttgttttaaaattcagtaaaataatgcaggcttagcacagggtctgatgtaaattttcaatgaattatcgttgtcaatattgttctggaaaacaagagggcatattagaagatcaaaagtactgccaagcattgaagtgccaattctagatccagtctcagccctctgagaatggatatcattgttttcaagccattcagaaaccaatgtgaattgaacacctagtatgagctctctgagggaagagccaagtcatgcattttttatcttaaggggtcttcaatacctctagcccaaaacagtatctccatcaggattcttctctgatagtgttcatttcttttttctcaatggatgccttaaaaaaaaaatcctacaaggaaacctgtactcctcaaatacaccactcaggtgaccattaaatcatttacattgtt

SEQ ID NO: 6051 - protein, 73 aa, Homo sapiens
MSPEDGIEAVWAQYFNQHLMTQSKIHCLDPSTGGKGRRGGLPSFLPPEPYSRPWSGERVRTVPTTFPETSSRG

SEQ ID NO: 6052 - DNA, 3347 bp, Homo sapiens
ctggcagcggcggcggcggcggcgcgggacgcgtcacatccccttgaccctccaatcacctcgggctcccatttgattggaaggcggcaaaggctttaatctcccccttggtgcagctgcttttgaagtgagtttcctcgccagagccccggctggacacgcagcggctcgcatcgcagagcgcagcgccggcgcggggccgcgagaacgcagcgcaggggagcagcccgaggcggacaccgcgagccgcccggcactcccgcagtccagccggctcctctagcccggccacggctccgctgcgggccacccaggattactcgcgtctggctccaggcgccgagaaggcgcgctgggcgcccgtggccgccgcgccagctcctcctcctcccgctgctcctgctcccggggcgagcgcgcagccccgagcccgccccgcgcctcccggagccctcccccccgctgctcccatgcgcgcgggtgggtcatgagcacagcgccctcgctttctgccctaagaagcagtaagcacagcggcggcggcggcggcggaggcggaggcggcggtgcagaccctgcctggaccagcgcgctctctggaaatagctccggccccggcccaggctcgtccccggccggcagcaccaagccttttgtgcacgccgtgcccccctctgaccccctgcgccaggccaaccgcctgccaatcaaggtgctgaagatgctgacggcacgaactggccacattttgcaccccgagtacctgcagcccctgccttccacgccggtcagccccatcgagctcgatgccaagaagagcccgctggcgctgttggcgcaaacatgttcgcagatcgggaagcccgacccctcgccctcctccaaactctcctcggttgcctccaacgggggcggcgcgggcggtgccggcggcggtgctgcgggcgacaaggacaccaaatcgggccccctgaagctgagcgacatcggcgtggaggacaagtcgagtttcaagccgtactccaaacccggctcggataagaaggagccgggaggcggcggtggaggcggtggcggtggcgggggcggcggcgggggtgtttcgtcggagaagtcgggattccgggtaccgagcgccacctgccagccattcacgcccaggacaggcagcccgagctccagcgcctcggcctgctcgccgggaggtatgctgtcctcggccgggggtgccccggagggcaaggacgacaagaaagacaccgacgtgggcggcggtggcaagggcaccgggggcgcctcggccgaagggggacccacggggctggcacacggccggattagctgcggcggcgggattaatgtggatgtgaaccagcatccggatgggggcccgggaggcaaggctctgggctcggactgcggcggttcatcgggctccagctccggctccggccccagcgcgcccacctcctcctcagtgttgggctctgggctggtggctcccgtgtcaccctacaagccgggccagacagtgttccctctgcctcccgcgggtatgacctacccaggcagcctggccggggcctacgccggctacccgccccagttcctgccacacggcgtggcacttgaccccaccaagccgggcagcctggtgggggcgcagctggcggcggccgcggccgggtctctgggctgcagtaagccggccggctccagccctttggccggagcgtctccgccgtccgtgatgacagccagtttgtgccgggacccttactgcctcagctaccactgcgctagccacctggcaggggcggcggccgccagcgcttcttgcgcacatgatccggctgctgcggctgcggcgctgaagtccggatacccgctggtgtaccccacgcacccgctgcacggtgtgcactcctcgctaacggccgccgcggctgctggcgccacaccgccctccctggccggccaccccctctacccctacggctttatgctccctaacgacccactcccccacatctgcaactgggtgtcggccaacgggccgtgcgacaagcgcttcgccacgtccgaagagctgctgagccacttgcggacccatacggcatttcccgggacagacaaactgctgtcgggctaccccagctcgtcgtctctggccagcgctgccgcggccgccatggcttgccacatgcacatccccacctcgggcgcaccgggcagccctgggacgctggcgctgcgcagcccccaccacgcgctgggactcagcagccgctaccacccctactccaagagcccgcttcccacgcctggcgcccccgtgccggtgcccgccgccaccggaccgtactactccccctacgccctctacggacagagactgaccaccgcctcggcgctggggtatcagtgagggcggccgggagggcgagcgagggagaggagggagagggggaggggaggagtccagggagaggcgggatcacggcccaggctgctgacacccgcgcgtggggaggactcgggccacgaaaggaaagaaatgtataccgtatctatctacccgacagcagcgaccgagacccggtgggacactccccttctccccactttcacctccccacccaaactttataaaagttgaaaaaatatcatttgactttttatagaaaaaaaaaggaaaaaataattgagaaagtgttcatctgaggactgcatcggtggacactggtatttatttatgttagctccaagcggaccggtggttcaaaagtgcattatttagtttgagctctgtaggtaaaaaggaggtgggaaaaattttaaaacttgagggtaaaaatgtggaaaacaaaccctcccatcccttgtagattataaataaaagcaaaaccgccacagaactagaggtcttctctttaatgttactttaaaattgctatgattgtattgtacgttatttaatgtctgattgaaacacaaatttacatgcatgtttgttacaaaaaaaatgaaaaaaaaagtcacaatttgtcagctctgatttcaaattgcaattatttttaaggtgtataccatcgaagagaatgggtatttttttgtatgtattctggaagaaaacaacaaaaaaaaaaagaaaaagaaaaaattctattccaaaacctcatttgccttattttgttctttaaaaggaacacttaactatttttaatttttaagtccacccgctgagaaggggacaaggtttacgtcatgtactaaaataatagacaatgtatcgctttaaagattaaaattccgtatatttgatgtattaaagggttttacttctt

SEQ ID NO: 6053 - protein, 646 aa, Homo sapiens; identical to SEQ ID NO: 806

SEQ ID NO: 6054 - DNA, 2258 bp, Homo sapiens
ctggcagcggcggcggcggcggcgcgggacgcgtcacatccccttgaccctccaatcacctcgggctcccatttgattggaaggcggcaaaggctttaatctcccccttggtgcagctgcttttgaagtgagtttcctcgccagagccccggctggacacgcagcggctcgcatcgcagagcgcagcgccggcgcggggccgcgagaacgcagcgcaggggagcagcccgaggcggacaccgcgagccgcccggcactcccgcagtccagccggctcctctagcccggccacggctccgctgcgggccacccaggattactcgcgtctggctccaggcgccgagaaggcgcgctgggcgcccgtggccgccgcgccagctcctcctcctcccgctgctcctgctcccggggcgagcgcgcagccccgagcccgccccgcgcctcccggagccctcccccccgctgctcccatgcgcgcgggtgggtcatgagcacagcgccctcgctttctgccctaagaagcagtaagcacagcggcggcggcggcggcggaggcggaggcggcggtgcagaccctgcctggaccagcgcgctctctggaaatagctccggccccggcccaggctcgtccccggccggcagcaccaagccttttgtgcacgccgtgcccccctctgaccccctgcgccaggccaaccgcctgccaatcaaggtgctgaagatgctgacggcacgaactggccacattttgcaccccgagtacctgcagcccctgccttccacgccggtcagccccatcgagctcgatgccaagaagagcccgctggcgctgttggcgcaaacatgttcgcagatcgggaagcccgacccctcgccctccctggccggccaccccctctacccctacggctttatgctccctaacgacccactcccccacatctgcaactgggtgtcggccaacgggccgtgcgacaagcgcttcgccacgtccgaagagctgctgagccacttgcggacccatacggcatttcccgggacagacaaactgctgtcgggctaccccagctcgtcgtctctggccagcgctgccgcggccgccatggcttgccacatgcacatccccacctcgggcgcaccgggcagccctgggacgctggcgctgcgcagcccccaccacgcgctgggactcagcagccgctaccacccctactccaagagcccgcttcccacgcctggcgcccccgtgccggtgcccgccgccaccggaccgtactactccccctacgccctctacggacagagactgaccaccgcctcggcgctggggtatcagtgagggcggccgggagggcgagcgagggagaggagggagagggggaggggaggagtccagggagaggcgggatcacggcccaggctgctgacacccgcgcgtggggaggactcgggccacgaaaggaaagaaatgtataccgtatctatctacccgacagcagcgaccgagacccggtgggacactccccttctccccactttcacctccccacccaaactttataaaagttgaaaaaatatcatttgactttttatagaaaaaaaaaggaaaaaataattgagaaagtgttcatctgaggactgcatcggtggacactggtatttatttatgttagctccaagcggaccggtggttcaaaagtgcattatttagtttgagctctgtaggtaaaaaggaggtgggaaaaattttaaaacttgagggtaaaaatgtggaaaacaaaccctcccatcccttgtagattataaataaaagcaaaaccgccacagaactagaggtcttctctttaatgttactttaaaattgctatgattgtattgtacgttatttaatgtctgattgaaacacaaatttacatgcatgtttgttacaaaaaaaatgaaaaaaaaagtcacaatttgtcagctctgatttcaaattgcaattatttttaaggtgtataccatcgaagagaatgggtatttttttgtatgtattctggaagaaaacaacaaaaaaaaaaagaaaaagaaaaaattctattccaaaacctcatttgccttattttgttctttaaaaggaacacttaactatttttaatttttaagtccacccgctgagaaggggacaaggtttacgtcatgtactaaaataatagacaatgtatcgctttaaagattaaaattccgtatatttgatgtattaaagggttttacttctt

SEQ ID NO: 6055 - protein, 283 aa, Homo sapiens
MSTAPSLSALRSSKHSGGGGGGGGGGGADPAWTSALSGNSSGPGPGSSPAGSTKPFVHAVPPSDPLRQANRLPIKVLKMLTARTGHILHPEYLQPLPSTPVSPIELDAKKSPLALLAQTCSQIGKPDPSPSLAGHPLYPYGFMLPNDPLPHICNWVSANGPCDKRFATSEELLSHLRTHTAFPGTDKLLSGYPSSSSLASAAAAAMACHMHIPTSGAPGSPGTLALRSPHHALGLSSRYHPYSKSPLPTPGAPVPVPAATGPYYSPYALYGQRLTTASALGYQ

SEQ ID NO: 6056 - DNA, 759 bp, Homo sapiens
gcgatacattgtctattattttagtacatgacgtaaaccttgtccccttctcagcgggtggacttaaaaattaaaaatagttaagtgttccttttaaagaacaaaataaggcaaatgaggttttggaatagaattttttctttttctttttttttttgttgttttcttccagaatacatacaaaaaaatacccattctcttcgatggtatacaccttaaaaataattgcaatttgaaatcagagctgacaaattgtgactttttttttcattttttttgtaacaaacatgcatgtaaatttgtgtttcaatcagacattaaataacgtacaatacaatcatagcaattttaaagtaacattaaagagaagacctctagttctgtggcggttttgcttttatttataatctacaagggatgggagggtttgttttccacatttttaccctcaagttttaaaatttttcccacctcctttttacctacagagctcaaactaaataatgcacttttgaaccaccggtccgcttggagctaacataaataaataccagtgtccaccgatgcagtcctcagatgaacactttctcaattattttttcctttttttttctataaaaagtcaaatgatattttttcaacttttataaagtttgggtggggaggtgaaagtggggagaaggggagtcataaagccgtaggggtagagggggtggccggccagggagggcggtgtggcgccagcagccgcggcggccg

SEQ ID NO: 6057 - protein, 39 aa, Homo sapiens
MHVNLCFNQTLNNVQYNHSNFKVTLKRRPLVLWRFCFYL

SEQ ID NO: 6058 - DNA, 2916 bp, Homo sapiens
ctggcagcggcggcggcggcggcgcgggacgcgtcacatccccttgaccctccaatcacctcgggctcccatttgattggaaggcggcaaaggctttaatctcccccttggtgcagctgcttttgaagtgagtttcctcgccagagccccggctggacacgcagcggctcgcatcgcagagcgcagcgccggcgcggggccgcgagaacgcagcgcaggggagcagcccgaggcggacaccgcgagccgcccggcactcccgcagtccagccggctcctctagcccggccacggctccgctgcgggccacccaggattactcgcgtctggctccaggcgccgagaaggcgcgctgggcgcccgtggccgccgcgccagctcctcctcctcccgctgctcctgctcccggggcgagcgcgcagccccgagcccgccccgcgcctcccggagccctcccccccgctgctcccatgcgcgcgggtgggtcatgagcacagcgccctcgctttctgccctaagaagcagtaagcacagcggcggcggcggcggcggaggcggaggcggcggtgcagaccctgcctggaccagcgcgctctctggaaatagctccggccccggcccaggctcgtccccggccggcagcaccaagccttttgtgcacgccgtgcccccctctgaccccctgcgccaggccaaccgcctgccaatcaaggtgctgaagatgctgacggcacgaactggccacattttgcaccccgagtacctgcagcccctgccttccacgccggtcagccccatcgagctcgatgccaagaagagcccgctggcgctgttggcgcaaacatgttcgcagatcgggaagcccgacccctcgccctcctccaaactctcctcggttgcctccaacgggggcggcgcgggcggtgccggcggcggtgctgcgggcgacaaggacaccaaatcgggccccctgaagctgagcgacatcggcgtggaggacaagtcgagtttcaagccgtactccaaacccggctcggataagaaggagccgggaggcggcggtggaggcggtggcggtggcgggggcggcggcgggggtgtttcgtcggagaagtcgggattccgggtaccgagcgccacctgccagccattcacgcccaggacaggcagcccgagctccagcgcctcggcctgctcgccgggaggtatgctgtcctcggccgggggtgccccggagggcaaggacgacaagaaagacaccgacgtgggcggcggtggcaagggcaccgggggcgcctcggccgaagggggacccacggggctggcacacggccggattagctgcggcggcgggattaatgtggatgtgaaccagcatccggatgggggcccgggaggcaaggctctgggctcggactgcggcggttcatcgggctccagctccggctccggccccagcgcgcccacctcctcctcagtgttgggctctgggctggtggctcccgtgtcaccctacaagccgggccagacagtgttccctctgcctcccgcgggtatgacctacccaggcagcctggccggggcctacgccggctacccgccccagttcctgccacacggcgtggcacttgaccccaccaagccgggcagcctggtgggggcgcagctggcggcggccgcggccgggtctctgggctgcagtaagccggccggctccagccctttggccggagcgtctccgccgtccgtgatgacagccagtttgtgccgggacccttactgcctcagctaccactgcgctagccacctggcaggggcggcggccgccagcgcttcttgcgcacatgatccggctgctgcggctgcggcgctgaagtccggatacccgctggtgtaccccacgcacccgctgcacggtgtgcactcctcgctaacggccgccgcggctgctggcgccacaccgccctccctggccggccaccccctctacccctacggctttatgctccctaacgacccactcccccacatctgcaactgggtgtcggccaacgggccgtgcgacaagcgcttcgccacgtccgaagagctgctgagccacttgcggacccatacggcatttcccgggacagacaaactgctgtcgggctaccccagctcgtcgtctctggccagcgctgccgcggccgccatggcttgccacatgcacatccccacctcgggcgcaccgggcagccctgggacgctggcgctgcgcagcccccaccacgcgctgggactcagcagccgctaccacccctactccaagagcccgcttcccacgcctggcgcccccgtgccggtgcccgccgccaccggaccgtactactccccctacgccctctacggacagagactgaccaccgcctcggcgctggggtatcagtgagggcggccgggagggcgagcgagggagaggagggagagggggaggggaggagtccagggagaggcgggatcacggcccaggctgctgacacccgcgcgtggggaggactcgggccacgaaaggaaagaaatgtataccgtatctatctacccgacagcagcgaccgagacccggtgggacactccccttctccccactttcacctccccacccaaactttataaaagttgaaaaaatatcatttgactttttatagaaaaaaaaaggaaaaaataattgagaaagtgttcatctgaggactgcatcggtggacactggtatttatttatgttagctccaagcggaccggtggttcaaaagtgcattatttagtttgagctctgtaggtaaaaaggaggtgggaaaaattttaaaacttgagggtaaaaatgtggaaaacaaaccctcccatcccttgtagattataaataaaagcaaaaccgccacag

SEQ ID NO: 6059 - protein, 646 aa, Homo sapiens; identical to SEQ ID NO: 806

SEQ ID NO: 6060 - DNA, 2805 bp, Homo sapiens
ctggcagcggcggcggcggcggcgcgggacgcgtcacatccccttgaccctccaatcacctcgggctcccatttgattggaaggcggcaaaggctttaatctcccccttggtgcagctgcttttgaagtgagtttcctcgccagagccccggctggacacgcagcggctcgcatcgcagagcgcagcgccggcgcggggccgcgagaacgcagcgcaggggagcagcccgaggcggacaccgcgagccgcccggcactcccgcagtccagccggctcctctagcccggccacggctccgctgcgggccacccaggattactcgcgtctggctccaggcgccgagaaggcgcgctgggcgcccgtggccgccgcgccagctcctcctcctcccgctgctcctgctcccggggcgagcgcgcagccccgagcccgccccgcgcctcccggagccctcccccccgctgctcccatgcgcgcgggtgggtcatgagcacagcgccctcgctttctgccctaagaagcagtaagcacagcggcggcggcggcggcggaggcggaggcggcggtgcagaccctgcctggaccagcgcgctctctggaaatagctccggccccggcccaggctcgtccccggccggcagcaccaagccttttgtgcacgccgtgcccccctctgaccccctgcgccaggccaaccgcctgccaatcaaggtgctgaagatgctgacggcacgaactggccacattttgcaccccgagtacctgcagcccctgccttccacgccggtcagccccatcgagctcgatgccaagaagagcccgctggcgctgttggcgcaaacatgttcgcagatcgggaagcccgacccctcgccctcctccaaactctcctcggttgcctccaacgggggcggcgcgggcggtgccggcggcggtgctgcgggcgacaaggacaccaaatcgggccccctgaagctgagcgacatcggcgtggaggacaagtcgagtttcaagccgtactccaaacccggctcggataagaaggagccgggaggcggcggtggaggcggtggcggtggcgggggcggcggcgggggtgtttcgtcggagaagtcgggattccgggtaccgagcgccacctgccagccattcacgcccaggacaggcagcccgagctccagcgcctcggccgaagggggacccacggggctggcacacggccggattagctgcggcggcgggattaatgtggatgtgaaccagcatccggatgggggcccgggaggcaaggctctgggctcggactgcggcggttcatcgggctccagctccggctccggccccagcgcgcccacctcctcctcagtgttgggctctgggctggtggctcccgtgtcaccctacaagccgggccagacagtgttccctctgcctcccgcgggtatgacctacccaggcagcctggccggggcctacgccggctacccgccccagttcctgccacacggcgtggcacttgaccccaccaagccgggcagcctggtgggggcgcagctggcggcggccgcggccgggtctctgggctgcagtaagccggccggctccagccctttggccggagcgtctccgccgtccgtgatgacagccagtttgtgccgggacccttactgcctcagctaccactgcgctagccacctggcaggggcggcggccgccagcgcttcttgcgcacatgatccggctgctgcggctgcggcgctgaagtccggatacccgctggtgtaccccacgcacccgctgcacggtgtgcactcctcgctaacggccgccgcggctgctggcgccacaccgccctccctggccggccaccccctctacccctacggctttatgctccctaacgacccactcccccacatctgcaactgggtgtcggccaacgggccgtgcgacaagcgcttcgccacgtccgaagagctgctgagccacttgcggacccatacggcatttcccgggacagacaaactgctgtcgggctaccccagctcgtcgtctctggccagcgctgccgcggccgccatggcttgccacatgcacatccccacctcgggcgcaccgggcagccctgggacgctggcgctgcgcagcccccaccacgcgctgggactcagcagccgctaccacccctactccaagagcccgcttcccacgcctggcgcccccgtgccggtgcccgccgccaccggaccgtactactccccctacgccctctacggacagagactgaccaccgcctcggcgctggggtatcagtgagggcggccgggagggcgagcgagggagaggagggagagggggaggggaggagtccagggagaggcgggatcacggcccaggctgctgacacccgcgcgtggggaggactcgggccacgaaaggaaagaaatgtataccgtatctatctacccgacagcagcgaccgagacccggtgggacactccccttctccccactttcacctccccacccaaactttataaaagttgaaaaaatatcatttgactttttatagaaaaaaaaaggaaaaaataattgagaaagtgttcatctgaggactgcatcggtggacactggtatttatttatgttagctccaagcggaccggtggttcaaaagtgcattatttagtttgagctctgtaggtaaaaaggaggtgggaaaaattttaaaacttgagggtaaaaatgtggaaaacaaaccctcccatcccttgtagattataaataaaagcaaaaccgccacag

SEQ ID NO: 6061 - protein, 609 aa, Homo sapiens
MSTAPSLSALRSSKHSGGGGGGGGGGGADPAWTSALSGNSSGPGPGSSPAGSTKPFVHAVPPSDPLRQANRLPIKVLKMLTARTGHILHPEYLQPLPSTPVSPIELDAKKSPLALLAQTCSQIGKPDPSPSSKLSSVASNGGGAGGAGGGAAGDKDTKSGPLKLSDIGVEDKSSFKPYSKPGSDKKEPGGGGGGGGGGGGGGGGVSSEKSGFRVPSATCQPFTPRTGSPSSSASAEGGPTGLAHGRISCGGGINVDVNQHPDGGPGGKALGSDCGGSSGSSSGSGPSAPTSSSVLGSGLVAPVSPYKPGQTVFPLPPAGMTYPGSLAGAYAGYPPQFLPHGVALDPTKPGSLVGAQLAAAAAGSLGCSKPAGSSPLAGASPPSVMTASLCRDPYCLSYHCASHLAGAAAASASCAHDPAAAAAALKSGYPLVYPTHPLHGVHSSLTAAAAAGATPPSLAGHPLYPYGFMLPNDPLPHICNWVSANGPCDKRFATSEELLSHLRTHTAFPGTDKLLSGYPSSSSLASAAAAAMACHMHIPTSGAPGSPGTLALRSPHHALGLSSRYHPYSKSPLPTPGAPVPVPAATGPYYSPYALYGQRLTTASALGYQ

SEQ ID NO: 6062 - DNA, 1827 bp, Homo sapiens
ctggcagcggcggcggcggcggcgcgggacgcgtcacatccccttgaccctccaatcacctcgggctcccatttgattggaaggcggcaaaggctttaatctcccccttggtgcagctgcttttgaagtgagtttcctcgccagagccccggctggacacgcagcggctcgcatcgcagagcgcagcgccggcgcggggccgcgagaacgcagcgcaggggagcagcccgaggcggacaccgcgagccgcccggcactcccgcagtccagccggctcctctagcccggccacggctccgctgcgggccacccaggattactcgcgtctggctccaggcgccgagaaggcgcgctgggcgcccgtggccgccgcgccagctcctcctcctcccgctgctcctgctcccggggcgagcgcgcagccccgagcccgccccgcgcctcccggagccctcccccccgctgctcccatgcgcgcgggtgggtcatgagcacagcgccctcgctttctgccctaagaagcagtaagcacagcggcggcggcggcggcggaggcggaggcggcggtgcagaccctgcctggaccagcgcgctctctggaaatagctccggccccggcccaggctcgtccccggccggcagcaccaagccttttgtgcacgccgtgcccccctctgaccccctgcgccaggccaaccgcctgccaatcaaggtgctgaagatgctgacggcacgaactggccacattttgcaccccgagtacctgcagcccctgccttccacgccggtcagccccatcgagctcgatgccaagaagagcccgctggcgctgttggcgcaaacatgttcgcagatcgggaagcccgacccctcgccctccctggccggccaccccctctacccctacggctttatgctccctaacgacccactcccccacatctgcaactgggtgtcggccaacgggccgtgcgacaagcgcttcgccacgtccgaagagctgctgagccacttgcggacccatacggcatttcccgggacagacaaactgctgtcgggctaccccagctcgtcgtctctggccagcgctgccgcggccgccatggcttgccacatgcacatccccacctcgggcgcaccgggcagccctgggacgctggcgctgcgcagcccccaccacgcgctgggactcagcagccgctaccacccctactccaagagcccgcttcccacgcctggcgcccccgtgccggtgcccgccgccaccggaccgtactactccccctacgccctctacggacagagactgaccaccgcctcggcgctggggtatcagtgagggcggccgggagggcgagcgagggagaggagggagagggggaggggaggagtccagggagaggcgggatcacggcccaggctgctgacacccgcgcgtggggaggactcgggccacgaaaggaaagaaatgtataccgtatctatctacccgacagcagcgaccgagacccggtgggacactccccttctccccactttcacctccccacccaaactttataaaagttgaaaaaatatcatttgactttttatagaaaaaaaaaggaaaaaataattgagaaagtgttcatctgaggactgcatcggtggacactggtatttatttatgttagctccaagcggaccggtggttcaaaagtgcattatttagtttgagctctgtaggtaaaaaggaggtgggaaaaattttaaaacttgagggtaaaaatgtggaaaacaaaccctcccatcccttgtagattataaataaaagcaaaaccgccacag

SEQ ID NO: 6063 - protein, 283 aa, Homo sapiens; identical to SEQ ID NO: 6055

SEQ ID NO: 6064 - DNA, 1797 bp, Homo sapiens
ggaggaggagctggcgcggcggccacgggcgcccagcgcgccttctcggcgcctggagccagacgcgagtaatcctgggtggcccgcagcggagccgtggccgggctagaggagccggctggactgcgggagtgccgggcggctcgcggtgtccgcctcgggctgctcccctgcgctgcgttctcgcggccccgcgccggcgctgcgctctgcgatgcgagccgctgcgtgtccagccggggctctggcgaggaaactcacttcaaaagcagctgcaccaagggggagattaaagcctttgccgccttccaatcaaatgggagcccgaggtgattggagggtcaaggggatgtgacgcgtcccgcgccgccgccgccgccgctgccaggactctcagtgccggttttaatgggcagctccctcttcgccgcccccctgtgtgtcccctccctcgatttcgctgggaggacgagatggacatttattctacgtttgccatccgccgcctccctcttttttcctcctcgtcgttcttcctttccccagctcgaaaataaactgaaaccttcttttgaaggggggtgcgcgtgaggaacagactgcggggggtgtccagaaggagcaccggtgggagtgtggacaccggccggactgtcaactccaggggcgaagggaacctgcacacccagtgttttttccttcgcagtaatcgagatcccgcgcggcgcagcgcagccaccaggaatcgacgggatttctctggctgtcgtttgcgctgcatttatccgaatacatccagctcgcaggcatcctgcaagaaacggctcccggctcgcgtgtacgccgacacctcggcccaacgcaggactcgaggtggtttctagtgcccgggtggctgcaagtctgccctccgagggaggctggacaagcggcgcccccaggtcgagcggcctctcgctgcctggcagtgcctggcagcccccacctctgccagtgcttcggaaacccgcctggccaggttcgcccgcggtgaaaaatgaaagcaaattccccaacagaggtagccggaactttcctcgacgaaggctccctcctgcgcctgtgtctggagaacccccagagcgctgcaagttagcaagagagattcgatggcggctctggaaggcgcacgaagggtggggcgggggagcaaagaggccactgggtgacccagcctggtccggggtgaaacgctagagaaggcgcctcgccttccttatttcaatgcaactcctcggccccagacggtaaaaatagtttccaagctgccgcggacgcccaggatgtgtttgcagagatcaaactggggaggaggcagctttgtaaaagttgcagaaagattagccgagaagcgtccgcccggcggggctcaagaaagcttggggacagctccatgttccttggggcggaatggcccaagaattggcctgggtaaccccctgcccagttctctgtcctcacttcgagccagtgcttaaataacttcccgccgcctgccctgcaaacttcccggcgcggcgccgttgaggccaggacacagcaaaggctagcaaaaccccgccgcggcgcgctcggccccggccctgagaggctgcgcgggtgggaggaccagtgtggtttctgctcccactcggctgcccagaccctcaagaccgatcccccaactcctgggagcgggtgcttccctctgggagccgagatcttgcggggccagcgagggcgcaaagtgcgcgcgctggcccgcgcgggggcggccgc

SEQ ID NO: 6065 - protein, 64 aa, Homo sapiens
MCLQRSNWGGGSFVKVAERLAEKRPPGGAQESLGTAPCSLGRNGPRIGLGNPLPSSLSSLRASA

SEQ ID NO: 6066 - DNA, 1241 bp, Homo sapiens
tgtgcgcctgccctctcggtgtcggagagacgcccttccacctctgggagcctcggtctgttggggtcgcggagttcgggcgcggctccgggtacccgagaccagcggcggcaacttctaacacgggagatttcccgccaccccaccccgccgccgcgagtcctcgcggggcgtgttgcgtgcggagaatcgacgggatttctctggctgtcgtttgcgctgcatttatccgaatacatccagctcgcaggcatcctgcaagaaacggctcccggctcgcgtgtacgccgacacctcggcccaacgcaggactcgaggtggtttctagtgcccgggtggctgcaagtctgccctccgagggaggctggacaagcggcgcccccaggtcgagcggcctctcgctgcctggcagtgcctggcagcccccacctctgccagtgcttcggaaacccgcctggccaggttcgcccgcggtgaaaaatgaaagcaaattccccaacagaggtagccggaactttcctcgacgaaggctccctcctgcgcctgtgtctggagaacccccagagcgctgcaagttagcaagagagattcgatggcggctctggaaggcgcacgaagggtggggcgggggagcaaagaggccactgggtgacccagcctggtccggggtgaaacgctagagaaggcgcctcgccttccttatttcaatgcaactcctcggccccagacggtaaaaatagtttccaagctgccgcggacgcccaggatgtgtttgcagagatcaaactggggaggaggcagctttgtaaaagttgcagaaagattagccgagaagcgtccgcccggcggggctcaagaaagcttggggacagctccatgttccttggggcggaatggcccaagaattggcctgggtaaccccctgcccagttctctgtcctcacttcgagccagtgcttaaataacttcccgccgcctgccctgcaaacttcccggcgcggcgccgttgaggccaggacacagcaaaggctagcaaaaccccgccgcggcgcgctcggccccggccctgagaggctgcgcgggtgggaggaccagtgtggtttctgctcccactcggctgcccagaccctcaagaccgatcccccaactcctgggagcgggtgcttccctctgggagccgagatcttgcggggccagcgagggcgcaaagtgcgcgcgctggcccgcgcgggggcggccgc

SEQ ID NO: 6067 - protein, 64 aa, Homo sapiens; identical to SEQ ID NO: 6065

SEQ ID NO: 6068 - DNA, 1354 bp, Homo sapiens
gcgagtcctcgcggggcgtgttgcgtgcggaggtcaggctgccaccctctgtagttccctaaccccaaactcggagacttctaagagccacaccaccaaggaacttctagtcctggaggtcaatggtggggcaaacctcgcctcaattctttgaccccctcgggtcgtaagcagggctaagaggctgcgaagaagaggcctggccatgggtgtatgggggaagaaacatctcaggctcactcatgccccctccccgaccttctcccacctgccgccatccccgcaggctggggagccaggaatcgacgggatttctctggctgtcgtttgcgctgcatttatccgaatacatccagctcgcaggcatcctgcaagaaacggctcccggctcgcgtgtacgccgacacctcggcccaacgcaggactcgaggtggtttctagtgcccgggtggctgcaagtctgccctccgagggaggctggacaagcggcgcccccaggtcgagcggcctctcgctgcctggcagtgcctggcagcccccacctctgccagtgcttcggaaacccgcctggccaggttcgcccgcggtgaaaaatgaaagcaaattccccaacagaggtagccggaactttcctcgacgaaggctccctcctgcgcctgtgtctggagaacccccagagcgctgcaagttagcaagagagattcgatggcggctctggaaggcgcacgaagggtggggcgggggagcaaagaggccactgggtgacccagcctggtccggggtgaaacgctagagaaggcgcctcgccttccttatttcaatgcaactcctcggccccagacggtaaaaatagtttccaagctgccgcggacgcccaggatgtgtttgcagagatcaaactggggaggaggcagctttgtaaaagttgcagaaagattagccgagaagcgtccgcccggcggggctcaagaaagcttggggacagctccatgttccttggggcggaatggcccaagaattggcctgggtaaccccctgcccagttctctgtcctcacttcgagccagtgcttaaataacttcccgccgcctgccctgcaaacttcccggcgcggcgccgttgaggccaggacacagcaaaggctagcaaaaccccgccgcggcgcgctcggccccggccctgagaggctgcgcgggtgggaggaccagtgtggtttctgctcccactcggctgcccagaccctcaagaccgatcccccaactcctgggagcgggtgcttccctctgggagccgagatcttgcggggccagcgagggcgcaaagtgcgcgcgctggcccgcgcgggggcggccgc

SEQ ID NO: 6069 - protein, 195 aa, Homo sapiens
MGVWGKKHLRLTHAPSPTFSHLPPSPQAGEPGIDGISLAVVCAAFIRIHPARRHPARNGSRLACTPTPRPNAGLEVVSSARVAASLPSEGGWTSGAPRSSGLSLPGSAWQPPPLPVLRKPAWPGSPAVKNESKFPNRGSRNFPRRRLPPAPVSGEPPERCKLAREIRWRLWKAHEGWGGGAKRPLGDPAWSGVKR

SEQ ID NO: 6070 - DNA, 1124 bp, Homo sapiens
ccggtttcgaccggcgcgcacctggggctgagccgggtgcgcgcgggggtcgggtctggaactgcccttgaatcgacgggatttctctggctgtcgtttgcgctgcatttatccgaatacatccagctcgcaggcatcctgcaagaaacggctcccggctcgcgtgtacgccgacacctcggcccaacgcaggactcgaggtggtttctagtgcccgggtggctgcaagtctgccctccgagggaggctggacaagcggcgcccccaggtcgagcggcctctcgctgcctggcagtgcctggcagcccccacctctgccagtgcttcggaaacccgcctggccaggttcgcccgcggtgaaaaatgaaagcaaattccccaacagaggtagccggaactttcctcgacgaaggctccctcctgcgcctgtgtctggagaacccccagagcgctgcaagttagcaagagagattcgatggcggctctggaaggcgcacgaagggtggggcgggggagcaaagaggccactgggtgacccagcctggtccggggtgaaacgctagagaaggcgcctcgccttccttatttcaatgcaactcctcggccccagacggtaaaaatagtttccaagctgccgcggacgcccaggatgtgtttgcagagatcaaactggggaggaggcagctttgtaaaagttgcagaaagattagccgagaagcgtccgcccggcggggctcaagaaagcttggggacagctccatgttccttggggcggaatggcccaagaattggcctgggtaaccccctgcccagttctctgtcctcacttcgagccagtgcttaaataacttcccgccgcctgccctgcaaacttcccggcgcggcgccgttgaggccaggacacagcaaaggctagcaaaaccccgccgcggcgcgctcggccccggccctgagaggctgcgcgggtgggaggaccagtgtggtttctgctcccactcggctgcccagaccctcaagaccgatcccccaactcctgggagcgggtgcttccctctgggagccgagatcttgcggggccagcgagggcgcaaagtgcgcgcgctggcccgcgcgggggcggccgc

SEQ ID NO: 6071 - protein, 64 aa, Homo sapiens; identical to SEQ ID NO: 6065

SEQ ID NO: 6072 - DNA, 1185 bp, Homo sapiens
cgggtctggaactgcccttggtatgctcgccctctcctcttggcccatctcactcccctcccccacctgactcccctccccggcttctttctctgtctcccactccgcacgggtaccgagaactttccgggaatcgacgggatttctctggctgtcgtttgcgctgcatttatccgaatacatccagctcgcaggcatcctgcaagaaacggctcccggctcgcgtgtacgccgacacctcggcccaacgcaggactcgaggtggtttctagtgcccgggtggctgcaagtctgccctccgagggaggctggacaagcggcgcccccaggtcgagcggcctctcgctgcctggcagtgcctggcagcccccacctctgccagtgcttcggaaacccgcctggccaggttcgcccgcggtgaaaaatgaaagcaaattccccaacagaggtagccggaactttcctcgacgaaggctccctcctgcgcctgtgtctggagaacccccagagcgctgcaagttagcaagagagattcgatggcggctctggaaggcgcacgaagggtggggcgggggagcaaagaggccactgggtgacccagcctggtccggggtgaaacgctagagaaggcgcctcgccttccttatttcaatgcaactcctcggccccagacggtaaaaatagtttccaagctgccgcggacgcccaggatgtgtttgcagagatcaaactggggaggaggcagctttgtaaaagttgcagaaagattagccgagaagcgtccgcccggcggggctcaagaaagcttggggacagctccatgttccttggggcggaatggcccaagaattggcctgggtaaccccctgcccagttctctgtcctcacttcgagccagtgcttaaataacttcccgccgcctgccctgcaaacttcccggcgcggcgccgttgaggccaggacacagcaaaggctagcaaaaccccgccgcggcgcgctcggccccggccctgagaggctgcgcgggtgggaggaccagtgtggtttctgctcccactcggctgcccagaccctcaagaccgatcccccaactcctgggagcgggtgcttccctctgggagccgagatcttgcggggccagcgagggcgcaaagtgcgcgcgctggcccgcgcgggggcggccgc

SEQ ID NO: 6073 - protein, 64 aa, Homo sapiens; identical to SEQ ID NO: 6065

SEQ ID NO: 6074 - DNA, 1038 bp, Homo sapiens
atgctccagcagtatcaaccttcatctggccctcagaatctggcactggtggtgccaggaacacatttattcatcataatctcttcaggggtgggacaaattggagcactgagtagtgaatacaatttgcaaataggcaatctgagagaggggcaggaaggtcaaccctccgagatcaacactgctcatcaaaatgctgacaagggcccacctaacaatgtgttaggaccggggctgtctgagagacgatgccagttaaggctgggctggctcttagctgcagcaagagtggaagatgacaaccagttgatatctggtagctctgtgcatcctggacttggaggcaagaataggcaaggagaaaatctggatccttccagagaatttcagagaaaaacaggcatgggtttagggagttacctgcccactgggcctactttcatccagacaggaggcccgtggccagctcttccaggcgtggcccagacaaacgcgataaagctgtgggcatggagttttgggcattgggacatccgggggagggaggggcgcgggcagtcggggtcaggccgccgtcggggcgcggggcgctgcgggccacctgttgcagcgggcggccagggctcacctgcgcggagaccgggccgaggggcggcggcggcgagcggcggagctgaggtccccgaggctagcccgcgcctccggcttccgccgggtcagctgactgcccagtgcggaactgtgcgcccgccgcgctcccctgccgcgctccccgctgctgccgccgcgcccccgcgctccgtcccgcgcgcccgcagcgtcctggccgccatggccgggctcgtggtgcgtggaactcaagtgtcctacataggccaggactgcagagaaattccagagcaccttggcagggactgtggacatttcgcaaagaggcttgatctgagctttaaccttctgaggtatgtaaccttcacaagatgtaggccaggcctgggaggcccagtcctcctgggtactttagggccaagcagataa

SEQ ID NO: 6075 - protein, 345 aa, Homo sapiens
MLQQYQPSSGPQNLALVVPGTHLFIIISSGVGQIGALSSEYNLQIGNLREGQEGQPSEINTAHQNADKGPPNNVLGPGLSERRCQLRLGWLLAAARVEDDNQLISGSSVHPGLGGKNRQGENLDPSREFQRKTGMGLGSYLPTGPTFIQTGGPWPALPGVAQTNAIKLWAWSFGHWDIRGREGRGQSGSGRRRGAGRCGPPVAAGGQGSPARRPGRGAAAASGGAEVPEASPRLRLPPGQLTAQCGTVRPPRSPAALPAAAAAPPRSVPRARSVLAAMAGLVVRGTQVSYIGQDCREIPEHLGRDCGHFAKRLDLSFNLLRYVTFTRCRPGLGGPVLLGTLGPSR

SEQ ID NO: 6076 - DNA, 3552 bp, Homo sapiens
atgagtgaaggggcggccgctgcctcgccacctggtgccgcttcggcagccgccgcctcggccgaggagggcaccgcggcggctgcggcggcggcagcggcgggcgggggcccggacggcggcggcgaaggggcggccgagcccccccgggagttacgctgtagcgactgcatcgtgtggaaccggcagcagacgtggctgtgcgtggtacctctgttcatcggcttcatcggcctggggctcagcctcatgcttctcaaatggatcgtggtgggctccgtcaaggagtacgtgcccaccgacctagtggactccaaggggatgggccaggaccccttcttcctctccaagcccagctctttccccaaggccatggagaccaccaccactaccacttccaccacgtcccccgccaccccctccgccgggggtgccgcctcctccaggacgcccaaccggattagcactcgcctgaccaccatcacgcgggcgcccactcgcttccccgggcaccgggtgcccatccgggccagcccgcgctccaccacagcacggaacactgcggcccctgcgacggtcccgtccaccacggccccgttcttcagtagcagcacgctgggctcccgacccccggtgccaggaactccaagtacccaggcaatgccctcctggcctactgcggcatacgctacctcctcctaccttcacgattctactccctcctggaccctgtctccctttcaggatgctgcctcctcttcttcctcttcttcctcctccgctaccaccaccacaccagaaactagcaccagccccaaatttcatacgacgacatattccacagagcgatccgagcacttcaaaccctgccgagacaaggaccttgcatactgtctcaatgatggcgagtgctttgtgatcgaaaccctgaccggatcccataaacactgtcggtgcaaagaaggctaccaaggagtccgttgtgatcaatttctgccgaaaactgattccatcttatcggatccaaagagtgaagaagtttatcaaaggcaggtgctgtcaatttcatgtatcatctttggaattgtcatcgtgggcatgttctgtgcagcattctacttcaaaagcaagaaacaagctaaacaaatccaagagcagctgaaagtgccacaaaatggtaaaagctacagtctcaaagcatccagcacaatggcaaagtcagagaacttggtgaagagccatgtccagctgcaaaattattcaaaggtggaaaggcatcctgtgactgcattggagaaaatgatggagtcaagttttgtcggcccccagtcattccctgaggtcccttctcctgacagaggaagccagtctgtcaaacaccacaggagtctatcctcttgctgcagcccagggcaaagaagtggcatgctccataggaatgccttcagaaggacacccccgtcaccccgaagtaggctaggtggaattgtgggaccagcatatcagcaactcgaagaatcaaggatcccagaccaggatacgataccttgccaagggatagaggtcaggaagactatatcccacctgcctatacagctgtggtgtgttgaaagacccctggacttaaagtattcatccagtggtttaaaaacccaacgaaatacatcaataaatatgcaactgccttcaagagagacaaacccctattttaatagcttggagcaaaaggacctggtgggctattcatccacaagggccagttctgtgcccatcatcccttcagtgggtttagaggaaacctgcctgcaaatgccagggatttctgaagtcaaaagcatcaaatggtgcaaaaactcctattcagctgacgttgtcaatgtgagtattccagtcagcgattgtcttatagcagaacaacaagaagtgaaaatattgctagaaactgtccaggagcagatccgaattctgactgatgccagacggtcagaagactacgaactggccagcgtagaaaccgaggacagtgcaagcgaaaacacagcctttctccccctgagtcccacagccaaatcagaacgagaggcgcaatttgtcttaagaaatgaaatacaaagagactctgcattgaccaagtgacttgagatgtaggaatctgtgcattctatgctttgctcaacaggaaagagaggaaatcaaatacaaattatttatatgcattaatttaagagcatctacttagaagaaaccaaatagtctatcgccctcatatcatagtgttttttaacaaaatatttttttaagggaaagaaatgtttcaggagggataaagcttaccattaaagcttttgggtagaattctgaatccaatttcgtttagtcccaacactgtcctctttggctcttagaagatgtgggcaattcagacccttggccccacagtgccagtgtctcattaaaaaacactggcagttacctggtttcaaaaagaggagagctgcatcccgcaggtggatgcaccagtgagcaggtggctcttgccatttggcttgccagtcccaagccctaaatttctattcacccaatagcctcatcacaggttatgtcatgtcgacacatgtagtgttttctatttgatttttggagaatgccacaaaagactctgcaatgggaaggaggacaggagatagaaggagaaaccgggggcaatcttaactactcttgtgtgccaccttcctctgagatttgaatgcacagatctcagctggaggtatgaaattattacagaaaaagagacaaaaaaatccttatatcgtgtcactaaaatcatgctaatagaaatgtttttccttgagattgtttagaggctctggaggagcgtttctcagtttttgtgtgcctgtgtgcacatgtgtgtgcgagcgtgtgtgtgtgtggacttgctcacgcgggcacatatgctgtaagcacatgtgttcattgtgcgtatgtgtgtgcatgtgtgcgcgtattacgcttgctaaaatttgttctgaaacatcagggaatctactattcagaaaaattatttccctcttagatcttttcactttaaatttttccattaagtataaagttcagttagttcttaaatcaaggtcacttgcatggtggggtcgtataaaactcttgacactgtctagaccattttctgatgtgaatacttttgagaggatcaactattggctcattaatgatatcagtatcataaggtgagttcatcaaggatgtgtgtttattttgaatcatgcctacttaaattattaatacaagacaattaacaaattgacagttaccatttgctttctcatcatcctcattaccatttattttatagcaagtctgctatgtgtggaccaaggcttcggcttctgtggttagtatgggaagaataaattgttgaaataaaaatacccagactattcagttcacaagaagccccccaaaagaacagtaaattgtgttgtatgttcatttggaataaagcaatatttttaccactgctaaggtgaactg

SEQ ID NO: 6077 - protein, 711 aa, Homo sapiens
MSEGAAAASPPGAASAAAASAEEGTAAAAAAAAAGGGPDGGGEGAAEPPRELRCSDCIVWNRQQTWLCVVPLFIGFIGLGLSLMLLKWIVVGSVKEYVPTDLVDSKGMGQDPFFLSKPSSFPKAMETTTTTTSTTSPATPSAGGAASSRTPNRISTRLTTITRAPTRFPGHRVPIRASPRSTTARNTAAPATVPSTTAPFFSSSTLGSRPPVPGTPSTQAMPSWPTAAYATSSYLHDSTPSWTLSPFQDAASSSSSSSSSATTTTPETSTSPKFHTTTYSTERSEHFKPCRDKDLAYCLNDGECFVIETLTGSHKHCRCKEGYQGVRCDQFLPKTDSILSDPKSEEVYQRQVLSISCIIFGIVIVGMFCAAFYFKSKKQAKQIQEQLKVPQNGKSYSLKASSTMAKSENLVKSHVQLQNYSKVERHPVTALEKMMESSFVGPQSFPEVPSPDRGSQSVKHHRSLSSCCSPGQRSGMLHRNAFRRTPPSPRSRLGGIVGPAYQQLEESRIPDQDTIPCQGIEVRKTISHLPIQLWCVERPLDLKYSSSGLKTQRNTSINMQLPSRETNPYFNSLEQKDLVGYSSTRASSVPIIPSVGLEETCLQMPGISEVKSIKWCKNSYSADVVNVSIPVSDCLIAEQQEVKILLETVQEQIRILTDARRSEDYELASVETEDSASENTAFLPLSPTAKSEREAQFVLRNEIQRDSALTK

SEQ ID NO: 6078 - DNA, 4213 bp, Homo sapiens
atgagtgaaggggcggccgctgcctcgccacctggtgccgcttcggcagccgccgcctcggccgaggagggcaccgcggcggctgcggcggcggcagcggcgggcgggggcccggacggcggcggcgaaggggcggccgagcccccccgggagttacgctgtagcgactgcatcgtgtggaaccggcagcagacgtggctgtgcgtggtacctctgttcatcggcttcatcggcctggggctcagcctcatgcttctcaaatggatcgtggtgggctccgtcaaggagtacgtgcccaccgacctagtggactccaaggggatgggccaggaccccttcttcctctccaagcccagctctttccccaaggccatggagaccaccaccactaccacttccaccacgtcccccgccaccccctccgccgggggtgccgcctcctccaggacgcccaaccggattagcactcgcctgaccaccatcacgcgggcgcccactcgcttccccgggcaccgggtgcccatccgggccagcccgcgctccaccacagcacggaacactgcggcccctgcgacggtcccgtccaccacggccccgttcttcagtagcagcacgctgggctcccgacccccggtgccaggaactccaagtacccaggcaatgccctcctggcctactgcggcatacgctacctcctcctaccttcacgattctactccctcctggaccctgtctccctttcaggatgctgcctcctcttcttcctcttcttcctcctccgctaccaccaccacaccagaaactagcaccagccccaaatttcatacgacgacatattccacagagcgatccgagcacttcaaaccctgccgagacaaggaccttgcatactgtctcaatgatggcgagtgctttgtgatcgaaaccctgaccggatcccataaacactgtcggtgcaaagaaggctaccaaggagtccgttgtgatcaatttctgccgaaaactgattccatcttatcggatccaaagagtgaagaagtttatcaaaggcaggtgctgtcaatttcatgtatcatctttggaattgtcatcgtgggcatgttctgtgcagcattctacttcaaaagcaagaaacaagctaaacaaatccaagagcagctgaaagtgccacaaaatggtaaaagctacagtctcaaagcatccagcacaatggcaaagtcagagaacttggtgaagagccatgtccagctgcaaaattattcaaaggtggaaaggcatcctgtgactgcattggagaaaatgatggagtcaagttttgtcggcccccagtcattccctgaggtcccttctcctgacagaggaagccagtctgtcaaacaccacaggagtctatcctcttgctgcagcccagggcaaagaagtggcatgctccataggaatgccttcagaaggacacccccgtcaccccgaagtaggctaggtggaattgtgggaccagcatatcagcaactcgaagaatcaaggatcccagaccaggatacgataccttgccaagggatagaggtcaggaagactatatcccacctgcctatacagctgtggtgtgttgaaagacccctggacttaaagtattcatccagtggtttaaaaacccaacgaaatacatcaataaatatgcaactgccttcaagagagacaaacccctattttaatagcttggagcaaaaggacctggtgggctattcatccacaagggccagttctgtgcccatcatcccttcagtgggtttagaggaaacctgcctgcaaatgccagggatttctgaagtcaaaagcatcaaatggtgcaaaaactcctattcagctgacgttgtcaatgtgagtattccagtcagcgattgtcttatagcagaacaacaagaagtgaaaatattgctagaaactgtccaggagcagatccgaattctgactgatgccagacggtcagaagactacgaactggccagcgtagaaaccgaggacagtgcaagcgaaaacacagcctttctccccctgagtcccacagccaaatcagaacgagaggcgcaatttgtcttaagaaatgaaatacaaagagactctgcattgaccaagtgacttgagatgtaggaatctgtgcattctatgctttgctcaacaggaaagagaggaaatcaaatacaaattatttatatgcattaatttaagagcatctacttagaagaaaccaaatagtctatcgccctcatatcatagtgttttttaacaaaatatttttttaagggaaagaaatgtttcaggagggataaagcttaccattaaagcttttgggtagaattctgaatccaatttcgtttagtcccaacactgtcctctttggctcttagaagatgtgggcaattcagacccttggccccacagtgccagtgtctcattaaaaaacactggcagttacctggtttcaaaaagaggagagctgcatcccgcaggtggatgcaccagtgagcaggtggctcttgccatttggcttgccagtcccaagccctaaatttctattcacccaatagcctcatcacaggttatgtcatgtcgacacatgtagtgttttctatttgatttttggagaatgccacaaaagactctgcaatgggaaggaggacaggagatagaaggagaaaccgggggcaatcttaactactcttgtgtgccaccttcctctgagatttgaatgcacagatctcagctggaggtatgaaattattacagaaaaagagacaaaaaaatccttatatcgtgtcactaaaatcatgctaatagaaatgtttttccttgagattgtttagaggctctggaggagcgtttctcagtttttgtgtgcctgtgtgcacatgtgtgtgcgagcgtgtgtgtgtgtggacttgctcacgcgggcacatatgctgtaagcacatgtgttcattgtgcgtatgtgtgtgcatgtgtgcgcgtattacgcttgctaaaatttgttctgaaacatcagggaatctactattcagaaaaattatttccctcttagatcttttcactttaaatttttccattaagtataaagttcagttagttcttaaatcaaggtcacttgcatggtggggtcgtataaaactcttgacactgtctagaccattttctgatgtgaatacttttgagaggatcaactattggctcattaatgatatcagtatcataaggtgagttcatcaaggatgtgtgtttattttgaatcatgcctacttaaattattaatacaagacaattaacaaattgacagttaccatttgctttctcatcatcctcattaccatttattttatagcaagtctgctatgtgtggaccaaggcttcggcttctgtggttagtatgggaagaataaattgttgaaataaaaatacccagactattcagttcacaagaagccccccaaaagaacagtaaattgtgttgtatgttcatttggaataaagcaatatttttaccactgctaaggtgaactgaaacctctcctgaagatttgtctgtttatttaccctcactttcatgggacatatgaggaaattagtgttcacatatccagtctttttccaattattggtggtgttgagttgttatgtttacactgttttaaataaaaaggcaccgtatttgaaagcataaaagatttcttttactgcagttttggaaaaccttggttaaaatctctttgtggaagacacattccatggagaaggaatgtaactatttctgagtcaagcagtaaatatatacaattcttatttcaggttaagttgtttctgttgaaaatacattgcaaattgctccttgggaacatgagttattagtagacatattgtcatccagaaaaaagaaagagcactatgtatttatcagaactacttaatagaaattcaaagtctcagatgttgaaacactttggtaaaaatgcattttacatttaacaaaaggttgtgtgatgatatttattatttgttctgttacagttccatcgttttgaatatggaggtaatattggtagaatttcaaaagattattataaatttgtaatgtctagatcatctaagttctcatttaaaaatattatatctgtgggaacattttagaaaatggtcttaaaaactaacagatctataaaaaccc

SEQ ID NO: 6079 - protein, 711 aa, Homo sapiens; identical to SEQ ID NO: 6077

SEQ ID NO: 6080 - DNA, 4243 bp, Homo sapiens
caggaaggagggaaggaaggaatctgccacaaaccagaatggcagtagagccagtaacttgctgcttctctctcctttggctgaagcagtcatttttgagagcacattttcccaggaggtgtttagagcctccactcaacaaatctagcttgtgttttgtagaaggataaaggattcatgagtgtatgtgtgaacatattcaatggattgaaaatgagtctaccctgaagaccccagatttttgatctgctcttttgatgcagttgatagaataatggagtgtggtatacctccaacccttgtatgcgttgggagaggagggggactacacacggtttttcagaggcaaaaactcctttatgaattgattgccacatcacccttctggttccatctgaggtcttctttgcagaagccactcagcaccttttggaattgaatgctgacatcgcatcagattcaaaaggaatgctgctgttgattcctttctgtactcatcacatggtgaggaatatgctgggagtctgtataagatgaggctcttgcacggcctgccagagagtgcctgtcatggactggagaactgcatccgttcatttacatatcggcagctaaaattagtggagtcacccacgtttttcaccctaaagaagaaccttcagataagaatccagttcatcactctcgcctgctcaggcttacttggttgctccttgttaccagacagaggggctatagcgctgtgtaagagcaaatgttaaattagtattaatagccaatggcatctctcttctatttttcactgatcagatacgacgacatattccacagagcgatccgagcacttcaaaccctgccgagacaaggaccttgcatactgtctcaatgatggcgagtgctttgtgatcgaaaccctgaccggatcccataaacactgtcggtgcaaagaaggctaccaaggagtccgttgtgatcaatttctgccgaaaactgattccatcttatcggatccaaagacggggtttcaccgtgttaaccaggatggtctcaatttcctgacctcgtgatccgcctacctcggcctcccaaagtgctgggattacagaccacttggggattgaattcatggagagtgaagaagtttatcaaaggcaggtgctgtcaatttcatgtatcatctttggaattgtcatcgtgggcatgttctgtgcagcattctacttcaaaagcaagaaacaagctaaacaaatccaagagcagctgaaagtgccacaaaatggtaaaagctacagtctcaaagcatccagcacaatggcaaagtcagagaacttggtgaagagccatgtccagctgcaaaattattcaaaggtggaaaggcatcctgtgactgcattggagaaaatgatggagtcaagttttgtcggcccccagtcattccctgaggtcccttctcctgacagaggaagccagtctgtcaaacaccacaggagtctatcctcttgctgcagcccagggcaaagaagtggcatgctccataggaatgccttcagaaggacacccccgtcaccccgaagtaggctaggtggaattgtgggaccagcatatcagcaactcgaagaatcaaggatcccagaccaggatacgataccttgccaagggtattcatccagtggtttaaaaacccaacgaaatacatcaataaatatgcaactgccttcaagagagacaaacccctattttaatagcttggagcaaaaggacctggtgggctattcatccacaagggccagttctgtgcccatcatcccttcagtgggtttagaggaaacctgcctgcaaatgccagggatttctgaagtcaaaagcatcaaatggtgcaaaaactcctattcagctgacgttgtcaatgtgagtattccagtcagcgattgtcttatagcagaacaacaagaagtgaaaatattgctagaaactgtccaggagcagatccgaattctgactgatgccagacggtcagaagactacgaactggccagcgtagaaaccgaggacagtgcaagcgaaaacacagcctttctccccctgagtcccacagccaaatcagaacgagaggcgcaatttgtcttaagaaatgaaatacaaagagactctgcattgaccaagtgacttgagatgtaggaatctgtgcattctatgctttgctcaacaggaaagagaggaaatcaaatacaaattatttatatgcattaatttaagagcatctacttagaagaaaccaaatagtctatcgccctcatatcatagtgttttttaacaaaatatttttttaagggaaagaaatgtttcaggagggataaagcttaccattaaagcttttgggtagaattctgaatccaatttcgtttagtcccaacactgtcctctttggctcttagaagatgtgggcaattcagacccttggccccacagtgccagtgtctcattaaaaaacactggcagttacctggtttcaaaaagaggagagctgcatcccgcaggtggatgcaccagtgagcaggtggctcttgccatttggcttgccagtcccaagccctaaatttctattcacccaatagcctcatcacaggttatgtcatgtcgacacatgtagtgttttctatttgatttttggagaatgccacaaaagactctgcaatgggaaggaggacaggagatagaaggagaaaccgggggcaatcttaactactcttgtgtgccaccttcctctgagatttgaatgcacagatctcagctggaggtatgaaattattacagaaaaagagacaaaaaaatccttatatcgtgtcactaaaatcatgctaatagaaatgtttttccttgagattgtttagaggctctggaggagcgtttctcagtttttgtgtgcctgtgtgcacatgtgtgtgcgagcgtgtgtgtgtgtggacttgctcacgcgggcacatatgctgtaagcacatgtgttcattgtgcgtatgtgtgtgcatgtgtgcgcgtattacgcttgctaaaatttgttctgaaacatcagggaatctactattcagaaaaattatttccctcttagatcttttcactttaaatttttccattaagtataaagttcagttagttcttaaatcaaggtcacttgcatggtggggtcgtataaaactcttgacactgtctagaccattttctgatgtgaatacttttgagaggatcaactattggctcattaatgatatcagtatcataaggtgagttcatcaaggatgtgtgtttattttgaatcatgcctacttaaattattaatacaagacaattaacaaattgacagttaccatttgctttctcatcatcctcattaccatttattttatagcaagtctgctatgtgtggaccaaggcttcggcttctgtggttagtatgggaagaataaattgttgaaataaaaatacccagactattcagttcacaagaagccccccaaaagaacagtaaattgtgttgtatgttcatttggaataaagcaatatttttaccactgctaaggtgaactgaaacctctcctgaagatttgtctgtttatttaccctcactttcatgggacatatgaggaaattagtgttcacatatccagtctttttccaattattggtggtgttgagttgttatgtttacactgttttaaataaaaaggcaccgtatttgaaagcataaaagatttcttttactgcagttttggaaaaccttggttaaaatctctttgtggaagacacattccatggagaaggaatgtaactatttctgagtcaagcagtaaatatatacaattcttatttcaggttaagttgtttctgttgaaaatacattgcaaattgctccttgggaacatgagttattagtagacatattgtcatccagaaaaaagaaagagcactatgtatttatcagaactacttaatagaaattcaaagtctcagatgttgaaacactttggtaaaaatgcattttacatttaacaaaaggttgtgtgatgatatttattatttgttctgttacagttccatcgttttgaatatggaggtaatattggtagaatttcaaaagattattataaatttgtaatgtctagatcatctaagttctcatttaaaaatattatatctgtgggaacattttagaaaatggtcttaaaaactaacagatctataaaaaccc

SEQ ID NO: 6081 - protein, 346 aa, Homo sapiens
MESEEVYQRQVLSISCIIFGIVIVGMFCAAFYFKSKKQAKQIQEQLKVPQNGKSYSLKASSTMAKSENLVKSHVQLQNYSKVERHPVTALEKMMESSFVGPQSFPEVPSPDRGSQSVKHHRSLSSCCSPGQRSGMLHRNAFRRTPPSPRSRLGGIVGPAYQQLEESRIPDQDTIPCQGYSSSGLKTQRNTSINMQLPSRETNPYFNSLEQKDLVGYSSTRASSVPIIPSVGLEETCLQMPGISEVKSIKWCKNSYSADVVNVSIPVSDCLIAEQQEVKILLETVQEQIRILTDARRSEDYELASVETEDSASENTAFLPLSPTAKSEREAQFVLRNEIQRDSALTK

SEQ ID NO: 6082 - DNA, 743 bp, Homo sapiens
ggagtcaagagatggcagtacttggctgaaggttggtagtgagagatcaatataatcatctggtattattttccttctgcctggaggacttgctttaacatttcaagtagtgtgggtctgctgctgacgaattcatacaaattttatacgacgacatattccacagagcgatccgagcacttcaaaccctgccgagacaaggaccttgcatactgtctcaatgatggcgagtgctttgtgatcgaaaccctgaccggatcccataaacactgtcggtaagccactgaggccactgatggaaagggcaggcccgttgcaaggcgtgggggtggagggtgctggcagcatctggtatgtgtcatatccgggatacacacagtcccaccgtttgaatagcagaattgcgagtcttaatttggaaagggcaaggctgctgcctctttaacagtggaagaagacaaaatggaaacaaagtagttacggtttaagttttacctgaccaagcaaacaaagatttacttttagatctgcaaagttaatggaaataattatttacacactttagaagcgtctgtttatgatgtggagcttaggcatatatcctagtactcagaaataatctgttcttgagaacctacagactgtggcaggagaagcaaactgctcatctaagatctagaatctcagtgtttattgtgaaccaaccccagagacttgaactgtgtccagagagaactgcattt

SEQ ID NO: 6083 - protein, 49 aa, Homo sapiens
MERAGPLQGVGVEGAGSIWYVSYPGYTQSHRLNSRIASLNLERARLLPL

SEQ ID NO: 6084 - DNA, 659 bp, Homo sapiens
gaaccagtggtgaggtgccaggcttttttcaacacacagttctcttgggaactaaagaatgagagcgcactctcctctgagggaaggcatcaatctgttaatgagacatctgctctcatgactcaaatacctcccaataggcccctcctcccaacacccccacaatgggggtctaatttcaacatgagagtatgtggggacaaacaaaccatatccaaatcatagcactcatatgtacatagaagattccaaaaatcagtgctcatgaagccaggacgggcttcagagaggagataacacattaatttgcatttggaaagataagagcctttttatttctcatttggaagcctactcttgctggccaacaaaggcttggagagttgagctgctattggagaagtttctctttaaatccaagagggagggaaatttcaaaattactttagatgcaattagaagtaatcagcttcatgtcataaatttttgatgcaattggtcccttcctttctggattattttttctctcatgtccagatggttctcacaaacatatccacttaaggatgcgttgaccactgatcattgttgaataatgaaactttagggatacttactggcacattcaagtgaaaatgttctacaattccctaggtagt

SEQ ID NO: 6085 - protein, 35 aa, Homo sapiens
MTQIPPNRPLLPTPPQWGSNFNMRVCGDKQTISKS

SEQ ID NO: 6086 - DNA, 1784 bp, Homo sapiens
attaggaatggccagagcaaacagttgagatctgtaagttcatatttaggaccaagtttccatgctctgtgtagagactgagaagcgttctgagcctccatcagcagctgttgcgtccactgaataattcattcaggaaacaaggactgagtacctttcatgtgccagattatctcgaaggctctggtgaccttaggatgaacaaaaaattatgctttcacaagtagaaggaaacgagtatgaatttgggaattgtctgcctttacattatagattgcctctattttctggtgggagtttagcctcatgatattggtgagagccacagatcctgaagggcatgaatttaaggctcagctatgctacttcccatctgggaactgctgttaaagtcggtaaatgctcaagaaatcaatcagaggcccttctcctcgttcttctttattttccatcatcaccaccatcgtcacctataatcaccatgatgatattagatattggtgcaagtagaatcagagatgtgtattgtttgatccaaatattgtatgttgcaaattgaaagtctgccatcctataaatatgaaggagcagttagggagtttcagtaataagcaaaaatgaaggtaagtaacttggactagtcagccatttatgatggtaataataataataataataataataataataataataatcagaaataacaaagtaactgtgaagttgagatatttgaagactagtcccagtactaaggtgctttggggcaatgcgcagttttctaaaagtaatcattttcttgggttggacacagaataaatttttagtactttattttcctggttcttcagttcaattttgctacccaaacttactaccaattatggtttctttacttcaaaattccaaagctccccagcaatttgcagggtgagattttgtgtgactgctggaaggcacattccaaaacataaagaaactttgccattggcagaaatggccttgctgggattacaggtgtgagacactgcacccggccttggggtttttcaaagattgtttgggggaagtgatgggagtggctagacaatggttgtttgttgctgattggttgggggtgaagtcatagggttatgggaaatgttcctcctgtgtgctgaatagtttctggtggggccacaagagcagttggtgagtccaggtgaagccaggtgtcagacatgcaaagaacccgaaaagacatttcaaaaggccaatcttaggttcaataatagtgatgctgtccacaggggtaatcggggaagttagcataccttttgatctcttgaataatgactggcaatcctttatgtctacaccttagcagaattcagccccctctatctgcctagcctggtggtctctcattagctttacaaaagtggttgagttttggggaaaggctgttatcatttaacctataaattaaatgcctcccaaggctagcttggcttaagcagccaaggaataattaaaagcagtttgaaggctcaaggcaagaggggagttggctagatcagatctcccccactgccataattttctcactgttataatttttgcaaaggcagtttcagttctagtactctatctgggatgtaccttacttcacttacaaataagcacagatcatattttgtatctacataactaggcaagaaccatcctgaaagggtaacaaattctatgaatccatccaaatataaaaatattcacacgatgtttctgtaattccacacagttag

SEQ ID NO: 6087 - protein, 72 aa, Homo sapiens [sequence omitted]

SEQ ID NO: 6088 - DNA, 2246 bp, Homo sapiens
ttctgcagtctcctgtgtacgtgtaaaattatgatcaaataaatttgtatgccttttctcctattaacctgccttttttgtcagcgattgtcagtgaaacttcagagggcaaaggggaagttttccttggcccctccagttttggtgctgtgaacaggataccaaagctgctctgttcttctggaagctgcaatgaagggaaccaaggacctgacaagccagcagaaggagtctaacgtgaagacattttgctccaagaatatcctagccatccttggcttctcctctatcatagctgtgatagctttgcttgctgtggggttgacccagaacaaagcattgccagaaaacgttaagtatgggattgtgctggatgcgggttcttctcacacaagtttatacatctataagtggccagcagaaaaggagaatgacacaggcgtggtgcatcaagtagaagaatgcagggttaaaggtcctggaatctcaaaatttgttcagaaagtaaatgaaataggcatttacctgactgattgcatggaaagagctagggaagtgattccaaggtcccagcaccaagagacacccgtttacctgggagccacggcaggcatgcggttgctcaggatggaaagtgaagagttggcagacagggttctggatgtggtggagaggagcctcagcaactacccctttgacttccagggtgccaggatcattactggccaagaggaaggtgcctatggctggattactatcaactatctgctgggcaaattcagtcagaaaacaaggtggttcagcatagtcccatatgaaaccaataatcaggaaacctttggagctttggaccttgggggagcctctacacaagtcacttttgtaccccaaaaccagactatcgagtccccagataatgctctgcaatttcgcctctatggcaaggactacaatgtctacacacatagcttcttgtgctatgggaaggatcaggcactctggcagaaactggccaaggacattcaggcaagtataactcaatccagacctgcccccttcacatctgcacctccagcccccacatcctgttgttttctgtttcaaattcagtagtttgtctgaacttggttattgtactttccaaacctttttaggcaggatattgaactacatctggttgacccctataaattgtttcagtcagacatcccctcccatgtttgtttactgcgttatctccacagacacaactgagatcttctctcaggaaataatttctccccctcgtggggttgataatgaaaattatgtggtagaatattgtttgttggagggggaattgcaatttataagctcttttagaccactttttaaagctccctttcctacaaactacaaaaaaacagagttgttagaaatgacctggagaggagaaggaaaaaaaaaaaaacacttcaggagaaacacaaaatgtatcaattgacacttcaaatcttgtcatcttgtccccagatgccttctgcattttgaagacaagaaaagttaaacacactttgggaggctgaggtgggtggatcacttgaggtcaggagttggagaccagcctggccaacatggtgaaaccccatctctactaaaaatacaaaaaaagaaaaaaaattagctgggcatggtggcacatacctgtaatcccagctacttgggaggctgagaaaggagaatcacttgaactgggaggtggaggttgcagtgagccgagattgtgccactacactccagcctgggccacagagcgagactccatctcaaaaagaaaaaaaagaaaagaaaaagaaaaagaaaacaaaagttaaacatactcaacatcatgtgagtaccaggcacaccctgacaagcaaacacaaagccaggatgtcatatccagctgttccctgtctccactgaaaggataacaagttctctgctctcctccaaagcattctctctggttttcaaaaccactaccaataagatggtcctgggagtagggggcgctgagagacatccactgagcctcaaagctccactaaccttcttatccacagcagcctcctttcttccctagtaggttgtgggttagaaattacttttttttgggccaggcgtggtggctcacacctgtaatcccagcactttgggaggccgaggcgggtggatcacttgaggtccggagttcgagaccagcctgaccaacatggcgacacccc

SEQ ID NO: 6089 - protein, 306 aa, Homo sapiens
MKGTKDLTSQQKESNVKTFCSKNILAILGFSSIIAVIALLAVGLTQNKALPENVKYGIVLDAGSSHTSLYIYKWPAEKENDTGVVHQVEECRVKGPGISKFVQKVNEIGIYLTDCMERAREVIPRSQHQETPVYLGATAGMRLLRMESEELADRVLDVVERSLSNYPFDFQGARIITGQEEGAYGWITINYLLGKFSQKTRWFSIVPYETNNQETFGALDLGGASTQVTFVPQNQTIESPDNALQFRLYGKDYNVYTHSFLCYGKDQALWQKLAKDIQASITQSRPAPFTSAPPAPTSCCFLFQIQ

SEQ ID NO: 6090 - DNA, 2070 bp, Homo sapiens
ttctgcagtctcctgtgtacgtgtaaaattatgatcaaataaatttgtatgccttttctcctattaacctgccttttttgtcagcgattgtcagtgaaacttcagagggcaaaggggaagttttccttggcccctccagttttggtgctgtgaacaggataccaaagctgctctgttcttctggaagctgcaatgaagggaaccaaggacctgacaagccagcagaaggagtctaacgtgaagacattttgctccaagaatatcctagccatccttggcttctcctctatcatagctgtgatagctttgcttgctgtggggttgacccagaacaaagcattgccagaaaacgttaagtatgggattgtgctggatgcgggttcttctcacacaagtttatacatctataagtggccagcagaaaaggagaatgacacaggcgtggtgcatcaagtagaagaatgcagggttaaaggtcctggaatctcaaaatttgttcagaaagtaaatgaaataggcatttacctgactgattgcatggaaagagctagggaagtgattccaaggtcccagcaccaagagacacccgtttacctgggagccacggcaggcatgcggttgctcaggatggaaagtgaagagttggcagacagggttctggatgtggtggagaggagcctcagcaactacccctttgacttccagggtgccaggatcattactggccaagaggaaggtgcctatggctggattactatcaactatctgctgggcaaattcagtcagaaaacaaggtggttcagcatagtcccatatgaaaccaataatcaggaaacctttggagctttggaccttgggggagcctctacacaagtcacttttgtaccccaaaaccagactatcgagtccccagataatgctctgcaatttcgcctctatggcaaggactacaatgtctacacacatagcttcttgtgctatgggaaggatcaggcactctggcagaaactggccaaggacattcaggttgcaagtaatgaaattctcagggacccatgctttcatcctggatataagaaggtagtgaacgtaagtgacctttacaagaccccctgcaccaagagatttgagatgactcttccattccagcagtttgaaatccagggtattggaaactatcaacaatgccatcaaagcatcctggagctcttcaacaccagttactgcccttactcccagtgtgccttcaatgggattttcttgccaccactccagggggattttggggcattttcagctttttactttgtgatgaagtttttaaacttgacatcagagaaagtctctcaggaaaaggtgactgagatgatgaaaaagttctgtgctcagccttgggaggagataaaaacatcttacgctggagtaaaggagaagtacctgagtgaatactgcttttctggtacctacattctctccctccttctgcaaggctatcatttcacagctgattcctgggagcacatccatttcattggcaagatccagggcagcgacgccggctggactttgggctacatgctgaacctgaccaacatgatcccagctgagcaaccattgtccacacctctctcccactccacctatgtcttcctcatggttctattctccctggtccttttcacagtggccatcataggcttgcttatctttcacaagccttcatatttctggaaagatatggtatagcaaaagcagctgaaatatgctggctggagtgaggaaaaaaatcgtccagggagcattttcctccatcgcagtgttcaaggccatccttccctgtctgccagggccagtcttgacgagtgtgaagcttccttggcttttactgaagcctttcttttggaggtattcaatatcctttgcctcaaggacttcggcagatactgtctctttcatgagtttttcccagctacacctttctcctttgtactttgtgcttgtataggttttaaagacctgacacctttcataatctttgctttataaaagaacaatattgactttgtctag

SEQ ID NO: 6091 - protein, 517 aa, Homo sapiens
MKGTKDLTSQQKESNVKTFCSKNILAILGFSSIIAVIALLAVGLTQNKALPENVKYGIVLDAGSSHTSLYIYKWPAEKENDTGVVHQVEECRVKGPGISKFVQKVNEIGIYLTDCMERAREVIPRSQHQETPVYLGATAGMRLLRMESEELADRVLDVVERSLSNYPFDFQGARIITGQEEGAYGWITINYLLGKFSQKTRWFSIVPYETNNQETFGALDLGGASTQVTFVPQNQTIESPDNALQFRLYGKDYNVYTHSFLCYGKDQALWQKLAKDIQVASNEILRDPCFHPGYKKVVNVSDLYKTPCTKRFEMTLPFQQFEIQGIGNYQQCHQSILELFNTSYCPYSQCAFNGIFLPPLQGDFGAFSAFYFVMKFLNLTSEKVSQEKVTEMMKKFCAQPWEEIKTSYAGVKEKYLSEYCFSGTYILSLLLQGYHFTADSWEHIHFIGKIQGSDAGWTLGYMLNLTNMIPAEQPLSTPLSHSTYVFLMVLFSLVLFTVAIIGLLIFHKPSYFWKDMV

SEQ ID NO: 6092 - DNA, 4252 bp, Homo sapiens
gcggcgattcaatatatccggaagcaactgtcatggctgctgtcagtgagggcccgtaatggagatcgagtcaagggttgcccagggacacttaagagccttcggcttcaaggaggcctctcaaaggacaaaggatgagactgcctggcggcagagtgccccccacaatcgtaggaactgtgtcgccgcgcttcccgttaacttgccgctaagtttttctagaaaagtcgcccttcttgccaggggtgtcctatagactttgtcatggagtgaaacagaaacaaataatggcctgtccagaagacagccaaatacatccttcaaacagacttcactgcaggagacagagtggattcatcctgtattctccatgtagacttccatcttcatgagtactccaagaagatggttcagttgactattgcaaaggatgaaagcatgggtccctgagaatttcattacttgcaacctgaatggaaaaatcacttgaaagcatcatgtgtgaacgctttggatacaaaagagatcaatagagttggcctggaacaagagatgcccttgaatgcaagttgtaacaactgagagaaattgcccagacactgcaacgggagttgccaacaaagtaacagagtcagagaagagctgagtcttgggaatgaaaaagtgatgaggggatgacttccacagtgggtatccggtcatttgggctgctgctctgccctcatcaaagtgatttccactctaagcctttgctaatttcacaacaggaaagcatgcaagaaattcgagaacaaaacaaatctacacgcagagcccagcatcttcaagcaaacaccctgaggtacagacccgaggctagatgagtccggactgcagatgaggcagctgcctcttaaactgcaaggggactgaaaaagtcatttgcctctaaaaaaaccaactctgaatacaaattgataatgaatattcatgagcccctccagcttgctctagagccacccttgactgcaaccctggactctgcttcctaaaaagtttcccaaagctctttctctgcctcctctcagaaggaagagggtgggaaagttcattcagggctttttgcctccagctttcaagtacttgctttttggtctgggcttttatttttccttctattttttttttcttaaggattcagatcaaatcaattttggtcttaccctttgtatcttccataagtagcagcttttgttttcctcctctttcctcgtctttcccccccccagcctctgcttgctgtggtccgtctccgtgagagaggtcctcaaggaaacagagatataacagacccttgggctcgtgggaggggctaaattagccggccccgtttcggaaggaacctcaaaccctgtctttttcattgactagaaaggacagattgactgaggagtccagcagctcattttcctaaagttactcgaagccttttccaggttgtaattttttgcatccttgaagcaatgtatattcaaatctctctctctttctcccttcttccctctctcccttactccctccctcttcatctctctctccctctcttcgttatagaaatccctttttctcccttgaaaaagtcatctcagctgcaagcaaaaaaagctattccttactgcaattatgaagctagataataagaaagttgttaccttgaaacccgctcgaaaaactgaaagtcaagaacagttcttccctccccataaagcctctggtcccatgaccagcaatcctttctcaaggctcattagagcaaagagcaacaggtgacccaagcgatgagtttcctgcaggagacgctgcgttattggttggaaggctgggtggaaccacagaggagctgctcaatgggaaccgctgcctggctatgaattgatgaaagtcatccaccatttcccaactttgacttcctacctttgaagtctaatgagcatgaattaccacatccagaccgtcaagattaccccaatgtagatgagagcctgaccaaattatttttaaactgtgtaacaaaattattttgaaatcaaaacaagggctaatcctttgaaaggaaggtaagtcctcaagtcccaaggcgacttggcagcttctccctccacaaggctgttgcaaaccttagcatttcaggtctgaaagatacctcagacattgagtctaaaagaggttagagatgtggagaggttaagccacctgctcatgctcacatacatggtctctcttatttgctaccatgttccccagcacctaatacagtttctctcacagcatgggctctcaataaatatttgatgaatggttgaaaaaaatgaatgaattgcagcaaagcagaaatgtagatctgttttcctgtttcctagttcttgatttttctacattgcttgtctggcatgtaaatttgtatctaaagccagttataccatataaatcattaaatttgtgagcccgaaggactgttttgactctatgtagaaactatattctccagcgagctttcagtcatactttaataaggacaaaggataaccttttagtttaggcatctctgttactttgcacggtgccacatggtatatactcaatacattttttatactttaataaatttggagctgtttaacaatactttatttctgaaatgctttatagttataggattttgcatgtatgataacaactaattacactgaatgaaagactcaatggatgtcttctcccgagtcagtttagactacatctctaataatgaatattggtctgatattcatcctgttatgataaaactggtttttggtgatatgatgggattttttgtaaaaaccaacaattggtttatgactgcctttgtactattgttttggagagaaatttgaaaagagcatgtccacaaaatagtgtgcgaattacagaatggaaaccaaaacatcaaagctagaaagagaaaagaatgatcaaagggaagatccagagtggctgaggggtaggcaggagaaacagacaaacaagtacctgagcttgtcaatgagagacacactttggtgggtgctgtggcaacggttctctactttattacattaggatattaggttctttttttttttttttttttgagacaagagttttactcttgtctcccaggctggagtgcaatggagccatctcagcttactgcaccctctgcctcccgggttcaagtgattctcctgcctctgcctccaagtagctgggattacaggcgcccgccaccttgcccagctaatttgtgtatttttagtagagatggggtttcaccatgttggtcaggctggtctcgaactcctgacctcaggtgatccgcccgcctcagcctcccaaagtgctgggattacaggcgtgagccaccatgcctggcctattttactacgttcttacattcttttttttgagacagagcctcactctgtcatccaggctggagtgcagtggcgtgatcttggctcactgcaacctctgcctcccaggttcaagtgattcttgtgcctcagcctcccgcgtaactgggattatagatgcgcaccactaagcctggctaatttttgtatttttagtagagattgggtttcaccatgttgtccaggctggtctcaaactcctggcctcaagtgatccgcttgccttggcctcccaaagtgctaggattacaggtgtgagccacagtgcctagccacagttctctattttaaacaaaattaaaattcaaggtcacttcagtcatgttgtatcagacgttgtcgacaaaaggttactttgacaattgtctcattctctttacatttcatcagggagagaaagagttagtaaaaagtaaattgttctagtacccaacttctggtttaaccaggagaggtaaaatctcattatagtaactagcacttcataaatatttgaagttcatccaaactgaatatggagtaatagaaacatagttttaacccctaattcatattacatgagccttttgacaacatttaatgctttttatggtaatatgctctgtgctacaatttaatcacgttgtccaggttcgcaccctcctcagcatcatgaaaatactatggttaagtatatattatcaccaattcatacaagaataattataaaagagatgggagtttgtgtgtatctttctaaaggcctcagaatttatcttaaaaaataaatcgtctttctcaac

SEQ ID NO: 6093 - protein, 65 aa, Homo sapiens [sequence omitted]

SEQ ID NO: 6094 - DNA, 2181 bp, Homo sapiens
agggaagaagggagaaagagagagagatttgaatatacattgcttcaaggatgcaaaaaattacaacctggaaaaggcttcgagtaactttaggaaaatgagctgctggactcctcagtcaatctgtcctttctagtcaatgaaaaagacagggtttgaggttccttccgaaacggggccggctaatttagcccctcccacgagcccaagggtctgttatatctctgtttccttgaggacctctctcacggagacggaccacagcaagcagaggctgggggggggaaagacgaggaaagaggaggaaaacaaaagctgctacttatggaagatacaaaggagtctaacgtgaagacattttgctccaagaatatcctagccatccttggcttctcctctatcatagctgtgatagctttgcttgctgtggggttgacccagaacaaagcattgccagaaaacgttaagtatgggattgtgctggatgcgggttcttctcacacaagtttatacatctataagtggccagcagaaaaggagaatgacacaggcgtggtgcatcaagtagaagaatgcagggttaaaggtcctggaatctcaaaatttgttcagaaagtaaatgaaataggcatttacctgactgattgcatggaaagagctagggaagtgattccaaggtcccagcaccaagagacacccgtttacctgggagccacggcaggcatgcggttgctcaggatggaaagtgaagagttggcagacagggttctggatgtggtggagaggagcctcagcaactacccctttgacttccagggtgccaggatcattactggccaagaggaaggtgcctatggctggattactatcaactatctgctgggcaaattcagtcagaaaacaaggtggttcagcatagtcccatatgaaaccaataatcaggaaacctttggagctttggaccttgggggagcctctacacaagtcacttttgtaccccaaaaccagactatcgagtccccagataatgctctgcaatttcgcctctatggcaaggactacaatgtctacacacatagcttcttgtgctatgggaaggatcaggcactctggcagaaactggccaaggacattcaggttgcaagtaatgaaattctcagggacccatgctttcatcctggatataagaaggtagtgaacgtaagtgacctttacaagaccccctgcaccaagagatttgagatgactcttccattccagcagtttgaaatccagggtattggaaactatcaacaatgccatcaaagcatcctggagctcttcaacaccagttactgcccttactcccagtgtgccttcaatgggattttcttgccaccactccagggggattttggggcattttcagctttttactttgtgatgaagtttttaaacttgacatcagagaaagtctctcaggaaaaggtgactgagatgatgaaaaagttctgtgctcagccttgggaggagataaaaacatcttacgctggagtaaaggagaagtacctgagtgaatactgcttttctggtacctacattctctccctccttctgcaaggctatcatttcacagctgattcctgggagcacatccatttcattggcaagatccagggcagcgacgccggctggactttgggctacatgctgaacctgaccaacatgatcccagctgagcaaccattgtccacacctctctcccactccacctatgtcttcctcatggttctattctccctggtccttttcacagtggccatcataggcttgcttatctttcacaagccttcatatttctggaaagatatggtatagcaaaagcagctgaaatatgctggctggagtgaggaaaaaaatcgtccagggagcattttcctccatcgcagtgttcaaggccatccttccctgtctgccagggccagtcttgacgagtgtgaagcttccttggcttttactgaagcctttcttttggaggtattcaatatcctttgcctcaaggacttcggcagatactgtctctttcatgagtttttcccagctacacctttctcctttgtactttgtgcttgtataggttttaaagacctgacacctttcataatctttgctttataaaagaacaatattgactttgtctag

SEQ ID NO: 6095 - protein, 510 aa, Homo sapiens; identical to SEQ ID NO: 810

SEQ ID NO: 6096 - DNA, 3391 bp, Homo sapiens
agggaagaagggagaaagagagagagatttgaatatacattgcttcaaggatgcaaaaaattacaacctggaaaaggcttcgagtaactttaggaaaatgagctgctggactcctcagtcaatctgtcctttctagtcaatgaaaaagacagggtttgaggttccttccgaaacggggccggctaatttagcccctcccacgagcccaagggtctgttatatctctgtttccttgaggacctctctcacggagacggaccacagcaagcagaggctgggggggggaaagacgaggaaagaggaggaaaacaaaagctgctacttatggaagatacaaaggagtctaacgtgaagacattttgctccaagaatatcctagccatccttggcttctcctctatcatagctgtgatagctttgcttgctgtggggttgacccagaacaaagcattgccagaaaacgttaagtatgggattgtgctggatgcgggttcttctcacacaagtttatacatctataagtggccagcagaaaaggagaatgacacaggcgtggtgcatcaagtagaagaatgcagggttaaaggtcctggaatctcaaaatttgttcagaaagtaaatgaaataggcatttacctgactgattgcatggaaagagctagggaagtgattccaaggtcccagcaccaagagacacccgtttacctgggagccacggcaggcatgcggttgctcaggatggaaagtgaagagttggcagacagggttctggatgtggtggagaggagcctcagcaactacccctttgacttccagggtgccaggatcattactggccaagaggaaggtgcctatggctggattactatcaactatctgctgggcaaattcagtcagaaaacaaggtggttcagcatagtcccatatgaaaccaataatcaggaaacctttggagctttggaccttgggggagcctctacacaagtcacttttgtaccccaaaaccagactatcgagtccccagataatgctctgcaatttcgcctctatggcaaggactacaatgtctacacacatagcttcttgtgctatgggaaggatcaggcactctggcagaaactggccaaggacattcaggttgcaagtaatgaaattctcagggacccatgctttcatcctggatataagaaggtagtgaacgtaagtgacctttacaagaccccctgcaccaagagatttgagatgactcttccattccagcagtttgaaatccagggtattggaaactatcaacaatgccatcaaagcatcctggagctcttcaacaccagttactgcccttactcccagtgtgccttcaatgggattttcttgccaccactccagggggattttggggcattttcagctttttactttgtgatgaagtttttaaacttgacatcagagaaagtctctcaggaaaaggtgactgagatgatgaaaaagttctgtgctcagccttgggaggagataaaaacatcttacgctggagtaaaggagaagtacctgagtgaatactgcttttctggtacctacattctctccctccttctgcaaggctatcatttcacagctgattcctgggagcacatccatttcattggcaagatccagggcagcgacgccggctggactttgggctacatgctgaacctgaccaacatgatcccagctgagcaaccattgtccacacctctctcccactccacctatgtcttcctcatggttctattctccctggtccttttcacagtggccatcataggcttgcttatctttcacaagccttcatatttctggaaagatatggtatagcaaaagcagctgaaatatgctggctggagtgaggaaaaaaatcgtccagggagcattttcctccatcgcagtgttcaaggccatccttccctgtctgccagggccagtcttgacgagtgtgaagcttccttggcttttactgaagcctttcttttggaggtattcaatatcctttgcctcaaggacttcggcagatactgtctctttcatgagtttttcccagctacacctttctcctttgtactttgtgcttgtataggttttaaagacctgacacctttcataatctttgctttataaaagaacaatattgactttgtctagaagaactgagagtcttgagtcctgtgataggaggctgagctggctgaaagaagaatctcaggaactggttcagttgtactctttaagaacccctttctctctcctgtttgccatccattaagaaagccatatgatgcctttggagaaggcagacacacattccattcccagcctgctctgtgggtaggagaattttctacagtaggcaaatatgtgctaaagccaaagagttttataaggaaatatatgtgctcatgcagtcaatacagttctcaatcccacccaaagcaggtatgtcaataaatcacatattcctaggtgatacccaaatgctacagagtggaacactcagacctgagatttgcaaaaagcagatgtaaatatatgcattcaaacatcagggcttactatgaggtaggtggtatatacatgtcacaaataaaaatacagttacaactcagggtcacaaaaaatgcatcttccaatgcatatttttattatggtaaaatatacataaatataattcaccattttaacatttaattcatattaaatacgtacaaatcagtgacatttagtacattcacagtgttgtgccaccatcaccactatttagttccagaacatttgcatcatcaatacattgtctagagacaagactatcctgggtaggcagaaaccatagatcttttgtgtttacagctatggaaaccaactgtaccataaagatagttcactgagttttaaagccaagccacatcttatttttccaaggtttaatttagtgagagggcagcattagtgtggagtggcatgcttttgccctatcgtggaatttacacatcagaatgtgcaggatccaagtctgaaagtgttgccacccgtcacacaacatgggctttgtttgcttattccatgaagcagcagctatagaccttaccatggaaacatgaagagaccctgcacccctttccttaaggattgctgcaagagttacctgttgagcaggattgactggtgatgtttcattctgaccttgtcccaagctctccatctctagatctggggactgactgttgagctgatggggaaagaaaagctctcacacaaaccggaagccaaatgtcccctatctcttgaatgatcaagtcacttttgacaacatccaggtgaatataaaaacttaataaagctgtggaaaggaactctt

SEQ ID NO: 6097 - protein, 510 aa, Homo sapiens; identical to SEQ ID NO: 810

SEQ ID NO: 6098 - DNA, 4018 bp, Homo sapiens
agggaagaagggagaaagagagagagatttgaatatacattgcttcaaggatgcaaaaaattacaacctggaaaaggcttcgagtaactttaggaaaatgagctgctggactcctcagtcaatctgtcctttctagtcaatgaaaaagacagggtttgaggttccttccgaaacggggccggctaatttagcccctcccacgagcccaagggtctgttatatctctgtttccttgaggacctctctcacggagacggaccacagcaagcagaggctgggggggggaaagacgaggaaagaggaggaaaacaaaagctgctacttatggaagatacaaaggagtctaacgtgaagacattttgctccaagaatatcctagccatccttggcttctcctctatcatagctgtgatagctttgcttgctgtggggttgacccagaacaaagcattgccagaaaacgttaagtatgggattgtgctggatgcgggttcttctcacacaagtttatacatctataagtggccagcagaaaaggagaatgacacaggcgtggtgcatcaagtagaagaatgcagggttaaaggtcctggaatctcaaaatttgttcagaaagtaaatgaaataggcatttacctgactgattgcatggaaagagctagggaagtgattccaaggtcccagcaccaagagacacccgtttacctgggagccacggcaggcatgcggttgctcaggatggaaagtgaagagttggcagacagggttctggatgtggtggagaggagcctcagcaactacccctttgacttccagggtgccaggatcattactggccaagaggaaggtgcctatggctggattactatcaactatctgctgggcaaattcagtcagaaaacaaggtggttcagcatagtcccatatgaaaccaataatcaggaaacctttggagctttggaccttgggggagcctctacacaagtcacttttgtaccccaaaaccagactatcgagtccccagataatgctctgcaatttcgcctctatggcaaggactacaatgtctacacacatagcttcttgtgctatgggaaggatcaggcactctggcagaaactggccaaggacattcaggttgcaagtaatgaaattctcagggacccatgctttcatcctggatataagaaggtagtgaacgtaagtgacctttacaagaccccctgcaccaagagatttgagatgactcttccattccagcagtttgaaatccagggtattggaaactatcaacaatgccatcaaagcatcctggagctcttcaacaccagttactgcccttactcccagtgtgccttcaatgggattttcttgccaccactccagggggattttggggcattttcagctttttactttgtgatgaagtttttaaacttgacatcagagaaagtctctcaggaaaaggtgactgagatgatgaaaaagttctgtgctcagccttgggaggagataaaaacatcttacgctggagtaaaggagaagtacctgagtgaatactgcttttctggtacctacattctctccctccttctgcaaggctatcatttcacagctgattcctgggagcacatccatttcattggcaagatccagggcagcgacgccggctggactttgggctacatgctgaacctgaccaacatgatcccagctgagcaaccattgtccacacctctctcccactccacctatgtcttcctcatggttctattctccctggtccttttcacagtggccatcataggcttgcttatctttcacaagccttcatatttctggaaagatatggtatagcaaaagcagctgaaatatgctggctggagtgaggaaaaaaatcgtccagggagcattttcctccatcgcagtgttcaaggccatccttccctgtctgccagggccagtcttgacgagtgtgaagcttccttggcttttactgaagcctttcttttggaggtattcaatatcctttgcctcaaggacttcggcagatactgtctctttcatgagtttttcccagctacacctttctcctttgtactttgtgcttgtataggttttaaagacctgacacctttcataatctttgctttataaaagaacaatattgactttgtctagaagaactgagagtcttgagtcctgtgataggaggctgagctggctgaaagaagaatctcaggaactggttcagttgtactctttaagaacccctttctctctcctgtttgccatccattaagaaagccatatgatgcctttggagaaggcagacacacattccattcccagcctgctctgtgggtaggagaattttctacagtaggcaaatatgtgctaaagccaaagagttttataaggaaatatatgtgctcatgcagtcaatacagttctcaatcccacccaaagcaggtatgtcaataaatcacatattcctaggtgatacccaaatgctacagagtggaacactcagacctgagatttgcaaaaagcagatgtaaatatatgcattcaaacatcagggcttactatgaggtaggtggtatatacatgtcacaaataaaaatacagttacaactcagggtcacaaaaaatgcatcttccaatgcatatttttattatggtaaaatatacataaatataattcaccattttaacatttaattcatattaaatacgtacaaatcagtgacatttagtacattcacagtgttgtgccaccatcaccactatttagttccagaacatttgcatcatcaatacattgtctagagacaagactatcctgggtaggcagaaaccatagatcttttgtgtttacagctatggaaaccaactgtaccataaagatagttcactgagttttaaagccaagccacatcttatttttccaaggtttaatttagtgagagggcagcattagtgtggagtggcatgcttttgccctatcgtggaatttacacatcagaatgtgcaggatccaagtctgaaagtgttgccacccgtcacacaacatgggctttgtttgcttattccatgaagcagcagctatagaccttaccatggaaacatgaagagaccctgcacccctttccttaaggattgctgcaagagttacctgttgagcaggattgactggtgatgtttcattctgaccttgtcccaagctctccatctctagatctggggactgactgttgagctgatggggaaagaaaagctctcacacaaaccggaagccaaatgtcccctatctcttgaatgatcaagtcacttttgacaacatccaggtgaatataaaaacttaataaagctgtggaaaggaactcttaatcttcttttctgctacttaggttaaattcactagatcttgattaggaatcaaaattcgaattgggacatgttcaaattctttcttgtggtagttgcctatactgtcatcgctgctgttggttgagcatttgtggtgtaccacgctgtgtgctcaagggtattacattcatcttctcatttaatcctcacaacaatctgaagaaggtaggtattacaattcccacttcatagaaacagaaactgaggttcagagaggttaagtcatttgcccaaatggctgagccaaagcctaccatgtacctaacctttattttctttcccgaacataccaggctgtctcctcataacttccaagcatgcacttaaaactccacatgaatacaaggttcatgggacttggtattcatagaaagggaggcagaaagctggtctgttcctgataggcttgtaatttaatatcattctgttcatgtgctttggatggaagcacatctggcatatgatgctaatcagtggttcccatacccctggcttcctaattttaatgtttgctcacagcatagtagattgacatcaaatagtggccgatgatgatgaaaataaaggtcaaataagttgagccaat

SEQ ID NO: 6099 - protein, 510 aa, Homo sapiens; identical to SEQ ID NO: 810

SEQ ID NO: 6100 - DNA, 1649 bp, Homo sapiens
gcaagcagaggctgggggggggaaagacgaggaaagaggaggaaaacaaaagctgctacttatggaagatacaaaggagtctaacgtgaagacattttgctccaagaatatcctagccatccttggcttctcctctatcatagctgtgatagctttgcttgctgtggggttgacccagaacaaagcattgccagaaaacgttaaggatggaaagtgaagagttggcagacagggttctggatgtggtggagaggagcctcagcaactacccctttgacttccagggtgccaggatcattactggccaagaggaaggtgcctatggctggattactatcaactatctgctgggcaaattcagtcagaaaacaaggtggttcagcatagtcccatatgaaaccaataatcaggaaacctttggagctttggaccttgggggagcctctacacaagtcacttttgtaccccaaaaccagactatcgagtccccagataatgctctgcaatttcgcctctatggcaaggactacaatgtctacacacatagcttcttgtgctatgggaaggatcaggcactctggcagaaactggccaaggacattcaggttgcaagtaatgaaattctcagggacccatgctttcatcctggatataagaaggtagtgaacgtaagtgacctttacaagaccccctgcaccaagagatttgagatgactcttccattccagcagtttgaaatccagggtattggaaactatcaacaatgccatcaaagcatcctggagctcttcaacaccagttactgcccttactcccagtgtgccttcaatgggattttcttgccaccactccagggggattttggggcattttcagctttttactttgtgatgaagtttttaaacttgacatcagagaaagtctctcaggaaaaggtgactgagatgatgaaaaagttctgtgctcagccttgggaggagataaaaacatcttacgctggagtaaaggagaagtacctgagtgaatactgcttttctggtacctacattctctccctccttctgcaaggctatcatttcacagctgattcctgggagcacatccatttcattggcaagatccagggcagcgacgccggctggactttgggctacatgctgaacctgaccaacatgatcccagctgagcaaccattgtccacacctctctcccactccacctatgtcttcctcatggttctattctccctggtccttttcacagtggccatcataggcttgcttatctttcacaagccttcatatttctggaaagatatggtatagcaaaagcagctgaaatatgctggctggagtgaggaaaaaaatcgtccagggagcattttcctccatcgcagtgttcaaggccatccttccctgtctgccagggccagtcttgacgagtgtgaagcttccttggcttttactgaagcctttcttttggaggtattcaatatcctttgcctcaaggacttcggcagatactgtctctttcatgagtttttcccagctacacctttctcctttgtactttgtgcttgtataggttttaaagacctgacacctttcataatctttgctttataaaagaacaatattgactttgtctag

SEQ ID NO: 6101 - protein, 372 aa, Homo sapiens
MESEELADRVLDVVERSLSNYPFDFQGARIITGQEEGAYGWITINYLLGKFSQKTRWFSIVPYETNNQETFGALDLGGASTQVTFVPQNQTIESPDNALQFRLYGKDYNVYTHSFLCYGKDQALWQKLAKDIQVASNEILRDPCFHPGYKKVVNVSDLYKTPCTKRFEMTLPFQQFEIQGIGNYQQCHQSILELFNTSYCPYSQCAFNGIFLPPLQGDFGAFSAFYFVMKFLNLTSEKVSQEKVTEMMKKFCAQPWEEIKTSYAGVKEKYLSEYCFSGTYILSLLLQGYHFTADSWEHIHFIGKIQGSDAGWTLGYMLNLTNMIPAEQPLSTPLSHSTYVFLMVLFSLVLFTVAIIGLLIFHKPSYFWKDMV

SEQ ID NO: 6102 - DNA, 1120 bp, Homo sapiens
atttctctcatttggaacagctgtatttacccaatacctgtaccccccattgtatctaggaggtaactagcttgcttttacaggcttgtaagtggaagggacttgccttgtctcagatgagactttggactgtggacttttgggttaatgctgaaatgagttaagactttggggaactgttgggaaggaatgattggttttgaaatgtgaggattatgaaatttggaggagcccagggaggaatgatatggtttggctgtgtccccacccaaatctcaacttgaattgtatctcccagaattcccacatgttgtgggagggacgcagtgggaggtaattgaatcatggaggccagtcttttctgtgctattctcgtgataataagtcccacaagatctggtgggtttatgaagagtttctgcttttgcttcttcctcattttgctcttgatgccaccacgtaagaagtaccttttgcctcccacctgattttgaggcctccccagccatgtggaactgtaagtccaattaaaccctttttgtttccagtctcagatatgtctttatcagcagcatggaaacgaactaatacaatcatagtttttaaaaaccaatctaaatgtaactattgaacatgattagctgtttcatccctagtagagtgacagaaggaaacatccatagacaggagtaataagaaaccagctaaacttctaaaccatttttaaaggatgcgtgtgagctggcataacctacctactctttcctatgggcctctactgagagcatggaggtaatacatctaatacactgaagaccagggcaagagagctggaagaaatccctcttaagcactccaggccttcacagacaccaagcctgccagcaccttgatcttgggcttcttggcctccagaactgtgagaaaagtaatttctgttctttatattataaattaccaagtttgtcacattctgttacagccacacaaaacagactaagacatctggtaacacaggcaagtatgatcattaacttttcatggtcccttcagacacagtgtgtcttcaaaaactttcttaaaagttcctgtagctttaatggtaacttcagcagcctca

SEQ ID NO: 6103 - protein, 47 aa, Homo sapiens
MEASLFCAILVIISPTRSGGFMKSFCFCFFLILLLMPPRKKYLLPPT

SEQ ID NO: 6104 - DNA, 579 bp, Homo sapiens
gtatgattccaatgtgtagacaagtttggggactatagattaatggctttctattccttccatagtgtctcagctacttcagcatgtggttctgaatcttggctgcacattagaatcacctaagaagcttctaaacaatactgcttcttgggccctgttctgcataaggtctgaatatttctaacatgcaaacagcatgaagagccccgttctagcagggttgttgtcctggtagatcttgtgatcggagtgactccagtgccatcccctcaatgttcctctcaaatactttctcctcatgtttttgaaaattccagtcctttcttttgcaagcctaatatggagatgagtgatgtgatactgataagtttttggtctgtgttgctttcagtatgggattgtgctggatgcgggttcttctcacacaagtttatacatctataagtggccagcagaaaaggagaatgacacaggcgtggtgcatcaagtagaagaatgcagggttaaaggtcctggaatctcaaaatttgttcagaaagtaaatgaaataggcatttacctgactgattgcatggaaag

SEQ ID NO: 6105 - protein, 34 aa, Homo sapiens
MEMSDVILISFWSVLLSVWDCAGCGFFSHKFIHL

SEQ ID NO: 6106 - DNA, 447 bp, Homo sapiens
ccaagaggaaggtgcctatggctggattactatcaactatctgctgggcaaattcagtcagaaaacaaggtggttcagcatagtcccatatgaaaccaataatcaggaaacctttggagctttggaccttgggggagcctctacacaagtcacttttgtaccccaaaaccagactatcgagtccccagataatgctctgcaatttcgcctctatggcaaggactacaatgtctacacacatagcttcttgtgctatgggaaggatcaggcactctggcagaaactggccaaggacattcagatgccttctgcattttgaagacaagaaaagttaaacacactttgggaggctgaggtgggtggatcacttgaggtcaggagttggagaccagcctggccaacatggtgaaaccccatctctactaaaaatacaaaaaaagaaaaaaa

SEQ ID NO: 6107 - protein, 81 aa, Homo sapiens
MKPIIRKPLELWTLGEPLHKSLLYPKTRLSSPQIMLCNFASMARTTMSTHIASCAMGRIRHSGRNWPRTFRCLLHFEDKKS

SEQ ID NO: 6108 - DNA, 999 bp, Homo sapiens
tctaggagactctataagataaccaattgattttctactactcccaaattttaactttgtaatttaaagaggaataggcaaatagagctgctgtggttctggttctccctgcaggatgaagggggcctgcaaaatgtctcctacttccattctagtcattcagcaaggtgccttcctctggatgcactgtctgtatacttttgccatgttgcatcacataatgattctgcccaccttcaccatttgactgtcagtaaaagaatgtatgtgctcatttcttcttttattatagcgcagtgctcttcatgaagtctgaatcttgtttcatttgtgattgtaattagcacttgcttcttcaagactggctaaatgatgataatcagtgaagttctgtgatgggcacatggatgtgtattatatttttctactttggttaatatttgaatattccaataagttttaaaataacttgtttgtttctgttattagaatggcctgtccagaagacagccaaatacatccttcaaacagacttcactgcaggagacagagtggattcatcctgtattctccatgtagacttccatcttcatgagtactccaagaagatggttcagttgactattgagattggtttagagtatatatttcaccaagttctggccagcaggatctgaaaagatgtcagttggcacttctgcaaaatgtgtgtgcaagagatgtgtgcaaggaaaaccttaaacatctttcctgctttggctttgcatgtgaaagaaaatatgatgcttggatgtctgattccaaaatggcggcatggaagcaagctggcttcatgccccccaaccacagacaaccagaaacaaatgtacagcactgagattatcaccagcaatatcccagaaatcaaatatgaagatgagacagttcctggggccacaaagaagtgaaaaaactccaagcagacgggaagataatcaaacttccacatccatgtcacct

SEQ ID NO: 6109 - protein, 80 aa, Homo sapiens
MCVQEMCARKTLNIFPALALHVKENMMLGCLIPKWRHGSKLASCPPTTDNQKQMYSTEIITSNIPEIKYEDETVPGATKK

SEQ ID NO: 6110 - DNA, 804 bp, Homo sapiens
gcggcgattcaatatatccggaagcaactgtcatggctgctgtcagtgagggcccgtaatggagatcgagtcaagggttgcccagggacacttaagagccttcggcttcaaggaggcctctcaaaggacaaaggatgagactgcctggcggcagagtgccccccacaatcgtaggaactgtgtcgccgcgcttcccgttaacttgccgctaagtttttctagaaaagtcgcccttcttgccaggggtgtcctatagactttgtcatggagtgaaacagaaacaaataatggcctgtccagaagacagccaaatacatccttcaaacagacttcactgcaggagacagagtggattcatcctgtattctccatgtagacttccatcttcatgagtactccaagaagatggttcagttgactattgcaaagatcaccgccagatgcaaaaaaccaccgctaagcattttgtaaaatgctgagacatatttgagcaactcttgatgaaggccctgaccacatttctttcatgttctagacaaaatacctggagagaatggcaagcttccaggctcttgctcagcctttcttcccccttgtcagtgcagtcagggataagcatctatttttaattaatagtatttcttaagaatgaaaacaccattcacttttgcaactgtcaacttaagtacagctgctgttttgagctatgtcttttataatcggagtggattccatacctctcatccctggattttcatcttgtggcactggatgttgaatggctcagtgcctctgataagaaaa

SEQ ID NO: 6111 - protein, 65 aa, Homo sapiens [sequence omitted]

SEQ ID NO: 6112 - DNA, 1296 bp, Homo sapiens
cccaaatgctacagagtggaacactcagacctgagatttgcaaaaagcagatgtaaatatatgcattcaaacatcagggcttactatgaggtaggtggtatatacatgtcacaaataaaaatacagttacaactcagggtcacaaaaaatgcatcttccaatgcatatttttattatggtaaaatatacataaatataattcaccattttaacatttaattcatattaaatacgtacaaatcagtgacatttagtacattcacagtgttgtgccaccatcaccactatttagttccagaacatttgcatcatcaatacattgtctagagacaagactatcctgggtaggcagaaaccatagatcttttgtgtttacagctatggaaaccaactgtaccataaagatagttcactgagttttaaagccaagccacatcttatttttccaagagttacctgttgagcaggattgactggtgatgtttcattctgaccttgtcccaagctctccatctctagatctggggactgactgttgagctgatggggaaagaaaagctctcacacaaaccggaagccaaatgtcccctatctcttgaatgatcaagtcacttttgacaacatccaggtgaatataaaaacttaataaagctgtggaaaggaactcttaatcttcttttctgctacttaggttaaattcactagatcttgattaggaatcaaaattcgaattgggacatgttcaaattctttcttgtggtagttgcctatactgtcatcgctgctgttggttgagcatttgtggtgtaccacgctgtgtgctcaagggtattacattcatcttctcatttaatcctcacaacaatctgaagaaggtaggtattacaattcccacttcatagaaacagaaactgaggttcagagaggttaagtcatttgcccaaatggctgagccaaagcctaccatgtacctaacctttattttctttcccgaacataccaggctgtctcctcataacttccaagcatgcacttaaaactccacatgaatacaaggttcatgggacttggtattcatagaaagggaggcagaaagctggtctgttcctgataggcttgtaatttaatatcattctgttcatgtgctttggatggaagcacatctggcatatgatgctaatcagtggttcccatacccctggcttcctaattttaatgtttgctcacagcatagtagattgacatcaaatagtggccgatgatgatgaaaataaaggtcaaataagttgagccaat

SEQ ID NO: 6113 - protein, 52 aa, Homo sapiens [sequence omitted]

SEQ ID NO: 6114 - DNA, 1781 bp, Homo sapiens
gaggcacctcctcactattgaaaaatccattatacctgtgataaaactgattgtgttcagttgtattagatttgtatgcaaataaaaagttgggtaattagctatacattgtcctaaacgtataaaataagaaaaatacatagatgtatggtttcctaggacatctaccagtttagaatgcgaggctaatgtgggagctgccacagcatcctgattaaggctatggaaagaagttgcagactgatgatgtcttagaagtaatgacattttttaaagataatatttctttggtgagataaacagattatattttacagtaaacacattttatatttcagttaataagacattgtatattaaataatcgcatttaatgctttacttttttcctgtgttaaaattaatcactcatggccttggccatatgactttgccattcctcccactgtttatctgacttgtttatattttattgagcttgctcatatgacttacaatagcctgtgacagaagtgacaggagaccccatcctgaccaagaccttaagaggcatcctagtttcctctcactttcacgagcctctgcggggttcatcatgagaacatatccctagaaaccactggacaaggagaacaagaggtatatggaataggtctgatccacccttaccacctgaagtagagctgcccagctggcttgcagactcacaaacatgaaaatcaatgtttactgcagcaattcatgaaactttgaggctgttataaaaagtaaaggacctaatacaaatggaaagaaacatggttagtaagcaaagctagttatgagcagctgtcatgttctaacagttggaatttgaatcagagcaactattggtatttgaatcagagaggggccagaccagtttgggtgaaactcagttcatcttttaaactgacaataaagggaatatattttcatagtaattttatcattatgtggcaaactttgttctgtgagctattaaaatattcatcttggccaggtgcagtggcttacgcctgtaatctcaacactttgggaggccaaggcaggaggattgcttgagggcaggagtcgaggctgcagtgagccatgatcatgccactgcattccagcctgggcaacagagcaagactagctccaaaaaaaaaatcatctttattttaatattcaaatttacattttgagtatggaatgtaagcatcaagaattaatctttaaatccagatgaaactttcccaaggtctcttgtcatgcatcttggactgaataacaggcatccctgccttcacatcttcatgggaaggcaacaaaacctgaggaatacaacctaggatctcaaaagcttttttaggaataatgtcatatataataaataatagcaagaatgttacagcatctatagctctttaaactacctcccaagggaaagacaatgagggcttagttcctgtgtcttttaaactttaactttacgtgtatttttttggacatgtgctgtccagtatggtagctacaagccacatgtgaggtgaacacacagctagtcctaattaagatgtgctgtaaatgtaatagacacaaaatattttgaaaatttagtatgagaaaaatattaacaatttttatattgattccttgatagtattttggatttagttgctttctgaaaactctcctgtgttacccagtttgagtgtaccataccatccatctcttgcagggaccttgactgatacaacattaaaatgaagtgtaatttt

SEQ ID NO: 6115 - protein, 36 aa, Homo sapiens
MWQTLFCELLKYSSWPGAVAYACNLNTLGGQGRRIA

SEQ ID NO: 6116 - DNA, 2863 bp, Homo sapiens
gcagcagagctccacaaaagtgcgggaatgtctgacagggaagaatcagagaaaccttcaccagcagcccgacattcacctggacggacagtgcacttttcttacgtctgggcagggaaggcagggcacagacaactgacaaaagaaacacttggattgttgtataagaggagtgagctttgtaaataccacgttagctggcctgctgtggaacagaatgcctgtgaatgacagtagtcaggtagtggatgaacactgatctgagagcctgtaaaagaaactctttggaatgataatgtcatctagacctttgatacgcaaagtgtgattcctggacagatgtattggctttacctggcagcttgttggaaatgtaaaacctcaggcctcaccccagacctactgaattatttatattaattaaaattaaataatttttatttcaacaaaatccctgggtaatttgtatgtacattaaattttgagatgcatgatcttttaaggttcattctaatccttaaaattctgttttaataatgtgtacaatgaagtgctgcatggcaaactacacagaaactaaaggcatgttccaaaaaggaaaagttccatgtggctaggggaataaaagcttcatcagggaaccaggagttgggctggttcttaaaacctggagaaagaagatggttacatcaagagataaatagagtgaagcagaactagtggtgcggaccagctcgccagcaacagaagggtttgtagtcggcctggcagtggacagggaggttggctagaactattaccttaggtccgtgataatatccctgaatccaacttttcagaaagaaataggtaacatatttttcaccaggaagcttcacccagacactgaacagaatggtctcagtgcactaatggaggctcagttaaagggttgtggtagcacaaggaagagacattctgacttggaaatttggagaaggcttcacaaatgaaggggcatttgaaatgagctttgaaggtgcaagagtattccaagttgagaagacaacctgagtggtgttgggtgaacagtcattctacctggctgtagtgtagtatagtgtagtgtagtgtaggaaacatcagaggagtggagtgggatatgagcctggagagagctggcggccatggatcattgaaagccttgaatgtctgatggggaggttgactttattttgtaggcaatggaaagccaccagtggttttagttgagcagcaatgaaattaagcctgtgctttgcaaagattaatctagcagcaacagattggaagcaacaccaccattcctggtatcagtccaggtaaaatatattacagctctttactggagcaataacagtaatattagaaggagaaataaaaaagaaaaatattgcacaggcagaatggggaggtcccagtgatggagctgatcttggttcattgaggcaggggtggcattaatcatgtaaaacacaggaggaggaactgggttaggagtaatggtagagttcagtttaggtaattgcaaatacacactattccctgactagctcccaagactttttcttccctctcttcttagaacttcattagaagaggtgatgttatttcttagatgagagtatcttacttaccattgactaatacatgttctctgatgaactttgctattcaacatacatgcaaaggggttataaaaacaagtcaactctagtgctgatgagggtgatcatcatcactgatcatggtgtcagttgattatagtgtcaatttataacttaatttatgtaaaatagagcaatgcaaaagacatagcaatcttcacttcaaatgaagagtcttgaatgccacttttctaaagagaaggctcatggaggcacctcctcactattgaaaaatccattatacctgtgataaaactgattgtgttcagttgtattagatttgtatgcaaataaaaagttgggtaattagctatacattgtcctaaacgtataaaataagaaaaatacatagatgtatggtttcctaggacatctaccagtttagaatgcgaggctaatgtgggagctgccacagcatcctgattaaggctatggaaagaagttgcagactgatgatgtcttagaagtaatgacattttttaaagataatatttctttggtgagataaacagattatattttacagtaaacacattttatatttcagttaataagacattgtatattaaataatcgcatttaatgctttacttttttcctgtgttaaaattaatcactcatggccttggccatatgactttgccattcctcccactgtttatctgacttgtttatattttattgagcttgctcatatgacttacaatagcctgtgacagaagtgacaggagaccccatcctgaccaagaccttaagaggcatcctagtttcctctcactttcacgagcctctgcggggttcatcatgagaacatatccctagaaaccactggacaaggagaacaagaggtatatggaataggtctgatccacccttaccacctgaagtagagctgcccagctggcttgcagactcacaaacatgaaaatcaatgtttactgcagcaattcatgaaactttgaggctgttataaaaagtaaaggacctaatacaaatggaaagaaacatggttagtaagcaaagctagttatgagcagctgtcatgttctaacagttggaatttgaatcagagcaactattggtatttgaatcagagaggggccagaccagtttgggtgaaactcagttcatcttttaaactgacaataaagggaatatattttcatagtaattttatc

SEQ ID NO: 6117 - protein, 67 aa, Homo sapiens
MSDREESEKPSPAARHSPGRTVHFSYVWAGKAGHRQLTKETLGLLYKRSELCKYHVSWPAVEQNACE

SEQ ID NO: 6118 - DNA, 1055 bp, Homo sapiens
cacgcgcctttgggaatcttcggtgcgccaagtctgttcgccgccggggtctatcacccccgcccctcgcctctgcccgtgagcgtgtgagttgtagcgtaccctggggtctgttctggaggaggcctgagagcggggttgcctggggcgtgggtctctcatccctctcgtcctggtgaagaagaagagtatacccagcggctggcttggctttttcagaggaaacagagactctcagacatgaatactgtgacactgaccaccaggccaacttaacatcagcagatatcctgtctcagatgaagagaatggcctgtccagaagacagccaaatacatccttcaaacagacttcactgcaggagacagagtggattcatcctgtattctccatgtagacttccatcttcatgagtactccaagaagatggttcagttgactattgcaaagtctcaggtatgtctttatcagcagcatgaaaatggactaatagtaccagtagagtggggcattgctgaaaagatacccgaaaatgtggaagcaactttggaactgggtgttgaaataatctggagggctcagaagaagataggaaaatgtaggaaagtttggaacctcctagagactgtgaatggcattgacaaaaatactgatagtgatatgaacaataaggtccaggctgaggtggtctcagatggagatgaagaccttgttgggaactgaagtaaaggtgacccttgttatgttttagcaaggagactggcagcatttcacccttgccctagagatttgtggaacttagagcttgagagagatgacttagggtatctggtggaataaatttctaagcagcaaagcattcaaaaggtgacttgggtgctgttaaaaacattctgttttaaaagggaaacaagagcataaatgtggaaaatctgcagcctgatgatgcagtagaaaagaaaaacccattttttttaaggagaaattcaagctggctgcagaaatttgcataagcagcaaggagcctaatgttaatccccaagaccatggggaaa

SEQ ID NO: 6119 - protein, 98 aa, Homo sapiens
MVQLTIAKSQVCLYQQHENGLIVPVEWGIAEKIPENVEATLELGVEIIWRAQKKIGKCRKVWNLLETVNGIDKNTDSDMNNKVQAEVVSDGDEDLVGN

SEQ ID NO: 6120 - DNA, 1084 bp, Homo sapiens
ggacccagagggagcggagcacgcgcctttgggaatcttcggtgcgccaagtctgttcgccgccggggtctatcacccccgcccctcgcctctgcccgtgagcgtcagctggcttggctttttcagaggaaacagagactctcagacatgaatactgtgacactgaccaccaggccaacttaacatcagcagatatcctgtctcagatgaagagatggagtctcgcactgtcgccccagttggagtgtaatggtgcgatctcggctcactgcaagctccgcctcccgggttcatgccattctcctgcctcagcctcctgagtagctggaactacagaatggcctgtccagaagacagccaaatacatccttcaaacagacttcactgcaggagacagagtggattcatcctgtattctccatgtagacttccatcttcatgagtactccaagaagatggttcagttgactattgcaaagtctcaggtatgtctttatcagcagcatgaaaatggactaatagtaccagtagagtggggcattgctgaaaagatacccgaaaatgtggaagcaactttggaactgggtgttgaaataatctggagggctcagaagaagataggaaaatgtaggaaagtttggaacctcctagagactgtgaatggcattgacaaaaatactgatagtgatatgaacaataaggtccaggctgaggtggtctcagatggagatgaagaccttgttgggaactgaagtaaaggtgacccttgttatgttttagcaaggagactggcagcatttcacccttgccctagagatttgtggaacttagagcttgagagagatgacttagggtatctggtggaataaatttctaagcagcaaagcattcaaaaggtgacttgggtgctgttaaaaacattctgttttaaaagggaaacaagagcataaatgtggaaaatctgcagcctgatgatgcagtagaaaagaaaaacccattttttttaaggagaaattcaagctggctgcagaaatttgcataagcagcaaggagcctaatgttaatccccaagaccatggggaaa

SEQ ID NO: 6121 - protein, 98 aa, Homo sapiens; identical to SEQ ID NO: 6119

SEQ ID NO: 6122 - DNA, 1091 bp, Homo sapiens
gaggtaaagcaaggtggctggatagaatcctccagcaatcatctgcactgcaggaacaacaaattgaacaactatccacataagaagcaccttcacaagaaccaaaaatcagcagctggcttggctttttcagaggaaacagagactctcagacatgaatactgtgacactgaccaccaggccaacttaacatcagcagatatcctgtctcagatgaagagatggagtctcgcactgtcgccccagttggagtgtaatggtgcgatctcggctcactgcaagctccgcctcccgggttcatgccattctcctgcctcagcctcctgagtagctggaactacagaatggcctgtccagaagacagccaaatacatccttcaaacagacttcactgcaggagacagagtggattcatcctgtattctccatgtagacttccatcttcatgagtactccaagaagatggttcagttgactattgcaaagtctcaggtatgtctttatcagcagcatgaaaatggactaatagtaccagtagagtggggcattgctgaaaagatacccgaaaatgtggaagcaactttggaactgggtgttgaaataatctggagggctcagaagaagataggaaaatgtaggaaagtttggaacctcctagagactgtgaatggcattgacaaaaatactgatagtgatatgaacaataaggtccaggctgaggtggtctcagatggagatgaagaccttgttgggaactgaagtaaaggtgacccttgttatgttttagcaaggagactggcagcatttcacccttgccctagagatttgtggaacttagagcttgagagagatgacttagggtatctggtggaataaatttctaagcagcaaagcattcaaaaggtgacttgggtgctgttaaaaacattctgttttaaaagggaaacaagagcataaatgtggaaaatctgcagcctgatgatgcagtagaaaagaaaaacccattttttttaaggagaaattcaagctggctgcagaaatttgcataagcagcaaggagcctaatgttaatccccaagaccatggggaaa

SEQ ID NO: 6123 - protein, 98 aa, Homo sapiens; identical to SEQ ID NO: 6119

SEQ ID NO: 6124 - DNA, 1211 bp, Homo sapiens
gcggcgattcaatatatccggaagcaactgtcatggctgctgtcagtgagggcccgtaatggagatcgagtcaagggttgcccagggacacttaagagccttcggcttcaaggaggcctctcaaaggacaaaggatgagactgcctggcggcagagtgccccccacaatcgtaggaactgtgtcgccgcgcttcccgttaacttgccgctaagtttttctagaaaagtcgcccttcttgccaggggtgtcctatagactttgtcatggagtgaaacagaaacaaatacttcatatacccctcatgatgtcatgagatgactgtttggattaatcatcttcagaccaagactcttcagctggcttggctttttcagaggaaacagagactctcagacatgaatactgtgacactgaccaccaggccaacttaacatcagcagatatcctgtctcagatgaagagaatggcctgtccagaagacagccaaatacatccttcaaacagacttcactgcaggagacagagtggattcatcctgtattctccatgtagacttccatcttcatgagtactccaagaagatggttcagttgactattgcaaagtctcaggtatgtctttatcagcagcatgaaaatggactaatagtaccagtagagtggggcattgctgaaaagatacccgaaaatgtggaagcaactttggaactgggtgttgaaataatctggagggctcagaagaagataggaaaatgtaggaaagtttggaacctcctagagactgtgaatggcattgacaaaaatactgatagtgatatgaacaataaggtccaggctgaggtggtctcagatggagatgaagaccttgttgggaactgaagtaaaggtgacccttgttatgttttagcaaggagactggcagcatttcacccttgccctagagatttgtggaacttagagcttgagagagatgacttagggtatctggtggaataaatttctaagcagcaaagcattcaaaaggtgacttgggtgctgttaaaaacattctgttttaaaagggaaacaagagcataaatgtggaaaatctgcagcctgatgatgcagtagaaaagaaaaacccattttttttaaggagaaattcaagctggctgcagaaatttgcataagcagcaaggagcctaatgttaatccccaagaccatggggaaa

SEQ ID NO: 6125 - protein, 98 aa, Homo sapiens; identical to SEQ ID NO: 6119

SEQ ID NO: 6126 - DNA, 2946 bp, Homo sapiens
gcggcgattcaatatatccggaagcaactgtcatggctgctgtcagtgagggcccgtaatggagatcgagtcaagggttgcccagggacacttaagagccttcggcttcaaggaggcctctcaaaggacaaaggatgagactgcctggcggcagagtgccccccacaatcgtaggaactgtgtcgccgcgcttcccgttaacttgccgctaagtttttctagaaaagtcgcccttcttgccaggggtgtcctatagactttgtcatggagtgaaacagaaacaaatgaggtaaagcaaggtggctggatagaatcctccagcaatcatctgcactgcaggaacaacaaattgaacaactatccacataagaagcaccttcacaagaaccaaaaatcaggtgagcaatcatagtgcctggttttaacatcatgtcaaggaaagaggcactgaagagagtaggaaagacgatcttgaattgcctataccacctctctctcatccccaggcagcatggcaggaagagagaatctgtgcacttggaggagggagagttaagtgattgggggactttgcattggaactcactgctcccctaacatagcggaaagcaacacagggcagaatttggccagcgcccacagagggagcacttagacaagccctagccagacgggaactgtccatcccagcagtcagaacctgacttccagctagccccaccaccattggctaaagcactctggggtcctaataaatttgaaaggcagtctagcccacaaggaccacaattcctggacaagtcctggtactgtgcagggctcacagccagtggactcagggtgacatgatccagtgagacaccagctggggcagccaagggagtgcttgcatcacccctcccccaacttcaggcagtacagctcacagctccaggaaaagagggaagagcaaagagtactttgtcttgcaacttggataccagctcagccacagtaaaagcaccaagcagagtcctaaagcccccactcctggcactatctcccagataatatttttagacggacaccgggccagaagagaacccactgccctgaaggaaaggttgcaatcctggcagaattcaccatctgctaactaaagaacccttgggccttgaataaacatcagtggtagccagtcagtagtcaccacgaccttgggcgagacccagtattgtgctggcttcaggtgtgacccagtatatttccacctgtggcggccacagtgagagacaccttctgcttgaggaaaggaggaggaagagtaaaatgactttgttttgcaacttggcgatatgattaggctttgtgttcccacccaaatctcatcttgaattgtaatccccaggtgttgagggcgagaccgagtgggaggtgactggatcatgggggtggtttcccccatgctgttctcatgatagtgagtgagttttcacaagatctgatggttttacaagcgtctggtatttgcctggcttgcatttctctctcctgccaccatgtgaagaaggtccttgcttccccttcgccttccaccatgattctaagtttcctgaggccttcccaaccatgtggaactgtgagtcaattaaacctctttcctttataaattactttttaaagggtactatctttatagcagtgcgagaatggactacacacttgggtatccagctcagccacagtcaaataaagtgtatcaagcagactcctgaagtctctgattccagaccttaggtcttggtgggcatttctagacccatcctgggccagaaaggaacctgcggctctggcgggagagaaccaggcttggtaggactcaccaactgctgactaaaaaccccttgggccttgaataaacatcagtggtagtcagggtatagtcaccactggcctggtgcagtggtgcccataagcagatagcccttctgcttgaggaaagaaaagggaaaagcagagaggacttagttttacaacctgggtgccagttcagccccagtaaaatgaagcaccaaacaaattcctaaaacccctgaccccaggccctcgcacttcaatggcatttctaaacccaccctgggccagaagggaacctgcttcactggaaggaacctgcttcactgaaggggaagccctagtcctggcaggattcatcatttgctcactaaatagcccttggggcttgaataaacatcaagactctcaggactctcaccaacaggccttgggtgagacctagcactatgctggcttcaggtatgacccagcacagtcccagtggtggtggccatgggagtgtctgcatcactccttccccaactccaggcagctcagcatggagagagaaagacactttgtttggagaaaagggaatagaacaagaaaccctgcctggtaatccagggaattctccctgatctccttggtcttctcccaagaccaccaaggcagtacctctacaagtctgcaagagtcagcacattactggacttggggtgccccttaatgcatttatggttgcatgaccaaataactggattacaacactcaaaattatctttgaatacttactaatccttctctagaaagttgggtacaaacaaacccagactgcaaatattagaataaatatctaactattcaatgccctgacattgatgaacacccacaagcttcaagaccatccaggaaaacatgacttctccaaataaactaaataaggcaccagtgaccaattctggagtaacagaaatatgtgatctttcaagcggtgaattcaaagtaactgttttgaagaagctcagtgaaatccaaggtaagacagagaaagaattcagaatgttatgagacaaatttaacaaagagatagaaataattaaaaagaatcaagcagaaattccggagctg

SEQ ID NO: 6127 - protein, 65 aa, Homo sapiens [sequence omitted]

SEQ ID NO: 6128 - DNA, 619 bp, Homo sapiens
ctcaacattgtgggtttgcaattcagccatcatcatctcttcaatcaagagcaagtattatgcgcaaggcttctccaactttatgaatgttttcaggacaggcagcaacagaatgtatctcagctgctttatgagaagctttaaaaaattgtacaagtaataccggaatacgttctccctggaaaagattaattgtagaagtgtcaagatgtgaaagccctacttcgttcatcacctcatgctgaaagcactgacagatgctaccaaattgtcaaatgaaaattcagaaattaaccagctgaccagaaaatctttacaagattattattggcaaataagtaatacaaaacagatgtatgacttagaaaggggaaaggacctctccctactacacagtatattacgaacttggaaacagattaaatctcttcgacatgggcaagggtttacaagcaccccaataaagttacaggttcagaggattaaaatgaataaatgtgatgaacaagagcaaatctcagaaatgtctgaaactgagaagaaaaatgaaggaaaagaacttaagaatgggaaaaaactggaggtatttatattgcaaaataacattaaactcaactag

SEQ ID NO: 6129 - protein, 126 aa, Homo sapiens
MLKALTDATKLSNENSEINQLTRKSLQDYYWQISNTKQMYDLERGKDLSLLHSILRTWKQIKSLRHGQGFTSTPIKLQVQRIKMNKCDEQEQISEMSETEKKNEGKELKNGKKLEVFILQNNIKLN

SEQ ID NO: 6130 - DNA, 454 bp, Homo sapiens
tcagaagcatttgcattttagcagggcacttttgaatagtgaaaagccattaagtcataaaggaacaaatttctaatggaattgcagtgggtaacataaaatatagtaagatggcgttcagatgtgtataaaatgaaaagaataaggtggggagggagttcagaagagttattgcaatacattcttccatgccacttttgaaggcttttagttctaatccactgacaaatttttgctctgccatttttgttgtagtaatacaaaacagatgtatgacttagaaaggggaaaggacctctccctactacacagtatattacgaacttggaaacagattaaatctcttcgacatgggcaagggtttacaagcaccccaataaagttacaggttcagaggattaaaatgaataaatgtgatgaacaagagcaaatctcagaaatgtctgaaactgag

SEQ ID NO: 6131 - protein, 61 aa, Homo sapiens
MYDLERGKDLSLLHSILRTWKQIKSLRHGQGFTSTPIKLQVQRIKMNKCDEQEQISEMSET

SEQ ID NO: 6132 - DNA, 2475 bp, Homo sapiens
ggaaatggaactgaagaactctgtcttttgacatcaggaaaacttagctattctctatcatggagcttagatgaaaatggtcttcctctgatacctatgccacaatcattaagatcttcttactgcagtatgttaaggaatgtagatgcaagaagtgttcctggaattccatggctcatgaatgaacagaagctttttgaatgggcaaatgaagtcagaattgatccaaataatccagaatattctgatttaatggaatctgttacgtacatgagacttaaggggcaggatattccaaagtattttcgtcttgaacagttgcaagatgaatttaacttcgtttctgaagaggaaatggcaaagagtaaacgtttccagctattgcaacttagaaatgcaggtcaattagataatttccttctacagcaaatgcccctccatgatacagagattccagatttagtcttccagccaggtgcagtgactcatgcctgtaatcttggcactctggggagctgaggcagaaggatagtttgagtccaggagtttgagaccaacctgggcaaaatagagtatgaaagtcagaaagagaaggaggtatccgtttcagatgtaaattctattacagcacaaaggattaattctgccaattttctgaaaaaggtgagaaggttgataatgaagagaattgttaaaattagcaaatgtaacttgtcagatattgtgaatgattatgaagaaattgtatctacaagccaattgacagatgcagtttgtaagtttgttgaaccacggagaaagttaaaacctcagaggaaagaaaggaaaaaagtcacagcgcaggcgatctctgacggagatattaagattcttgtccgaatagtgagggcctataatattcctaccagaaaaacaacaattaatggcttctgctgccaactgccctattccatgccactgactctctcagtactggaagcagaaaggtggagaaaatgccccaggaaagctgcgaagcaaatgtggaatgatccttggatatgcctacttgtttgaaatcatctatatcttgcctcagacatagagaaacaatcaaatcagtagcctcagatgagaccttacatgaggatactgtacatccattcgtggaagtttctttccagcacactgtatacaaaaccaatacagcaagtggatctcatccatgctggaatgaagaaattaaagtagattttgtctcaccaggacatgattatagcttctcaagcttatctaaaataaaagataacatatatatcaacatttttgatgaaatgatgactgaaaaacatgaggatcactgtctcaagagctgtagtggtcactcatatataagaaagaattggcttggatgcattgtcttccctttttctgctcttctgcaacaatctgaggatcgaaaggactctgaagagtaaagtgatggaatggcgacctaaacacccaacacattggaatcgacagtgtacttttattttgcgacaaatccttcctaagctggaatttggcataggaagctttgtttcatctgaaggagataatgaatttgaaagaatactacaattttattgggtcacgggatttcccatccagatgccatacattgatgtacagtcaattattgatgctgtttatcaaactggaattcactctgctgaatttccccagacagaatttgctttagctgtatacattcacccatacccaaacaacatattatctgtgtgggtctatttggcttccttagttcaacatcaatgaaaaggaagcagagcaaagtaaaagattgtactatagtcctctagtaccaacaaaaacttttctggtaccttgagattttgctgtttattctcaagtccagctaagtgctgggcccaatttttgattcacttacagagctgggcactatggagactcgcacccctgagtgagtctttgaggaggagtctagatgagcttctcaccagagacctctccaggaaggacctttggatagtctggctttcttgggtcactgtctgcagtaggtcttattctgggaaagaagcaattttggcctcttctcctaagaccaatgtttctcaaattgtagaattcacaccacctccatttgaatcatctggagagccttgttgaaaatgcagattactagatcctcctcaagacccactgaatcagcacctctgggagtgaagctacagactctgcattattttcaacaagctccccagataattctgatgcactgttatgagggagagcccagccttatagaatgttgtcactactaaactaaggctggtacgtttgatgctgggtctgatacaatttcagatggaagctgctcgagtggaaaactaaggtcattgcctctcatggataaaatgttatttcactggtaaagaaaaataaaataaaatctaccatgttgggctg

SEQ ID NO: 6133 - protein, 140 aa, Homo sapiens
MPQSLRSSYCSMLRNVDARSVPGIPWLMNEQKLFEWANEVRIDPNNPEYSDLMESVTYMRLKGQDIPKYFRLEQLQDEFNFVSEEEMAKSKRFQLLQLRNAGQLDNFLLQQMPLHDTEIPDLVFQPGAVTHACNLGTLGS

SEQ ID NO: 6134 - DNA, 823 bp, Homo sapiens
tacaatatcacctttcttatagattcgcatatacatggccaaaggaacaactccatgttttctaaaaggcctagagaacatacatcagctcaccaggacatgattatagcttctcaagcttatctaaaataaaagataacatatatatcaacatttttgatgaaatgatgactgaaaaacatgaggatcactgtctcaagagctgtagtggtcactcatatataagaaagaattggcttggatgcattgtcttccctttttctgctcttctgcaacaatctgagtttttagatcaaacagaggtcttgcagagagcacagatttttaaaaagaattgtaaggcaatgtttcccaaccgaagaatcgtaactactgtttttaatgatgaagggatacagttcttagtcacaagatatatcaaggcattaaatccacctcagcaacttctggatatatttcttcacaattctaatgcaacatttgacctcattgctcgatttgtatctttgattccttttgtgcctaatacaccagatgaaaatgatggctctgatatatggatgacatcagagcactgcatcagtttagctatcggaaataaggaggagcatgccatccttctctgtaatttctttctgtattttggaaagaaggcactggtcctcttgggaacgtcagtgttagaagggcatgtggcttatgtagtaactcaagaaactaatgaatatttgctttggaatccatcaactggccaatgttataagcagtttgacccgttttgtcccttaaaaagtgtagattgtttgtttgatgatagaaatgt

SEQ ID NO: 6135 - protein, 218 aa, Homo sapiens
MMTEKHEDHCLKSCSGHSYIRKNWLGCIVFPFSALLQQSEFLDQTEVLQRAQIFKKNCKAMFPNRRIVTTVFNDEGIQFLVTRYIKALNPPQQLLDIFLHNSNATFDLIARFVSLIPFVPNTPDENDGSDIWMTSEHCISLAIGNKEEHAILLCNFFLYFGKKALVLLGTSVLEGHVAYVVTQETNEYLLWNPSTGQCYKQFDPFCPLKSVDCLFDDR

SEQ ID NO: 6136 - DNA, 896 bp, Homo sapiens
tacaatatcacctttcttatagattcgcatatacatggccaaaggaacaactccatgttttctaaaaggcctagagaacatacatcagaagttttaaactgtaccagtcctttcctttatgctcaccaggacatgattatagcttctcaagcttatctaaaataaaagataacatatatatcaacatttttgatgaaatgatgactgaaaaacatgaggatcactgtctcaagagctgtagtggtcactcatatataagaaagaattggcttggatgcattgtcttccctttttctgctcttctgcaacaatctgagtttttagatcaaacagaggtcttgcagagagcacagatttttaaaaagaattgtaaggcaatgtttcccaaccgaagaatcgtaactactgtttttaatgatgaagggatacagttcttagtcacaagatatatcaaggcattaaatccacctcagcaacttctggatatatttcttcacaattctaatgcaacatttgacctcattgctcgatttgtatctttgattccttttgtgcctaatacaccagatgaaaatgatggctctgatatatggatgacatcagagcactgcatcagtttagctatcggaaataaggaggagcatgccatccttctctgtaatttctttctgtattttggaaagaaggcactggtcctcttgggaacgtcagtgttagaagggcatgtggcttatgtagtaactcaagaaactaatgaatatttgctttggaatccatcaactggccaatgttataagcagtttgacccgttttgtcccttaaaaagtgtagattgtttgtttgatgatagaaatgtaagtatatggggaaaaaaaatcttgagttatctcctctag

SEQ ID NO: 6137 - protein, 232 aa, Homo sapiens
MMTEKHEDHCLKSCSGHSYIRKNWLGCIVFPFSALLQQSEFLDQTEVLQRAQIFKKNCKAMFPNRRIVTTVFNDEGIQFLVTRYIKALNPPQQLLDIFLHNSNATFDLIARFVSLIPFVPNTPDENDGSDIWMTSEHCISLAIGNKEEHAILLCNFFLYFGKKALVLLGTSVLEGHVAYVVTQETNEYLLWNPSTGQCYKQFDPFCPLKSVDCLFDDRNVSIWGKKILSYLL

SEQ ID NO: 6138 - DNA, 567 bp, Homo sapiens
aggatcactgtctcaagagctgtagtggtcactcatatataagaaagaattggcttggatgcattgtcttccctttttctgctcttctgcaacaatctgagattagtggaacatttcaagtaactattccaccagttttgctcgggtatacttggagtaatacttatgtatttcctaaagaagattccaatgagcagaatttaaaagaatgtacattcttaaatatttttgctaccattgaacctcaaatatcatatgtcacctgtaatccaacactagataagtttttagatcaaacagaggtcttgcagagagcacagatttttaaaaagaattgtaaggcaatgtttcccaaccgaagaatcgtaactactgtttttaatgatgaagggatacagttcttagtcacaagatatatcaaggcattaaatccacctcagcaacttctggatatatttcttcacaattctaatgcaacatttgacctcattgctcgatttgtatctttgattccttttgtgcctaatacaccagatgaaaatgatggctctgatatatggatgacat

SEQ ID NO: 6139 - protein, 73 aa, Homo sapiens
MFPNRRIVTTVFNDEGIQFLVTRYIKALNPPQQLLDIFLHNSNATFDLIARFVSLIPFVPNTPDENDGSDIWM

SEQ ID NO: 6140 - DNA, 3243 bp, Homo sapiens
gcggcgattcaatatatccggaagcaactgtcatggctgctgtcagtgagggcccgtaatggagatcgagtcaagggttgcccagggacacttaagagccttcggcttcaaggaggcctctcaaaggacaaaggatgagactgcctggcggcagagtgccccccacaatcgtaggaactgtgtcgccgcgcttcccgttaacttgccgctaagtttttctagaaaagtcgcccttcttgccaggggtgtcctatagactttgtcatggagtgaaacagaaacaaatatgaaacaaagcttcctatgccaaattccagcttaggaaggatttgtcgcaaaataaaagtacactgtcgattccaatgtgttgggtgtttaggtcgccattccatcactttactcttcagagtcctttcgatcctaagatatgcatgactcttggccagtgattctcaacctcggctgcacattggcatcaactggggaaccttcaaagctcctggcatgtgggttccaccctcagagattgtgatgtaatgcactgacagtcaaattgggaacaactgtaaattggctcagttcattcatcttttactgctgtacagaagatttcattgtataagtacttcacaactcatgtactgatttctagttgatgaactgtttcaaatttttgttatttcaagcaattctctaatgaatgttgttgtacttgtctccccgtgaatgttcctctggggtatatactgagaagtttgaattggcacatcaaaggttgagcatcttcacctttaccaggtattatcaacatattgttttccaaagcatttacagaaatgtgtgcttccaccacttctctgcctctttgacaacactcagtatgatcacacatttttttttgccaattttatgcatgtgaaataattttattgttttagttgtttatttatcttagagaaaaggtcttgcagtaggctcctaggctggagtgcagtggtgcgatcatagctcactgtaacctcaacctcctgggctcaaacagtcctctcacctaagcgtcctgagtagctgggactacacttgcgcatcatcaccatgcccgggtagttcttttgtttttatttttagagacagggtcttgctctgctgcccaggctggtctcgaactcctggcctcaagtgatcctcatggcttgaccgccccaagtgttgggattacaggcataagccaccatgtccagcaattgttttattgttttaaattgtatttacttgattatgagtgaggtttagcatgtaagttactgcttctatgaattgtcttttgcctaatttttctattgttcttttgctctctcttatcctttctctctctctccctccctccctctgggctcctgtctcctcatttgtggactgtgcaattgctgacaccctgcacagcttggccctcaatccagaaacagctgttgacatggtatttctagtgccttcccaaagtaatactgagtacatcacagatccattagccaacccatgtagtgattgagttacttcttggtctcctgtaccctgagccccagacagtgagtctatagctttccttcccatctcctttcaaaaacagggaagtaaagtagccccaccacagtccctgtctttaaaaagtgatgcttgctctggttctctggctttcatgaagcattttcagatcttgctgccatccctgctccagcctactcactgctagtgtttctgtcctgtttctattccgtgagacaactatcatggttgggagtccagaaagctttttgtcaatttttctacttgatccttaccatagatatggcgcaggagggctaggtcagagttagaacttactacacatcttgaacattatatgttatgttttatggtgaaaaaattttaaattctattttagcatctaaatttgcatttaagatgtcactttcttctcaatttattttttctgcaagtaggggaaagagcctgtgagctggatggcagagaaaactagtttttaaattaatattgccaaatatttcagtaaccaaccaactataaaacataataagagctgtcacaattagtaaagattagaagcaatggtaactctcatacagacacccctgggaaaatatgatttacctgtatgctttgtatttttgttccttgaacgttttttggaagcaactgcttccagaaactttcctttgaatagtcaaaaaatacagccattggtgtattattttgttgaatattaaaccagacctatgaaaacattaatataacattagtgtaggtccataggaacacaaggcccattgttggtaaggaaggagcaaaattttacagtcttactactcaatgaagtggcagaatcccagcggggttctgaggcaggagataaagagattctagggtttcatgatcattagactacctcaacggttctcatccttgaaggcactacacaatcacctggaggagctttagtgataaaagattgccccggccccatgccctagggaatctgatagactatctatatttaaagttccccaggtgattctagtgtgtagccagggtgactctagaggagataactcaagattttttttccccatatacttacatttctatcatcaaacaaacaatctacactttttaagggacaaaacgggtcaaactgcttataacattggccagttgatggattccaaagcaaatattcattagtttcttgagttactacataagccacatgcccctgtatgagaaaaaagaaagtaatttttggtggatttaaataatttctatatatggaaattatactgtgatgattctaatttttaaagccttttttagtggagtgtggtggcttatacctgtaatcccggctctttgggaggctgaggtgggaggatcacttgagcccaggagtttgagaccagcctgggcaacataaggaaaccctgtatctatcacaaaaaattttttttttaatttgctgggcacagcggcacacacacctgtagtcccagctacttgggaggctaaggtgggaggatcgcttgagcctgaggagttgagactgcaataagctgtgataatgccactgccctatagcttgggtgacagagtgagatcctgtctcaataacaaacaaacaacaaaaataaataaaagcctttttgagggcttttacattttctttgaaat

SEQ ID NO: 6141 - protein, 65 aa, Homo sapiens [sequence omitted]

SEQ ID NO: 6142 - DNA, 654 bp, Homo sapiens
gcggcgattcaatatatccggaagcaactgtcatggctgctgtcagtgagggcccgtaatggagatcgagtcaagggttgcccagggacacttaagagccttcggcttcaaggaggcctctcaaaggacaaaggatgagactgcctggcggcagagtgccccccacaatcgtaggaactgtgtcgccgcgcttcccgttaacttgccgctaagtttttctagaaaagtcgcccttcttgccaggggtgtcctatagactttgtcatggagtgaaacagaaacaaatatatgcatgactcttggccagtgattctcaacctcggctgcacattggcatcaactggggaaccttcaaagctcctggcatgtgggttccaccctcagagattgtgatgtaatgcactgacagtcaaattgggaacaactgtaaattggctcagttcattcatcttttactgctgtacagaagatttcattgtataagtacttcacaactcatgtactgatttctagttgatgaactgtttcaaatttttgttatttcaagcaattctctaatgaatgttgttgtacttgtctccccgtgaatgttcctctggggtatatactgagaagtttgaattggcacatcaaaggttgagcatcttcaccttt

SEQ ID NO: 6143 - protein, 65 aa, Homo sapiens [sequence omitted]

SEQ ID NO: 6144 - DNA, 523 bp, Homo sapiens
ccatctgtgctcgtaaatcaggaaactgcaaaactgtgagaacactccgacgtcaattgagtatctacatctaacgtaacactggctcatagtgggaaatcaataaatatcacctgaatgaacaagagaatgattatacattaaacaaacaagagcctcatcttgaaatagattattctccccctaggaggcatcaatgctttggtcacagctttgggatgggcaaagcaagatatgcatgactcttggccagtgattctcaacctcggctgcacattggcatcaactggggaaccttcaaagctcctggcatgtgggttccaccctcagagattgtgatgtaatgcactgacagtcaaattgggaacaactgtaaattggctcagttcattcatcttttactgctgtacagaagatttcattgtataagtacttcacaactcatgtactgatttctagttgatgaactgtttcaaatttttgttatttcaagcaattctctaatgaatgttgttgtacttgt

SEQ ID NO: 6145 - protein, 34 aa, Homo sapiens
MHDSWPVILNLGCTLASTGEPSKLLACGFHPQRL

SEQ ID NO: 6146 - DNA, 497 bp, Homo sapiens
gcggcgattcaatatatccggaagcaactgtcatggctgctgtcagtgagggcccgtaatggagatcgagtcaagggttgcccagggacacttaagagccttcggcttcaaggaggcctctcaaaggacaaaggatgagactgcctggcggcagagtgccccccacaatcgtaggaactgtgtcgccgcgcttcccgttaacttgccgctaagtttttctagaaaagtcgcccttcttgccaggggtgtcctatagactttgtcatggagtgaaacagaaacaaatggattcccaagagctttgaatgaagacatttaagattacttctagtaaccttgcttgtcaaacccatggtggatgtaattaaccatctgtgctcgtaaatcaggaaactgcaaaactgtgagaacactccgacgtcaattgagatatgcatgactcttggccagtgattctcaacctcggctgcacattggcatcaactggggaaccttca

SEQ ID NO: 6147 - protein, 65 aa, Homo sapiens [sequence omitted]

SEQ ID NO: 6148 - DNA, 800 bp, Homo sapiens
ggagactctggccgcggcgattcaatatatccggaagcaactgtcatggctgctgtcagtgagggcccgtaatggagatcgagtcaagggttgcccagggacacttaagagccttcggcttcaaggaggcctctcaaaggacaaaggatgagactgcctggcggcagagtgccccccacaatcgtaggaactgtgtcgccgcgcttcccgttaacttgccgctaagtttttctagaaaagtcgcccttcttgccaggggtgtcctatagactttgtcatggagtgaaacagaaacaaatggattcccaagagctttgaatgaagacatttaagattacttctagtaaccttgcttgtcaaacccatggtggatgtaattaaccatctgtgctcgtaaatcaggaaactgcaaaactgtgagaacactccgacgtcaattgaggtgatatgggggctgaaatgtgattagaggaaacctaatcaattgtattttaacctctttggtggattatcacaaaagaggtggatggtaaccctaggacagtgagactgtccacttttctgagactggagatcaatctcttaatagtaaaacgtaaatatttttaaaacttcaccccttttactttgaatcctttgtccaaaaagatacatgatgataaagaactactacaaagtgataaatacattttatgtgattctgggtggcatcttcatttgaagatcatcagcagacatgtatatgagccgtaccctatccatagacgatgcttatacccaggagagcaggcccgcaggaa

SEQ ID NO: 6149 - protein, 65 aa, Homo sapiens [sequence omitted]

SEQ ID NO: 6150 - DNA, 4105 bp, Homo sapiens
gcgggatgctgaccgtacccaggcgggagccgccgcgccgccgcctggcgctgcacctgggcccggcccggccgccaattggacggctcggggcgaccccgctgtatcgcgagacgagattggcagcggcggggcctcaagtgcccccgcgctggctttgtatgcggagccgcctgccggtcctttaacaatgggcggcgcgagcgtccaggcgctgggctctagctgaggccggcgcttagcggcccactgtccgcagcatgagcggggccggcgtccgccgcacgacggcggggctggggctgtgagggccgcggttccggactcgagttgccgcgtcgggctgggcgcgccgccgggtcccatggagctggaggggcagtggtggcgaggacagctggccgccgatattcaccaagcgcttcgctacaaggagctgaagttgccctcctataaaggccagtcccctcagttaagtctcagacggtattttgctgacttgattgccattgtgagcaatcgcttcacactctgcccttctgcccgccatcttgctgtctatttactggacctgtttatggaccgctatgacatctctatccagcagctgcatttagttgcgctttcctgcctgcttctagcaagtaaatttgaagaaaaagaagacagtgtgcctaagctggagcagctcaacagcctgggttgtatgactaatatgaatctagtattaacaaaacaaaatttgctacatatggaactattattattagaaacctttcagtggaacctctgccttccaacagccgcccatttcattgagtattatctctctgaagcagtacacgaaacagatcttcatgacggctggccaatgatttgcttggaaaagactaaactctacatggccaaatatgcagattacttcctggaagtatctttgcaagctgctgcatgtgtggcttcttcgaggattatacttcgtctttctccaacgtggcctacaagactacatcgtcttactgcctactcttgggatttcttagtgcagtgtattgaacgactgttgatcgctcatgataatgatgtgaaagaagcaaacaaacagagagggcaagcaggacctcagtcagcgcaactaagtgtattccagacagcctcccagccatcacggccagttcactttcagcaacctcagtatctccatcagacacatcagacctcactgcagtatcgccatcctacgtcagaacaaccaagctgtcagcagattgtatcgaccacacacacctcatcttacacactacagacatgtcctgctggcttccaaactagtgttcagggccttgggcacatgcagactggtgttgggatgtcactggcaataccagtagaagttaagccctgtctgagtgtttcttacaaccggagttatcagataaatgaacattacccttgtattactccatgttttgaaaggtgattatttgtgaagctgataaccgacccagactgctttgtgacatgaagctatgggtaagcgttttgtaaacttctgttcaaaaggaaagggatctaaatgacatcagaactcttcaggtaccagcaccaggaagactgaatatcctttttaatgcaccatgaatcctgggagactaagcaaattaacagtatgtcaaattctgttacaacaaatccctgtatgacaaaaatgttcaagtcctggctgatggtccaaatatttcaaaaatattcagtacaacagaaaatttggacagacttcaatttgccattttgagatttgacctgtggtagcatctgggcctaatgttggcttctaagtcaaagactaaatgtttatctcatctatggacttgccaaacagtcttttatgaaggaaagttacagtattaatttttgaaaaggttttttttattctgcaattttttatttttgttctacacatgaatttttgactaagtttaaactcatgaattgttatgctataccaatctgcagtaaaaaaaatttttttagatgattctatataacttcgtctcacaaatagtgtaggtatctgggtttatatactaaaattaagggtggagaagatcttattttttaaatcatggtcataatttttctttttttccctaagtgatcaacatcaaatttttagaattaaaatacatttaactcagggaatttgtactacttggaaacacttaactgtaatgcaacatgccttgggaatgttatagtgtgaactacctttataacataggttaaaatacgcttgctagggtgtgttttcaaatgagaacataatatagctcagaatgaagtggtagttcctgtgattcataatacatatgtaggttttgcatatctcagtgcaatccatgatttatactcagaatcgacattcttaaaaagttatttcaagggatggcataactgtaagaggtcagtgctagaataaagtcctgtaggtttattttggaagggactgtggccagggtagttctcaggttgtgctagagcagcactttgttatgtggaagacaggttttttaagcaacctttgaatccagctctagtcagtctaagcaggcaaaggtaactgatgactaaatttcagtagctactttcattggattgaccctacaactgccctgggacatttcactgtaccagtattaactgcaaacagcaataattgtcattacagcaagggcagtttgggggtaaagcattttggaggaataaccttaaaaagttaaaaagtcattgtaataactgataaactgtatacattgtgctcctttctgtgggagaagaaagatttggtggagggaagctttctggtttaaaaattagtaaggtgtgtctttttgttttttttaagatagcacttgaatagaagggaaaactgcatggcagatacgtgactgccacaatatgcatcgaagacaaacttactataaagatgttgtgggtatgcagcaggagtctcagtaatcaagccaatggcctttgtcaggaagggaaggggctcaacacagtgatggactgatccagatggctcccggggatgaatgtgggtgggtagcttctgtcagtatcaatgcttagagaaatatcctttccttaaaaagaaaataacttttatatttagagtacatagggcatgatgtggatttattagtctggtagataaaatgaaaaaccactcaggtaagaacactcactcatggcagtttttaagcatgaaaattgttttctgaaagtatcatcacttttcctttttaaagaaggctgctaattggattttggtagttcttacctcaagaaaacttgaattatttgggggaaagtaggctcaaaagagaatatatctttcacattcacattcagaacccagcaacctggagtccaattttcagtattttaactacctcaataatgctatgaatgtaagatattgggatagagatcccaacttgaaacaacagccagtgcctgtggtaacttaatgtcttgtcaaatacttttattgattggtttatatgccattcttgttatagaagaatatgccttttaaaaaagcttattaataacactttcccaatttatattttaaaaagctaaagaacactggattaataatcttttgggagggtagaataaaataattgattactattgctgcatacccggggtgggatggggtggttggagaaccagaactatttttaaaacattaggtttcaatataaatacaactcacaactgctagctttggggggtgggggaacattgtgtgggttttgttttgtttaatttattgattagtctttaaagtaggcttttttttttttttttgagaatactggaccatcattaaatgtgtactgtgaagagattaatatgtatgaagggctttaccaaagtccactaaataaacactactcaagtacagactgcaaaccaaaatgtatctgtgttacgacattaattgcaaatagcaagtatggtgctaaagtctacaccaatggaattagatgagtgctatgcacttaattttaaaataaaactagttttcagt

SEQ ID NO: 6151 - protein, 371 aa, Homo sapiens
MELEGQWWRGQLAADIHQALRYKELKLPSYKGQSPQLSLRRYFADLIAIVSNRFTLCPSARHLAVYLLDLFMDRYDISIQQLHLVALSCLLLASKFEEKEDSVPKLEQLNSLGCMTNMNLVLTKQNLLHMELLLLETFQWNLCLPTAAHFIEYYLSEAVHETDLHDGWPMICLEKTKLYMAKYADYFLEVSLQAAACVASSRIILRLSPTWPTRLHRLTAYSWDFLVQCIERLLIAHDNDVKEANKQRGQAGPQSAQLSVFQTASQPSRPVHFQQPQYLHQTHQTSLQYRHPTSEQPSCQQIVSTTHTSSYTLQTCPAGFQTSVQGLGHMQTGVGMSLAIPVEVKPCLSVSYNRSYQINEHYPCITPCFER

SEQ ID NO: 6152 - DNA, 3210 bp, Homo sapiens
gatgctgaccgtacccaggcgggagccgccgcgccgccgcctggcgctgcacctgggcccggcccggccgccaattggacggctcggggcgaccccgctgtatcgcgagacgagattggcagcggcggggcctcaagtgcccccgcgctggctttgtatgcggagccgcctgccggtcctttaacaatgggcggcgcgagcgtccaggcgctgggctctagctgaggccggcgcttagcggcccactgtccgcagcatgagcggggccggcgtccgccgcacgacggcggggctggggctgtgagggccgcggttccggactcgagttgccgcgtcgggctgggcgcgccgccgggtcccatggagctggaggggcagtggtggcgaggacagctggccgccgatattcaccaagcgcttcgctacaaggagctgaagttgccctcctataaaggccagtcccctcagttaagtctcagacggtattttgctgacttgattgccattgtgagcaatcgcttcacactctgcccttctgcccgccatcttgctgtctatttactggacctgtttatggaccgctatgacatctctatccagcagctgcatttagttgcgctttcctgcctgcttctagcaagtaaatttgaagaaaaagaagacagtgtgcctaagctggagcagctcaacagcctgggttgtatgactaatatgaatctagtattaacaaaacaaaatttgctacatatggaactattattattagaaacctttcagtggaacctctgccttccaacagccgcccatttcattgagtattatctctctgaagcagtacacgaaacagatcttcatgacggctggccaatgatttgcttggaaaagactaaactctacatggccaaatatgcagattacttcctggaagtatctttgcaagctgctgcatgtgtggcttcttcgaggattatacttcgtctttctccaacgtggcctacaagactacatcgtcttactgcctactcttgggatttcttagtgcagtgtattgaacgactgttgatcgctcatgataatgatgtgaaagaagcaaacaaacagagagggcaagcaggacctcagtcagcgcaactaagtgtattccagacagcctcccagccatcacggccagttcactttcagcaacctcagtatctccatcagacacatcagacctcactgcagtatcgccatcctacgtcagaacaaccaagctgtcagcagattgtatcgaccacacacacctcatcttacacactacagacatgtcctgctggcttccaaactagtgttcagggccttgggcacatgcagactggtgttgggatgtcactggcaataccagtagaagttaagccctgtctgagtgtttcttacaaccggagttatcagataaatgaacattacccttgtattactccatgttttgaaaggtgattatttgtgaagctgataaccgacccagactgctttgtgacatgaagctatgggtaagcgttttgtaaacttctgttcaaaaggaaagggatctaaatgacatcagaactcttcaggtaccagcaccaggaagactgaatatcctttttaatgcaccatgaatcctgggagactaagcaaattaacagtatgtcaaattctgttacaacaaatccctgtatgacaaaaatgttcaagtcctggctgatggtccaaatatttcaaaaatattcagtacaacagaaaatttggacagacttcaatttgccattttgagatttgacctgtggtagcatctgggcctaatgttggcttctaagtcaaagactaaatgtttatctcatctatggacttgccaaacagtcttttatgaaggaaagttacagtattaatttttgaaaaggttttttttattctgcaattttttatttttgttctacacatgaatttttgactaagtttaaactcatgaattgttatgctataccaatctgcagtaaaaaaaatttttttagatgattctatataacttcgtctcacaaatagtgtaggtatctgggtttatatactaaaattaagggtggagaagatcttattttttaaatcatggtcataatttttctttttttccctaagtgatcaacatcaaatttttagaattaaaatacatttaactcagggaatttgtactacttggaaacacttaactgtaatgcaacatgccttgggaatgttatagtgtgaactacctttataacataggttaaaatacgcttgctagggtgtgttttcaaatgagaacataatatagctcagaatgaagtggtagttcctgtgattcataatacatatgtaggttttgcatatctcagtgcaatccatgatttatactcagaatcgacattcttaaaaagttatttcaagggatggcataactgtaagaggtcagtgctagaataaagtcctgtaggtttattttggaagggactgtggccagggtagttctcaggttgtgctagagcagcactttgttatgtggaagacaggttttttaagcaacctttgaatccagctctagtcagtctaagcaggcaaaggtaactgatgactaaatttcagtagctactttcattggattgaccctacaactgccctgggacatttcactgtaccagtattaactgcaaacagcaataattgtcattacagcaagggcagtttgggggtaaagcattttggaggaataaccttaaaaagttaaaaagtcattgtaataactgataaactgtatacattgtgctcctttctgtgggatggggtggttggagaaccagaactatttttaaaacattaggtttcaatataaatacaactcacaactgctagctttggggggtgggggaacattgtgtgggttttgttttgtttaatttattgattagtctttaaagtaggcttttttttttttttttgagaatactggaccatcattaaatgtgtactgtgaagagattaatatgtatgaagggctttaccaaagtccactaaataaacactactcaagtacagactgcaaaccaaaatgtatctgtgttacgacattaattgcaaatagcaagtatggtgctaaagtctacaccaatggaattagatgagtgctatgcacttaattttaaaataaaactagttttcagt

SEQ ID NO: 6153 - protein, 371 aa, Homo sapiens; identical to SEQ ID NO: 6151

SEQ ID NO: 6154 - DNA, 464 bp, Homo sapiens
gcggcgattcaatatatccggaagcaactgtcatggctgctgtcagtgagggcccgtaatggagatcgagtcaagggttgcccagggacacttaagagccttcggcttcaaggaggcctctcaaaggacaaaggatgagactgcctggcggcagagtgccccccacaatcgtaggaactgtgtcgccgcgcttcccgttaacttgccgctaagtttttctagaaaagtcgcccttcttgccaggggtgtcctatagactttgtcatggagtgaaacagaaacaaatatgcagcaacagaaccagagttgtcatcaagcctctttgggtctttgttccatggtggtccacagaagaaaggaaattataactaaagctcctattactgtgttctattttagatttaaggtttaaaaccatcatattatgcctatgccaggagattctaagctcatgtgttgtgaag

SEQ ID NO: 6155 - protein, 65 aa, Homo sapiens [sequence omitted]

SEQ ID NO: 6156 - DNA, 2968 bp, Homo sapiens
gagacagggtctcactttgtcacccaggctggagtatagtggcacaaacatggctcactgcagcctcgacctcctgggctcaagcagtcctcctgcttcagccccacaagtagctgagactacaggcacacaccaccacgcccagctctacaaaaaattgtaaaaatgagccaggcatgtggtggtgtatgcctacgatcctagctactcaggaggctgaagtgggagaattttttgagcccaggaggtcgaggctgcagtgggccataatggcaacactgcgctccagcctggcagacagagggaagatatgtttgacatagtttagatatttgtccccacccaaatccatgttgaaatgtaatccccaatgttggaggtggggcctagtgggaggtgtttgtcatgggggcggatccctcatggcttggtgctgtccttgtgatagtgagttcacttcatgtgagatctggttaaagtgtgtggcaccttcgcctacccccacttgttcccaccaagtgagattcctgctcctgcttacccttctgccatgtttcttgaggcctcccagaagccaagcagatgccagctccatgctccctgtacagcctacagaagcatgagccagttaaacctctcttctttataaattacccagtcctgagtatttctttatagcaatgcgagaacggcctaacacaaggttctagtagggagaaactagcaagtaaatggatacaagacagtcactcttacatttttaattacaggtccctttgagtagacaaaactttaagaataggggaaatcatttacatataaattgcataccatgtcaaggcttcatggacttaagaactaataaattcagggtggtgatgcttacctgggaggcagagggtgttatgggaggaaacagagtggtagtcaggcaaggataggatagcaggtgtccttcccatatgatccctgagcctggtccttatgctgtcaactgactgtacttgctactttaaaatctaagggattgaaaaatgaatgttgagtgattcctaaactaacacgatattaaaccgagttccagactacaccagcctaattttatttagtggcagactctagctctgttgcccaggctggagtgcagtggtgtgatctcagcttattgcagtctccacctcctgagttcaagtgattcctgtgcctcagtctcccaagtagctgggactacaggtacgtgccaccacacccagctagtttttgtacttttagtagagacagggtttcaccatgttgcccaggctggcttcaaactcctggcctcaagtgatccactggcctcagccacccaaaatgctgggattacaggcatgagccaccgtgcgggcctctactagcctaattgctgcaagtgtgctagtcgtatttatcaaactagatgtaagctgcttgaggctagggaggcttttaccacgtgcctgagaggcagttgttggttataaacttgccacatggggctcagatcacctcaaggcaaagctacctggcctggtttggaatgctttttctttttcttaaagtcagccctaaagaacatggtatattaactcttgagggctgctaaaccctggcactgtgccagaacaagtgacaatacgatagttttgagactaatttcaaaaatgttttttaaaaaggcagtgtaaattcctaacccgcttgtacaaacctgttaaattttacttttcaaaacaaattccatctgctaaggtttgagttgaattaagtagcaaatgatatttatactcaggtaaatagaccattctcactcactgtagaccctatattccttctcatagctttaaccattttctgtgtccctacttttgacatcaaacttcagattttctgatgcttgcatgattgttgaataaattagaatctgtagttgctaacatactaacaactgattttaagctcaaaaaggcaacagtggtgtccaatatacttttgtgggctttaatgctcagtatggaatacgcaatgaacggatgttttatgccactaatggctatattctacatcttgatggcttttagtaaataaaatcatgattccaagtctgaattacatgatgagatggttcactagagctgcaaatatacaagtttgtatttaaaacaaaaataccgaagccattttactgaaaactagttttattttaaaattaagtgcatagcactcatctaattccattggtgtagactttagcaccatacttgctatttgcaattaatgtcgtaacacagatacattttggtttgcagtctgtacttgagtagtgtttatttagtggactttggtaaagcccttcatacatattaatctcttcacagtacacatttaatgatggtccagtattctcaaaaaaaaaaaaaaaagcctactttaaagactaatcaataaattaaacaaaacaaaacccacacaatgttcccccaccccccaaagctagcagttgtgagttgtatttatattgaaacctaatgttttaaaaatagttctggttctccaaccaccccatcccaccccgggtatgcagcaatagtaatcaattattttattctaccctcccaaaagattattaatccagtgttctttagctttttaaaatataaattgggaaagtgttattaataagcttttttaaaaggcatattcttctataacaagaatggcatataaaccaatcaataaaagtatttgacaagacattaagttaccacaggcactggctgttgtttcaagttgggatctctatcccaatatcttacattcatagcattattgaggtagttaaaatactgaaaattggactccaggttgctgggttctgaatgtgaatgtgaaagatatattctcttttgagcctactttcccccaaataattcaagttttcttgaggtaa

SEQ ID NO: 6157 - protein, 37 aa, Homo sapiens
MAHCSLDLLGSSSPPASAPQVAETTGTHHHAQLYKKL

SEQ ID NO: 6158 - DNA, 590 bp, Homo sapiens
ggaagcaactgtcatggctgctgtcagtgagggcccgtaatggagatcgagtcaagggttgcccagggacacttaagagccttcggcttcaaggaggcctctcaaaggacaaaggatgagactgcctggcggcagagtgccccccacaatcggtgtcctatagactttgtcatggagtgaaacagaaacaaatgtgagttaatcattaacatttcctagtggttaaaattactttttaagcgcttaactgtgtattttttagattgaagatttcaaatgaaattttgatttgactgaaatatttaatatgtgatgagttgatattaaaatacagaagattactatttttatagaaacaataatgtagaaactaatatttgaagcaggtttactccacatactgtgttataatttaaattttcacttaaactctcaaaatcagaagagctgacctagtaaggcttaaacctctaaaacttgtggttttaacaaggcttaatatacgtagttataatagtttttaaaaaaattgttatcaagttcctcaggtgattctgatatagtattttaaagaaagcaaagagaaatga

SEQ ID NO: 6159 - protein, 46 aa, Homo sapiens
MEIESRVAQGHLRAFGFKEASQRTKDETAWRQSAPHNRCPIDFVME

SEQ ID NO: 6160 - DNA, 659 bp, Homo sapiens
ccgggagactctggccgcggcgattcaatatatccggaagcaactgtcatggctgctgtcagtgagggcccgtaatggagatcgagtcaagggttgcccagggacacttaagagccttcggcttcaaggaggcctctcaaaggacaaaggatgagactgcctggcggcagagtgccccccacaatcgtaggaactgtgtcgccgcgcttcccgttaacttgccgctaagtttttctagaaaagtcgcccttcttgccaggggtgtcctatagactttgtcatggagtgaaacagaaacaaatgtgagttaatcattaacatttcctagtggttaaaattactttttaagcgcttaactgtgtattttttagattgaagatttcaaatgaaattttgatttgactgaaatatttaatatgtgatgagttgatattaaaatacagaagattactatttttatagaaacaataatgtagaaactaatatttgaagcaggtttactccacatactgtgttataatttaaattttcacttaaactctcaaaatcagaagagctgacctagtaaggcttaaacctctaaaacttgtggttttaacaaggcttaatatacgtagttataatagtttttaaaaaaattgttatcaagttcctcaggt

SEQ ID NO: 6161 - protein, 65 aa, Homo sapiens [sequence omitted]

SEQ ID NO: 6162 - DNA, 765 bp, Homo sapiens
agtcagcaagggcttgggaagtgcatacagttcctgctcctggtgtctactctgaagagcacagagtagacgtttgtctgccatttcaccggcagtaagatcagcagctgctggtgagcaaagaggtagtagtgggtcactggactggtgggcgccggggccgcgcgctagatggagaggtcagcggcgaacccagctccatggcctagtctcgtcagaccgagcgcggaccctgccggcctccgttctcttccgcttgtctcagatatcatctcttcttttgatcactgttcctgattgtgacattgtgcaagtgttaaattgtgtgccttttgttcctgaagaaagaggtcctgggatctttgaaatgctaagattcttggataccacagtatcataaaattcctctaaatgcattggtgctagcaatcccctactctgtctggcctctggatctagcttgaagttctggattcatttccttcttccttgtacctcagcctgagccttctgtcacccaaagggctccagctggtttttcactcaggcctcactttatcttccaagatgaaggaactgagacacagaggttgagacttgtctaaagtaacatgaccagtaagtgcttgaattaatgcagatgaggaaactgaggtccagagaagttgaagttttcccaaggtcacacagcagagctggaactagagcttgcatttcctgacttccagattagtgttatttttacttcaaactattacttcttgg

SEQ ID NO: 6163 - protein, 41 aa, Homo sapiens
MERSAANPAPWPSLVRPSADPAGLRSLPLVSDIISSFDHCS

SEQ ID NO: 6164 - DNA, 1551 bp, Homo sapiens
aatacccggatggaagtgtaatggccgccatcagggactcgcaggcaatgggtactacgacagatatcatctcttcttttgatcactgttcctgattgtgacattgtgcaagtgttaaattgtgtgccttttgttcctgaagaaagaggtcctgggatctttgaaatgctaagattcttggataccacagtatcataaaattcctctaaatgcaatgaaggaactgagacacagaggttgagacttgtctaaagtaacatgaccagtaagtgcttgaattaatgcagatgaggaaactgaggtccagagaagttgaagttttcccaaggtcacacagcagagctggaactagagcttgcatttcctgacttccagattagtgttatttttacttcaaactattacttcttggtgagttattgtgggaaaaatcctgtatattgaagatgtctctacacagtatcgtttcctgtttaaattacagataacttcaagagttttcagaaaaaaagaaattgggacttttttggttaaatcatgccatctgaacagaaacagttattttgtgatgaaaaacaaactactttaaaaaaagattatgatgtgaaaaatgagatagttgataggtcggcacctaaaccaaaaatttcaggaagtattcattatgcactaaaaaatgtgaaaattgatttgccaaaaataaatattccaaatgaagtcctattgaaacatgaagttgacaaatacagaaaattatttcagagtaaacagcagactgcaagaaaatctatcagtataaagactgtaagctgtgtagaggagtgtacattgcttcataagtctgagagagctgaagaagagggtgtaaaaatgtctgcaaaaatactcaatttcagctgtttaaaatgccgagacaacactcgatatagcccaaatgatttgcagaaacactttcaaatgtggcaccatggcgaattaccttcatatccttgtgaaatgtgcaacttttcagcaaatgactttcaggtatttaaacaacacagacgaacccatagaagcactttagtaaaatgtgacatttgtaacaatgagagtgtatatactttactgaacttgacaaagcatttcacatccacacattgtgttaatggtaattttcaatgtgaaaagtgtaagttctccacccaggatgttggcacatttgttcagcacattcatagacataatgaaattcattataagtgtggtaaatgtcatcatgtatgttttaccaaaggagagcttcagaagcaccttcatattcattctggtacttttcccttcacttgtcaatattgtagctatggtgccaccaggagagaacaccttgtaagacatgttataactttgcacaaagaacatttatatgcaaaagaaaaactggaaaaagacaaatatgaaaaaagaatggcaaagacttctgcaggacttaagctaatactgaaaagatataaaataggtgcatcaaggaagacgttctggaaacgtaagaaaattaacagtggaagtgac

SEQ ID NO: 6165 - protein, 337 aa, Homo sapiens
MPSEQKQLFCDEKQTTLKKDYDVKNEIVDRSAPKPKISGSIHYALKNVKIDLPKINIPNEVLLKHEVDKYRKLFQSKQQTARKSISIKTVSCVEECTLLHKSERAEEEGVKMSAKILNFSCLKCRDNTRYSPNDLQKHFQMWHHGELPSYPCEMCNFSANDFQVFKQHRRTHRSTLVKCDICNNESVYTLLNLTKHFTSTHCVNGNFQCEKCKFSTQDVGTFVQHIHRHNEIHYKCGKCHHVCFTKGELQKHLHIHSGTFPFTCQYCSYGATRREHLVRHVITLHKEHLYAKEKLEKDKYEKRMAKTSAGLKLILKRYKIGASRKTFWKRKKINSGS

SEQ ID NO: 6166 - DNA, 1606 bp, Homo sapiens
aatacccggatggaagtgtaatggccgccatcagggactcgcaggcaatgggtactacgacagatatcatctcttcttttgatcactgttcctgattgtgacattgtgcaagtgttaaattgtgtgccttttgttcctgaagaaagaggtcctgggatctttgaaatgctaagattcttggataccacagtatcataaaattcctctaaatgcaatgaaggaactgagacacagaggttgagacttgtctaaagtaacatgaccagtaagtgcttgaattaatgcagatgaggaaactgaggtccagagaagttgaagttttcccaaggtcacacagcagagctggaactagagcttgcatttcctgacttccagattagtgttatttttacttcaaactattacttcttggtgagttattgtgggaaaaatcctgtatattgaagatgtctctacacagtatcgtttcctgtttaaattacagataacttcaagagttttcagaaaaaaagaaattgggacttttttggttaaatcatgccatctgaacagaaacagttattttgtgatgaaaaacaaactactttaaaaaaagattatgatgtgaaaaatgagatagttgataggtcggcacctaaaccaaaaatttcaggaagtattcattatgcactaaaaaatgtgaaaattgatttgccaaaaataaatattccaaatgaagtcctattgaaacatgaagttgacaaatacagaaaattatttcagagtaaacagcagactgcaagaaaatctatcagtataaagactgtaagctgtgtagaggagtgtacattgcttcataagtctgagagagctgaagaagagggtgtaaaaatgtctgcaaaaatactcaatttcagctgtttaaaatgccgagacaacactcgatatagcccaaatgatttgcagaaacactttcaaatgtggcaccatggcgaattaccttcatatccttgtgaaatgtgcaacttttcagcaaatgactttcaggtatttaaacaacacagacgaacccatagaagcactttagtaaaatgtgacatttgtaacaatgagagtgtatatactttactgaacttgacaaagcatttcacatccacacattgtgttaatggtaattttcaatgtgaaaagtgtaagttctccacccaggatgttggcacatttgttcagcacattcatagacataatgaaattcattataagtgtggtaaatgtcatcatgtatgttttaccaaaggagagcttcagaagcaccttcatattcattctggtacttttcccttcacttgtcaatattgtagctatggtgccaccaggagagaacaccttgtaagacatgttataactttgcacaaagaacatttatatgcaaaagaaaaactggaaaaagacaaatatgaaaaaagaatggcaaagacttctgcaggacttaagctaatactgaaaagatataaaataggtgcatcaaggaagacgttctggaaacgtaagaaaattaacagtggaagtgacagaagtatagaaaagaacactcaagtgcttaagaaaatgaacaaaacacagacta

SEQ ID NO: 6167 - protein, 355 aa, Homo sapiens
MPSEQKQLFCDEKQTTLKKDYDVKNEIVDRSAPKPKISGSIHYALKNVKIDLPKINIPNEVLLKHEVDKYRKLFQSKQQTARKSISIKTVSCVEECTLLHKSERAEEEGVKMSAKILNFSCLKCRDNTRYSPNDLQKHFQMWHHGELPSYPCEMCNFSANDFQVFKQHRRTHRSTLVKCDICNNESVYTLLNLTKHFTSTHCVNGNFQCEKCKFSTQDVGTFVQHIHRHNEIHYKCGKCHHVCFTKGELQKHLHIHSGTFPFTCQYCSYGATRREHLVRHVITLHKEHLYAKEKLEKDKYEKRMAKTSAGLKLILKRYKIGASRKTFWKRKKINSGSDRSIEKNTQVLKKMNKTQ

SEQ ID NO: 6168 - DNA, 1643 bp, Homo sapiens
tgtaatggccgccatcagggactcgcaggcaatgggtactacgacagatatcatctcttcttttgatcactgttcctgattgtgacattgtgcaagtgttaaattgtgtgccttttgttcctgaagaaagaggtcctgggatctttgaaatgctaagattcttggataccacagtatcataaaattcctctaaatgcagtaaggaaacaagtgggagaagatgccaggataacgcagctggaagcgacagtgctgtgttagaacccaggcctatcagactctaggatccagcctcgaccactccctgatacactacatggcttcgttgtacttacttggcagaggtatgggtttttggtggatttgtctgcaagaaagaatttcagataattaaaggacaaagcacaatatgagtaagtttgactttttgtttacactgatgatgctgtgaacaggcacatcacaaataaatcaatacaaatggccaataaaatgtatctaaagataaaagagccaccaaaaccttaaagataagtaagactcttccttttagttttgaaaaaggaggaaatcttgactaaagtattgtattttagtcaagttcaataattaacccaattagtaggtctctgcaactctacacagttattttaaagttgctcaacaccttttaacacgtaactgcaaaacaatgaaatgttggatttttacctagcactgcaagtcagtgtcactgtgcagtgaaacaatgcacatgttaattcctgcagcaacaagaggaaactgatctttaaaggaaaggattcttacttctgggcaggaggaaacactggtgactgcacagcttcttgtctgtgacttgaccctcggtggcgttcagcaggtataggtttttctggatcaggaaaattatcatattaggattagagtgaaatgtctgtcctcatcccaaaacccagcaacatcagctgagaagaaccaaatttgatcagaagtcttcccgggaacatgtcttagttactgagatgtcatggatctgtgcacttgccagtctgttgatgtggttgtgctatgaggaccaggactccctcccagcagtgttacaggtacatcctaccacctctgcattcatccactggcaatgtacatagagactgaacccacgggccctgaaactttaagtgtgtgagtataggtggaagccagaagatgagaacattttagccaccctctaaacaactcaccctctacttgccatgtggcctccacacaggtggagacaacaccctggtgggtcttgattagtcataagacgtggtataagcagtgtgttactgataagaggcacactactgagttcataaatgatctctttttgcaaaattaattggatcaaattcaaggttatccctataataatgtaaatctcacttgcatttcagtgttttcctgagcagaagaggaaagggtgggaaatgagcataaacctgaagtgtaagaaatttatgttgaagcccatagtgaactctactgctgaaccattaataaatgtgatcacacattattttaatactttactctccctcaaatttgtcgttggggggtggggtgtgttaaaatcttggtatgttcatgtgtgagtc

SEQ ID NO: 6169 - protein, 54 aa, Homo sapiens
MSINLKCKKFMLKPIVNSTAEPLINVITHYFNTLLSLKFVVGGWGVLKSWYVHV

SEQ ID NO: 6170 - DNA, 870 bp, Homo sapiens
ggagacggtgtgcctccgcgctccccgcggggcagccgaaccccggaggaaggggcggatcgggcgcggtgtttggggcgaagctgggcgcgcggcgctcgaagcactcactcggcgggtttcgtggttggtggagacagcaagggcgccccgcagaccgcacccctcgagctataggttcgcaggcccgactcgacggcgtccctattgctggcccagcgtatggtcattgggggccatttcttgcagagatgccctgctccctgacgcgctcgctcttctccagagttggccaaaggtgctcttccccgcagaccctaaccacacccagtggcagttggatttctttgtaactggctttctcacatatatcatctcttcttttgatcactgttcctgattgtgacattgtgcaagtgttaaattgtgtgccttttgttcctgaagaaagaggtatggtaaagattgaaatactggagtatatagtctattaagtagtaagttggtatgttttaatattggactaaataaagtaaaatataggttaagtatcccaaatccaaaaatccagaatgcaaaattttttgagtgctgacatgatggtcaaaggaaatgctctttggaacattttggattttgaatttttggatttgagatgctcaactggtataatgcaaatactctaaaatcctaaaaaagaaaaagaaaaaaagaatgaaacccttctgttcccaagcatttcaaataagagacactcaacctgtagttttacatatacatgagttttcataagttatataagttatagttttattttattttttggctaaaataaaatacttaaacatgagttttcattttaatctaagc

SEQ ID NO: 6171 - protein, 37 aa, Homo sapiens
MQNFLSADMMVKGNALWNILDFEFLDLRCSTGIMQIL

SEQ ID NO: 6172 - DNA, 965 bp, Homo sapiens
cttggataccacagtatcataaaattcctctaaatgcaagtctcgctgtgtcgcccaagctgaagtacagtggcgtgatcccggctcactgccaacctctgccacccgggttcaagtgattctcatgtctcagcctcctgagtagctgggattacaggcacccgcaaccatgcccggctaactttttgtatttttagtacagatggggtttcgccatgttggccaggctgttcttgaactcctaacctcaggtgatccgcccgctttggcctcgcaaagtgttgggattacaagcatgagccaccgctcccagccgtgatttctgacctatgtatgttaacattaccagttccttggctcctcactttttatttggattgtcactctagttgcttaatttcctcatttctatttttactctttctccagtttatcttgctgtctagtacccttctaatatttctaatgtactgcttttataacttttttctgttcttaaattaacaattgcttctgtttacctttcatttccagttcagatctgtcctctatagtctgttctcacttaacctccccatcatgcattctctttttcatctagaccctgtggtaccttaggagaaaaatacttttcttccattgtttctttattctgttcttgtggtttagattgcctttgcttctttcttacatgttttaagtcctgctactctttaaagggtcctcacaaaacctacctttctgtgaagtaaacacagtcatcgttgatttgtcaactttctgtagtatgtaagaagcctttgattacaagcagtagaaaccaatgtgagctagcttatgttgaaaggggggattattttaaggatacaggatttcctggaattcaagagtaggaatatataggcagacctcataaaggcttgtggtggtgacattgccctcttggtttcagtcagggttcttag

SEQ ID NO: 6173 - protein, 56 aa, Homo sapiens
MLTLPVPWLLTFYLDCHSSCLISSFLFLLFLQFILLSSTLLIFLMYCFYNFFLFLN

SEQ ID NO: 6174 - DNA, 8192 bp, Homo sapiens
cttatctgattttgtctattcatacatatatatatatataaagcacaaaattaaaaacatgtaatttttctaataatacagtttgatatattaatgactgaaccttcagtattcagattcctgtctcaacaatatattgttatgtcccatacgtggtaatcacatagagtaatagtggtagctgtgatttatatggcactttaaaggatatttttacatatattttctcattttatcttcacaacaaccttgtgaaagacataggggaagtactaatttttccccccattttacagatgaaggaactgagacacagaggttgagacttgtctaaagtaacatgaccagtaagtgcttgaattaatgcaggtaggtagtgatgggtatgttctaatctgccaagggcttttccttgctgtcatctggcttgagttctgaggatataaattcatatagccaaaatggtagggaaccagaaaggtaatgagtagatggactttaggactacactagggaaatggtgctgctgttctttttaatttcttcctttttgttctttttgtttggtttctaacttgttagtaatgataagcagataccgtctttggttgtttccgttagatgaatgaagcttttgttttaattgtagattatccctgaggaactaaggaaatagaaaatctggagagaagtctgttgggattctcacagggaatagctattagatcaactaagcaaatgaaaaagttaatagtatatggataaaccacatgtgtgtaattggaacttcttaggattctaagatttttaaaatcttgtttaaaaactgtattatcaccttaatataaaaatcttagcgcttgagcgtacttacccaactgtggttttctttagatgaggaaactgaggtccagagaagttgaagttttcccaaggtcacacagcagagctggaactagagcttgcatttcctgacttccagattagtgttatttttacttcaaactattacttcttggtgagttattgtgggaaaaatcctgtatattgaagatgtctctacacagtatcgtttcctgtttaaattacagataacttcaagagttttcagaaaaaaagaaattgggacttttttggttaaatcatgccatctgaacagaaacagttattttgtgatgaaaaacaaactactttaaaaaaagattatgatgtgaaaaatgagatagttgataggtcggcacctaaaccaaaaatttcaggaagtattcattatgcactaaaaaatgtgaaaattgatttgccaaaaataaatattccaaatgaagtcctattgaaacatgaagttgacaaatacagaaaattatttcagagtaaacagcagactgcaagaaaatctatcagtataaagactgtaagctgtgtagaggagtgtacattgcttcataagtctgagagagctgaagaagagggtgtaaaaatgtctgcaaaaatactcaatttcagctgtttaaaatgccgagacaacactcgatatagcccaaatgatttgcagaaacactttcaaatgtggcaccatggcgaattaccttcatatccttgtgaaatgtgcaacttttcagcaaatgactttcaggtatttaaacaacacagacgaacccatagaagcactttagtaaaatgtgacatttgtaacaatgagagtgtatatactttactgaacttgacaaagcatttcacatccacacattgtgttaatggtaattttcaatgtgaaaagtgtaagttctccacccaggatgttggcacatttgttcagcacattcatagacataatgaaattcattataagtgtggtaaatgtcatcatgtatgttttaccaaaggagagcttcagaagcaccttcatattcattctggtacttttcccttcacttgtcaatattgtagctatggtgccaccaggagagaacaccttgtaagacatgttataactttgcacaaagaacatttatatgcaaaagaaaaactggaaaaagacaaatatgaaaaaagaatggcaaagacttctgcaggacttaagctaatactgaaaagatataaaataggtgcatcaaggaagacgttctggaaacgtaagaaaattaacagtggaagtgacagaagtatagaaaagaacactcaagtgcttaagaaaatgaacaaaacacagactaaatctgaagaccagagccatgttgttcaagagcatttaagtgaagaaaaggatgaaagactacactgtgagaataatgataaagcccctgaatcagagtcagagaagccaactcctctgtccactgggcaaggtaatagagctgaagagggaccaaacgctagttcaggtttcatgaagactgctgtactaggacctacactgaaaaatgtaatgatgaaaaataataaactagcagtttcccctaactataatgctacgtttatgggcttcaagatgatggatggaaaacagcatattgtattaaaattggtgcctatcaaacaaaatgtatgttcaccaggctcacagtcaggtgctgcaaaggacggtactgctaatttgcagccccagactttggacactaatggatttttaacaggagtaacaactgagttaaatgacacagtttatatgaaagcagctactccattttcatgttcatcttctatactttcagggaaagcaagttcagaaaaagaaatgactttgatatctcaaaggaataatatgcttcaaacaatggattatgagaaaagtgtatcttctttgtcagcaacatcagaattggttacagcatcagtgaatttgaccacaaaatttgaaacaagagataatgttgacttctggggaaatcatctcactcagagtcaccccgaggtattaggtaccaccattaaaagtccagataaagtcaactgtgttgccaaaccaaatgcatacaacagtggagatatgcataattattgcattaattatggcaactgtgagttacctgttgaatcctccaaccaaggatcattaccttttcataattactcaaaagtgaataattctaataaacgtcgtaggttttcaggaacagcagtgtatgaaaaccctcaaagagaatcttcatccagcaaaacagttgtccaacaaccaattagtgaatcatttttatcactagtgaggcaggagagctcaaaaccagatagcctattagcatctattagccttttaaatgataaagatggaactttaaaagcaaaatctgaaattgaagaacagtatgttttagaaaaaggacaaaacattgatggacaaaacctgtacagtaatgaaaatcaaaatttagagtgtgcgactgaaaaatctaaatgggaagacttttctaatgtcgattcacctatgatgcctagaatcacatctgttttctctctccagagccaacaggcatcagaatttctgccacctgaagtaaaccaattgcttcaggatgtattgaaaataaaacctgatgtaaaacaagactctagtaacactccaaataaaggcttgccacttcattgtgaccagtcatttcaaaaacacgagagagaaggcaaaattgttgaatcttcgaaagatttcaaagtgcaaggcatcttcccagttccacctggcagtgtgggtattaatgtgcctacaaatgatttgaatttgaaatttggaaaagaaaaacaagtgtcatcaataccacaagatgtgagagattcagagaagatgcctagaatttcaggttttggcacattacttaagactcagtcagatgcgataataacacagcagcttgtaaaagacaaactacgagccaccacacaaaatttaggttctttttatatgcagagtccacttttaaattcagaacaaaaaaaaactataattgttcagacttcaaaaggattcttaataccattgaacattactaacaagcctgggctaccagttattcctggaaatgcacttccattggttaattcacaaggtatccctgcttctctttttgtaaacaagaaacctgggatggttttaacacttaataatgggaaacttgaaggtgtttccgctgtcaaaaccgagggtgccccagctcgtggaactgtgactaaggagccttgcaaaacacctattttgaaggtagaaccaaacaataattgtcttacacctggactttgttccagcattggcagttgtttgagcatgaaaagtagctcagaaaatactttgccattaaaaggcccttacattttgaaaccaacgagttctgtgaaagctgttcttattcctaacatgctatctgagcaacagagcactaagttgaatatctccgattcagtaaaacagcagaatgagatttttccaaaaccacctctttataccttcttgcctgatggcaaacaagctgtttttttaaagtgtgtgatgccaaataaaactgagctgcttaagcccaaattagtccaaaatagtacttatcaaaatatacagccaaagaaacctgaaggaacaccacaaagaatattgctgaaaatttttaaccctgttttaaatgtgactgctgctaataatctgtcagtaagcaactctgcatcctcattgcaaaaagacaacgtaccatctaatcagattataggaggagagcagaaagagccagaatctagagatgccttacccttcttactagatgacttaatgccagcaaatgaaattgtgataacttctactgcaacatgcccagaatcttctgaggaaccaatatgtgtcagtgactgttcagagtccagggtattaaggtgtaaaacaaattgtagaattgagaggaacttcaatagaaaaaagacttccaaaaaaattttttcaaaaacaaaaactcatggaagtaaagactctgaaactgcctttgtatctagaaacagaaactgtaaacgaaagtgtagggatagttaccaagaacctccaagaagaaaagcaacattgcatagaaagtgtaaagaaaaggcaaaacctgaagatgtccgtgaaacatttggatttagcagacctaggctttcaaaagattccatcagaactttgcggcttttcccttttagttctaaacagcttgtgaaatgtctaggagaaaccaaccagttgtagttttgaatcatcctgacgcagatgcaccagaagtagtaagtgtaatgaaaactattgctaaatttaatggacatgtacttaaggtttcattgtcaaaaagaactataaatgctttactgaaaccagtttgttataaccctcctaaaacaacttatgatgatttttccaagaggcacaaaacatttaaacctgttagttctgtgaaagaaagatttgtgctaaaattaacactcaaaaagacaagcaaaaacaattaccagattgtgaagactacctctgaaaatattttgaaggctaaatttaactgttggttttgtggtagagtatttgacaatcaggatacttgggctggtcatgggcagagacatttaatggaagctactcgggattggaacatgttagaatagtttaccataattaccaaggaaaagaaaagtaaaattaccttagaagaaaacaacgggttcagttaccataatgcagacattttctacttcagtatagtacctgaaatcgaacattttaaaagttgattgtatttctgtggaagagtaaaagttgtatgtatgatatttgaaaatgctatccctgcactcaaaagttttgaaagaaactaatcacagcacagaagtaccttgatttaattttttaaacgtgttctcgggaagttagggctaaagaaaattttgataaaacaattttcccactttagttctttagtgactcttagtagagggtaatggctgacacccccattccctctcttcttccaccagccttatgcatctaagtgtagctcctctggagatggagagctctttcatcgtagaactgaaggagtttctcacatttgtgaagatactttgagagaacctgggtaaagaagtcactctatatctgctaaatatagttattttgaaggatattaggctccttgaaagtacatttaactcactacagttacacctcatacaatgcttgaagagtttttggcaagtaaattttttttccagttgaactctgtcacttgttagagattgggaacactctcccaaggtgattttctttttctaagtgactgtgtcaaatgttgcagtagatgggcagcttcaagagaagaatttaaactctttgtctcattgaaagtttggttaaagaacttgaacatatttctaaatttgattatattctctgatgatccctttgcacagaactatgcttatctcatgtttgtcctccataaacaaatggccatttttttcttcttggttcccatccctttaaaaagagtggaacataggagcacttccaagggagtggcttttcttgaaaattaaaattgtttaccaaaacagtattttgaagcaagatcatatttttgtctgtattcactttattatttgaacatgtccaaattaggacaaagcatttctgttagctgcttctcagtgtgactgacaacccaaaacatatatacagattgttggcatttgcaaaaggaagcatcaatagtggacccagaggcagtgcataaaaccttaggatagattcctaagggacatgcccaacagagttttaaaatggatgttttcatgatgacaacagaatcatagatttagatttttcaccttgtaagtttggatcaaattttgctggttctttggataatggagttcttgtgttaacaaattacgtgctatatgattttttgttacattgttacaagtgttaatgacattttcattaatggatgaaaacttcagggcttcttttctgtatataacaaattaagtctgtacatatttttgtaccttttatgtaaattttgcacagaaatttttggcataagtttattttctttcagtttagttcagtgcatgcactaataaaactggttgtttaatttaaaaggaatatataagactttacccatgttattttcttggtttttatttcagatgtagattttgtttttgaggtaaattcgttcttcagggattgaacactattgttagcaagtgcctaaaaaagatgtgaaacagtttacatatgtcaactgtaacagtaggtcccaaatgggcccattcccctaatagttttatttttaaagaaagccatacatagaatgcttcaagctatcttgctatgcacattatacttgtactgttttgtgcagtttgtctactttcttagtgaagtattttttgtataaaatgttacaattgtgtttcttaaattgagcctaagaatggagttaattggaaatatacagtatatattaataatgtacatggtgtttaaagaatggtaagcattgttaatttctgtaatgaacattttcaattaaatttatcttgtttgtgtttacacaataatttttttactgtgctaaaatctgatggaaattttgttctctaggaaatacagattttaaagtgtatgtgttttttcaatgctagttaactctacaagatagataaaagtgtgggattttttttcttcccaaaatcatagatgatatattgtttaagaaaggtaacatataccataattttactatggttatgctggcaaggtgagccatagagaggcttatagtcttcagtaccctaacagcaataaaattaaaatgctctgtttgttacatatagatctgttatgagacatcacctgctgtaaatagcaaggagagagaaggaactttcctgctaatattcgcagcactataacattacatttcagaatagccatatcaggaaaataatgtcgagatatgtacttcttgcctttaagttttaacagccatttaaagtaagctttgtgctccagatattctagttggaactttttctgattttgttaacttaagttattctgagggaggcagacctgcttagagtttcattattgccattgcagaaaatccaaaacaaaagcctgtatcctttattttttgtgtgtggctttccaaagagggctttccaaaatatgattttcagtagtt

SEQ ID NO: 6175 - protein, 1347 aa, Homo sapiens [sequence omitted]

SEQ ID NO: 6176 - DNA, 1139 bp, Homo sapiens
gaaatatacagtatatattaataatgtacatggtgtttaaagaatggtaagcattgttaatttctgtaatgaacattttcaattaaatttatcttgtttgtgtttacacaataatttttttactgtgctaaaatctgatggaaattttgttctctaggaaatacagattttaaagtgtatgtgttttttcaatgctagttaactctacaagatagataaaagtgtgggattttttttcttcccaaaatcatagatgatatattgtttaagaaaggtaacatataccataattttactatggttatgctggcaaggtgagccatagagaggcttatagtcttcagtaccctaacagcaataaaattaaaatgctctgtttgttacatatagatctgttatgagacatcacctgctgtaaatagcaaggagagagaaggaactttcctgctaatattcgcagcactataacattacatttcagaatagccatatcaggaaaataatgtcgagatatgtacttcttgcctttaagttttaacagccatttaaagtaagctttgtgctccagatattctagttggaactttttctgattttcctgtatcctttattttttgtgtgtggctttccaaagagggctttccaaaatatgattttcagtagttcgaggttcttattacaattgaagagttagttttagttttgcagttgaatttctgtgtgaggaatttgttttattttttctagtttgtccatctccactgaaatgggtttcttactatttggcaagtacttaaaaaacataattcagttttcaaagaatttatcttgctaagtattcagtaacacaaattgaaatgtaatagtttttttaatggaaaatattttcattggggggttagcaaattttttcaataaagggtcagataaataagcttcgtaggccttctagtttctgtcctaactactcaattctcataatgcagaaaaaaaccatagacaatatgtaaatgaattagtgtggctatgttttaataaaacaatttataaaaacaggaagtgggctgaatttggcccaccagacatagtttactgactgttgcttgaattccctagagtctgctttcagaatgggattt

SEQ ID NO: 6177 - protein, 37 aa, Homo sapiens
MVSIVNFCNEHFQLNLSCLCLHNNFFTVLKSDGNFVL

SEQ ID NO: 6178 - DNA, 2148 bp, Homo sapiens
acttctccctagagcaggggtgtttgccagcagcctgcactctcagaaatcagacttgagtggccggaacccttgagaccagaggcttaccatgctgctccctaggagggccaggaactgctgacgtgaccactggacagttattcgtgtctcttacaattaccaaacagaatggacaagcttaataaaataaccgtccccgccagtcagaagttgaggcagagagccctgctgacgaagaggagcagtggtccgatgactttgacagcgactatgaaaatccagatgagcactcggactcagagatgtacgtgatgcccgccgaggagaacgctgatgacagctacgagccgcctccagtagagcaggaaaccaggccggttcacccagccctgcccttcgccagaggcgagtatatagacaatcgatcaagccagaggcattccccacccttcagcaagacacttcccagtaagcccagctggccttcagagaaagcaaggctcacctccaccctgccggccctgactgctttgcagaaacctcaagtcccacccaaacccaaaggcctccttgaggatgaggctgattatgtggtccccgtggaagataatgatgaaaactatattcatcccacagaaagcagttcacctccacctgaaaaagctcccatggtgaatagatcaaccaagccaaattcctcaacgcccgcctctcctccaggaacagcttcaggtcgaaacagtggggcctgggaaaccaagtcacctccaccagctgcaccatccccgttgccacgggccgggaaaaaaccaacgacaccactgaagacaactccagttgcctctcaacagaatgcttcaagtgtttgtgaagaaaaacctatacctgctgaacgccaccgagggtcaagtcacagacaagaagctgtgcagtcaccagtgtttcctcctgcccagaaacaaatccaccaaaaacccatacctctgccaagatttacagaagggggaaacccaactgtggatgggcccctacccagcttttcatctaattccactatttcagaacaggaagctggcgttctctgcaagccatggtatgctggagcctgtgatcgaaagtctgctgaagaggcattgcacagatcaaacaaggatggatcatttcttattcggaaaagctctggccatgattccaaacaaccatatacactagttgtattctttaataagcgagtatataatattcctgtgcgatttattgaagcaacaaaacaatatgccttgggcagaaagaaaaatggtgaagagtactttggaagtgttgctgaaatcatcaggaatcatcaacatagtcctttggttcttattgacagtcagaataacacaaaagattccaccagactgaagtatgcagttaaagtttcataaagggggaaaaaaaagatcaataccattgcttcagacactttcccaaagtttctccttttgagaaaaagtcccaaaacttcatattttggattatgaatcatccagtaataaaatggaagatggagtcagctattgaagtggtcatccatttctttttaagaagctcatgtggacttgttctattgcctgacctgatgaactgttaatatctggtgaggttgagttatcatgctactaatattttccaaataaatatttttatttttaaaaataagtgtaaagtatattatcaaaataagaaaataatgctcttgcataaaacaaagtggctggaaatttaaacctccacaatgatcattggtacactaatgtagctgggctctccactgccaatgcttgacaattaagtcttggttaaaattttaatttgtagaaaataaggtattaaaggtaatgtatgatatctgtaagtataggcaagaaggatgtaatggttcctttttgtgagcactctcaaccatgggatatatatatatatggatatgaactttctataagttcttgtctaggattatgctgttagttttgcttactaaagataattataccctctttgatctacatgtctatcaaatagaacctaaacttgatatgaggtttgtattagtccattatcacgctgctaataaagacatactcaagactgggtgatttacat

SEQ ID NO: 6179 - protein, 374 aa, Homo sapiens
MYVMPAEENADDSYEPPPVEQETRPVHPALPFARGEYIDNRSSQRHSPPFSKTLPSKPSWPSEKARLTSTLPALTALQKPQVPPKPKGLLEDEADYVVPVEDNDENYIHPTESSSPPPEKAPMVNRSTKPNSSTPASPPGTASGRNSGAWETKSPPPAAPSPLPRAGKKPTTPLKTTPVASQQNASSVCEEKPIPAERHRGSSHRQEAVQSPVFPPAQKQIHQKPIPLPRFTEGGNPTVDGPLPSFSSNSTISEQEAGVLCKPWYAGACDRKSAEEALHRSNKDGSFLIRKSSGHDSKQPYTLVVFFNKRVYNIPVRFIEATKQYALGRKKNGEEYFGSVAEIIRNHQHSPLVLIDSQNNTKDSTRLKYAVKVS

SEQ ID NO: 6180 - DNA, 1808 bp, Homo sapiens
acttctccctagagcaggggtgtttgccagcagcctgcactctcagaaatcagacttgagtggccggaacccttgagaccagaggcttaccatgctgctccctaggagggccaggaactgctgacgtgaccactggacagttattcgtgtctcttacaattaccaaacagaatggacaagcttaataaaataaccgtccccgccagtcagaagttgaggcagcttcaaaagatggtccatgatattaaaaacaatgaaggtggaataatgaataaaatcaaaaagctaaaagtcaaagcacctccaagtgttcctcgaagggactacgcttcagagagccctgctgacgaagaggagcagtggtccgatgactttgacagcgactatgaaaatccagatgagcactcggactcagagatgtacgtgatgcccgccgaggagaacgctgatgacagctacgagccgcctccagtagagcaggaaaccaggccggttcacccagccctgcccttcgccagaggcgagtatatagacaatcgatcaagccagaggcattccccacccttcagcaagacacttcccagtaagcccagctggccttcagagaaagcaaggctcacctccaccctgccggccctgactgctttgcagaaacctcaagtcccacccaaacccaaaggcctccttgaggatgaggctgattatgtggtccccgtggaagataatgatgaaaactatattcatcccacagaaagcagttcacctccacctgaaaaagctcccatggtgaatagatcaaccaagccaaattcctcaacgcccgcctctcctccaggaacagcttcaggtcgaaacagtggggcctgggaaaccaagtcacctccaccagctgcaccatccccgttgccacgggccgggaaaaaaccaacgacaccactgaagacaactccagttgcctctcaacagaatgcttcaagtgtttgtgaagaaaaacctatacctgctgaacgccaccgagggtcaagtcacagacaagaagctgtgcagtcaccagtgtttcctcctgcccagaaacaaatccaccaaaaacccatacctctgccaagatttacagaagggggaaacccaactgtggatgggcccctacccagcttttcatctaattccactatttcagaacaggaagctggcgttctctgcaagccatggtatgctggagcctgtgatcgaaagtctgctgaagaggcattgcacagatcaaacaaggatggatcatttcttattcggaaaagctctggccatgattccaaacaaccatatacactagttgtattctttaataagcgagtatataatattcctgtgcgatttattgaagcaacaaaacaatatgccttgggcagaaagaaaaatggtgaagagtactttggaagtgttgctgaaatcatcaggaatcatcaacatagtcctttggttcttattgacagtcagaataacacaaaagattccaccagactgaagtatgcagttaaagtttcataaagggggaaaaaaaagatcaataccattgcttcagacactttcccaaagtttctccttttgagaaaaagtcccaaaacttcatattttggattatgaatcatccagtaataaaatggaagatggagtcagctattgaagtggtcatccatttctttttaagaagctcatgtggacttgttctattgcctgacctgatgaactgttaatatctggtgaggttgagttatcatgctactaatattttccaaataaatatttttattttt

SEQ ID NO: 6181 - protein, 456 aa, Homo sapiens; identical to SEQ ID NO: 818

SEQ ID NO: 6182 - DNA, 1739 bp, Homo sapiens
acttctccctagagcaggggtgtttgccagcagcctgcactctcagaaatcagacttgagtggccggaacccttgagaccagaggcttaccatgctgctccctaggagggccaggaactgctgacgtgaccactggacagttattcgtgtctcttacaattaccaaacagaatggacaagcttaataaaataaccgtccccgccagtcagaagttgaggcagcttcaaaagatggtccatgatattaaaaacaatgaaggtggaataatgaataaaatcaaaaagctaaaagtcaaagcacctccaagtgttcctcgaagggactacgcttcagagagccctgctgacgaagaggagcagtggtccgatgactttgacagcgactatgaaaatccagatgagcactcggactcagagatgtacgtgatgcccgccgaggagaacgctgatgacagctacgagccgcctccagtagagcaggaaaccaggccggttcacccagccctgcccttcgccagaggcgagtatatagacaatcgatcaagccagaggcattccccacccttcagcaagacacttcccagtaagcccagctggccttcagagaaagcaaggctcacctccaccctgccggccctgactgctttgcagaaacctcaagtcccacccaaacccaaaggcctccttgaggatgaggctgattatgtggtccccgtggaagataatgatgaaaactatattcatcccacagaaagcagttcacctccacctgaaaaaggtcgaaacagtggggcctgggaaaccaagtcacctccaccagctgcaccatccccgttgccacgggccgggaaaaaaccaacgacaccactgaagacaactccagttgcctctcaacagaatgcttcaagtgtttgtgaagaaaaacctatacctgctgaacgccaccgagggtcaagtcacagacaagaagctgtgcagtcaccagtgtttcctcctgcccagaaacaaatccaccaaaaacccatacctctgccaagatttacagaagggggaaacccaactgtggatgggcccctacccagcttttcatctaattccactatttcagaacaggaagctggcgttctctgcaagccatggtatgctggagcctgtgatcgaaagtctgctgaagaggcattgcacagatcaaacaaggatggatcatttcttattcggaaaagctctggccatgattccaaacaaccatatacactagttgtattctttaataagcgagtatataatattcctgtgcgatttattgaagcaacaaaacaatatgccttgggcagaaagaaaaatggtgaagagtactttggaagtgttgctgaaatcatcaggaatcatcaacatagtcctttggttcttattgacagtcagaataacacaaaagattccaccagactgaagtatgcagttaaagtttcataaagggggaaaaaaaagatcaataccattgcttcagacactttcccaaagtttctccttttgagaaaaagtcccaaaacttcatattttggattatgaatcatccagtaataaaatggaagatggagtcagctattgaagtggtcatccatttctttttaagaagctcatgtggacttgttctattgcctgacctgatgaactgttaatatctggtgaggttgagttatcatgctactaatattttccaaataaatatttttattttt

SEQ ID NO: 6183 - protein, 433 aa, Homo sapiens
MDKLNKITVPASQKLRQLQKMVHDIKNNEGGIMNKIKKLKVKAPPSVPRRDYASESPADEEEQWSDDFDSDYENPDEHSDSEMYVMPAEENADDSYEPPPVEQETRPVHPALPFARGEYIDNRSSQRHSPPFSKTLPSKPSWPSEKARLTSTLPALTALQKPQVPPKPKGLLEDEADYVVPVEDNDENYIHPTESSSPPPEKGRNSGAWETKSPPPAAPSPLPRAGKKPTTPLKTTPVASQQNASSVCEEKPIPAERHRGSSHRQEAVQSPVFPPAQKQIHQKPIPLPRFTEGGNPTVDGPLPSFSSNSTISEQEAGVLCKPWYAGACDRKSAEEALHRSNKDGSFLIRKSSGHDSKQPYTLVVFFNKRVYNIPVRFIEATKQYALGRKKNGEEYFGSVAEIIRNHQHSPLVLIDSQNNTKDSTRLKYAVKVS

SEQ ID NO: 6184 - DNA, 1696 bp, Homo sapiens
acttctccctagagcaggggtgtttgccagcagcctgcactctcagaaatcagacttgagtggccggaacccttgagaccagaggcttaccatgctgctccctaggagggccaggaactgctgacgtgaccactggacagttattcgtgtctcttacaattaccaaacagaatggacaagcttaataaaataaccgtccccgccagtcagaagttgaggcagagagccctgctgacgaagaggagcagtggtccgatgactttgacagcgactatgaaaatccagatgagcactcggactcagagatgtacgtgatgcccgccgaggagaacgctgatgacagctacgagccgcctccagtagagcaggaaaccaggccggttcacccagccctgcccttcgccagaggcgagtatatagacaatcgatcaagccagaggcattccccacccttcagcaagacacttcccagtaagcccagctggccttcagagaaagcaaggctcacctccaccctgccggccctgactgctttgcagaaacctcaagtcccacccaaacccaaaggcctccttgaggatgaggctgattatgtggtccccgtggaagataatgatgaaaactatattcatcccacagaaagcagttcacctccacctgaaaaagctcccatggtgaatagatcaaccaagccaaattcctcaacgcccgcctctcctccaggaacagcttcaggtcgaaacagtggggcctgggaaaccaagtcacctccaccagctgcaccatccccgttgccacgggccgggaaaaaaccaacgacaccactgaagacaactccagttgcctctcaacagaatgcttcaagtgtttgtgaagaaaaacctatacctgctgaacgccaccgagggtcaagtcacagacaagaagctgtgcagtcaccagtgtttcctcctgcccagaaacaaatccaccaaaaacccatacctctgccaagatttacagaagggggaaacccaactgtggatgggcccctacccagcttttcatctaattccactatttcagaacaggaagctggcgttctctgcaagccatggtatgctggagcctgtgatcgaaagtctgctgaagaggcattgcacagatcaaacaaggatggatcatttcttattcggaaaagctctggccatgattccaaacaaccatatacactagttgtattctttaataagcgagtatataatattcctgtgcgatttattgaagcaacaaaacaatatgccttgggcagaaagaaaaatggtgaagagtactttggaagtgttgctgaaatcatcaggaatcatcaacatagtcctttggttcttattgacagtcagaataacacaaaagattccaccagactgaagtatgcagttaaagtttcataaagggggaaaaaaaagatcaataccattgcttcagacactttcccaaagtttctccttttgagaaaaagtcccaaaacttcatattttggattatgaatcatccagtaataaaatggaagatggagtcagctattgaagtggtcatccatttctttttaagaagctcatgtggacttgttctattgcctgacctgatgaactgttaatatctggtgaggttgagttatcatgctactaatattttccaaataaatatttttattttt

SEQ ID NO: 6185 - protein, 374 aa, Homo sapiens; identical to SEQ ID NO: 6179

SEQ ID NO: 6186 - DNA, 625 bp, Homo sapiens
gatgaatgcagaggtggtaggatgtacctgtaacactgctgggagggagtcctggtcctcatagcacaaccacatcaacagactggcaagtgcacagatccatgacatctcagtaactaagacatgttcccgggaagacttctgatcaaatttggttcttctcagctgatgttgctgggttttgggatgaggacagacatttcactctaatcctaatatgataattttcctgatccagaaaaacctatacctgctgaacgccaccgagggtcaagtcacagacaagaagctgtgcagtcaccagtgtttcctcctgcccagaaacaaatccaccaaaaacccatacctctgccaagatttacagaagggggaaacccaactgtggatgggcccctacccagcttttcatctaattccactatttcagaacaggaagctggcgttctctgcaagccatggtatgctggagcctgtgatcgaaagtctgctgaagaggcattgcacagatcaaacaaggtctgatcatttttattatttattatttttattttattttattttatttatttgttttgagatgatgcagtttcactggagtgcagtggctcgatctcagctcactgca

SEQ ID NO: 6187 - protein, 135 aa, Homo sapiens
MIIFLIQKNLYLLNATEGQVTDKKLCSHQCFLLPRNKSTKNPYLCQDLQKGETQLWMGPYPAFHLIPLFQNRKLAFSASHGMLEPVIESLLKRHCTDQTRSDHFYYLLFLFYFILFICFEMMQFHWSAVARSQLT

SEQ ID NO: 6188 - DNA, 272 bp, Homo sapiens
tatttttagggtgatgtttgccttggaaaaattatccagatatttgccgtatcttctttttaaggtaaggaaacaagtgggagaagatgccaggataacgcagctggaagcgacagtgctgtgttagaacccaggcctatcagactctaggatccagcctcgaccactccctgatacactacatggcttcgttgtacttacttggcagaggtatgggtttttggtggatttgtctgcaagaaagaatttcagataattaaaggacaaagcac

SEQ ID NO: 6189 - protein, 37 aa, Homo sapiens
MFALEKLSRYLPYLLFKVRKQVGEDARITQLEATVLC

SEQ ID NO: 6190 - DNA, 610 bp, Homo sapiens
acttctccctagagcaggggtgtttgccagcagcctgcactctcagaaatcagacttgagtggccggaacccttgagaccagaggcttaccatgctgctccctaggagggccaggaactgctgacgtgaccactggacagttattcgtgtctcttacaattaccaaacagaatggacaagcttaataaaataaccgtccccgccagtcagaagttgaggcagcttcaaaagatggtccatgatattaaaaacaatgaaggtggaataatgaataaaatcaaaaagctaaaagtcaaagcacctccaagtgttcctcgaagggactacgcttcagacacctgctccctttcctggaacccttccaaatagtcttgatgtcagaacatttaatctctcctggaatgcagaagtgtggcccaacaggatcttctaagcctttgcaacacaaagtttgattcccagcaagatagcatcaacctcatctggagcttgttagaaatgcagaatcttggccccaccctagaactactggatcagaatttacattttagcaagatctccaggggatctgaatgtaaatcatatttaagaaaccctgctataaaccacc

SEQ ID NO: 6191 - protein, 65 aa, Homo sapiens
MDKLNKITVPASQKLRQLQKMVHDIKNNEGGIMNKIKKLKVKAPPSVPRRDYASDTCSLSWNPSK

SEQ ID NO: 6192 - DNA, 1927 bp, Homo sapiens
ctgggcttggtccctggcagcaggcatctggggcatgtagctgcctcttcagctgtcctgccaacagaagaaacttacctcccatcatctccctgagtgcctgcctcagccgccttgtatgtattcattgctgtgtctataataaatcagcgggtccttgctggaagcttggacgtttcaatggagagctttccaaacacctacagcacccttttgaatgcaactggaagtattggtgcctcaggagctacacaagcctgaaccacctgctacttaccagattctgggaaatccaacatcaaggtgccagctgaaaagtttcctggtgagggcactagctctggtttgcagatggccaccttcttgctacaactcaaacttgcaccaccaagcccttgccagatggcagaaagcagggcattggaaggtatttcctccctgttgagtaccagctccacttcaccagccaacccatgagacagtgttctacaatgccacaaagacaaatagccacatgcgtctcccatgtacccggataccaccttgaagggaagggacagaactttgaaagatattacatttcctgaagttatcaaagcagagaaaactgaattatctgatgggacagttaaaactattggattggactgaaatggcaagatggaactaagctttagttcttttcccacatcccagcaagaagaaagtaaatcagctcttctatagacaaaataacaaagctcacattttctctgtatacataaggaaaggtgagggattttggaccctgaaacatgagtttatgaatatacacatgcatacatccatttgcatgtgcatatgtggatatgcacattcacgcactgtagaccaaggcagagaaaactaggacttaagagtgcagccaacagtgggctgcacctggcgtgttctgggattctggtggcagagaaggaataccggcttcttgggagcaaatcctgacatacaagtgtgggaaatgcggcaaaatgaaacttgttgagcgctgttgacaagacaatttttctgggaactagtgcagtcattcagtgagccggccagacagagcagagttcatttcagatgtttctattgtcccagacatgggagttctacttgtcaccatttggtgtcagtattttctatcctaaaagtcctctgggttataaagcaaaggccctgttggagaaagtctggagtattttactgtgaataactaactttatttcagaaaattttaatattccttttagccttcactgctttgttttctgctttgtaattgtttttctttgtgcagaaaaaaggcagcattctctttatctgcaaaggcaaacatcagaattacaccattcattcatttgaccaacaaatcttgaggaccagcatcttgtaacacaagtccctccacctacagagcttttcggattctagagggcaacatgctcagggcagaggcaggtgttggaggcagcagttctgtagaaagaaaagctagccctggctttgagcctggttttgccacttagcagctatgtggctgtgggcaataaacttaacctctctgagctgcagtctcttcatacataaaacatacataataaacacttttcttccaattttatcatgaaaattaaagaagttgagggatgcctaggcagagcacaggggatgtttagggcagtgaagctactctgtatgacacttataatggtcattatacgtttacccaaacccaaaagcgaaccctcctgtgtaaactacagaatttgggtggcaatgatgtatcagcgtaggctcaccgattctaacaaatgtaccactctggtgggggacgctgggaatgggggaggctatgcatttgtaagggcacaaggtgtgtgagatatctctttaccttctgctc

SEQ ID NO: 6193 - protein, 75 aa, Homo sapiens [sequence omitted]

SEQ ID NO: 6194 - DNA, 2038 bp, Homo sapiens
acactttggcaggaagctgttgccagggcagcacctgtgaagccctggcctggcttcagagtctgctggtgagatgacatcaaaacccttcgtgtaggagggtggcagtctccctcccttctggagacaccaccagatgggccagccagaggcagcagcagcctcttcccatggatccaccacgagcgtcccacttgagccctcggaagaagagaccccggcagacgggtgccttgatggcctcctctcctcaagacatcaaatttcaagatttggtcgtcttcattttggagaagaaaatgggaaccacccgcagagcgttcctcatggagctggcccgcaggaaagggttcagggttgaaaatgagctcagtgattctgtcacccacatcgtagcagagaacaactcgggttcggatgttctggagtggcttcaagcacagaaagtacaagtcagctcacaaccagagctcctcgatgtctcctggctgatcgaatgcataagagcagggaaaccggtggaaatgacaggaaaacaccagcttgttgtgagaagagactattcagatagcaccaacccaggccccccgaagactccaccaattgctgtacaaaagatctcccagtatgcgtgtcagagaagaaccactttaaacaactgtaaccagatattcacggatgcctttgatatactggctgaaaactgtgagtttagagaaaatgaagactcctgtgtgacatttatgagagcagcttctgtattgaaatctctgccattcacaatcatcagtatgaaggacacagaaggaattccctgcctggggtccaaggtgaagggtatcatagaggagattattgaagatggagaaagttctgaagttaaagctgtgttaaatgatgaacgatatcaatccttcaaactctttacttctgtatttggagtggggctgaagacttctgagaagtggttcaggatgggtttcagaactctgagtaaagtaaggtcggacaaaagcctgaaatttacacgaatgcagaaagcaggatttctgtattatgaagaccttgtcagctgtgtgaccagggcagaagcagaggccgtcagtgtgctggttaaagaggctgtctgggcatttcttccggatgctttcgtcaccatgacaggagggttccggaggggtaagaagatggggcatgatgtagattttttaattaccagcccaggatcaacagaggatgaagagcaacttttacagaaagtgatgaacttatgggaaaagaagggattacttttatattatgaccttgtggagtcaacatttgaaaagctcaggttgcctagcaggaaggttgatgctttggatcattttcaaaagtgctttctgattttcaaattgcctcgtcaaagagtggacagtgaccagtccagctggcaggaaggaaagacctggaaggccatccgtgtggatttagttctgtgcccctacgagcgtcgtgcctttgccctgttgggatggactggctcccggcagtttgagagagacctccggcgctatgccacacatgagcggaagatgattctggataaccatgctttatatgacaagaccaagaggatattcctcaaagcagaaagtgaagaagaaatttttgcgcatctgggattggattatattgaaccgtgggaaagaaatgcctaggaaagtgttgtcaacatttttttcctattcttttcaagttaaataaattatgcttcatattagtaaaagatgccataggagagtttggggttatttaggtcttattgaaatgcagattgctactagaaataaataactttggaaacatgggaaggtgccactggtaatgggtaaggttctaataggccatgtttatgactgttgcatagaattcacaatgcatttttcaagagaaatgatgttgtcactggtggctcattcagggaagctcatcaaagcccactttgttcgcagtgtagctgaaatactgtctatctctaataaaaacaggaggaaac

SEQ ID NO: 6195 - protein, 509 aa, Homo sapiens; identical to SEQ ID NO: 822

SEQ ID NO: 6196 - DNA, 3553 bp, Homo sapiens
ccagcctcagcctcatgtaacccattgtttccaaagggctgcaggctgcagaagcccccaagctctcaggccagctgtggcttctttgctgagatggaggtatagccaagaaagcagcctgaaaagtaaggacagaaaatcaaggcaaagagggtgggtgaaccaggccatacacgtcggccatgcagcagcagcccatctttcccgagggatggactgagggcttggctactcccctgaccataaatggcttggccagggttctcttggagccacctctcagcctgcctctgcagctttgtcagttaactgttcctacaaatgaaagacacaagccaataaagccagtgagaaaggagcttaccaaaggcagtgtacgaagaaggttcctgggagactgtcagaaatgagtttttcactgaacttcaccctgccggcgaacacaacgtcctctcctgtcacaggtgggaaagaaacggactgtgggccctctcttggattagcggcgggcataccattgctggtggccacagccctgctggtggctttactatttactttgattcaccgaagaagaagcagcattgaggccatggaggaaagtgacagaccatgtgaaatttcagaaattgatgacaatcccaagatatctgagaatcctaggagatcacccacacatgagaagaatacgatgggagcacaagaggcccacatatatgtgaagactgtagcaggaagcgaggaacctgtgcatgaccgttaccgtcctactatagaaatggaaagaaggaggggattgtggtggcttgtgcccagactgagcctggaatgatgcagctcagtcaaggagcagcagacctggcactggaacagggttgaaaacccagggttttgtacttggagaggaaagatgccaagctgcttcttaatcaatccaaatttcatttacagctctggaacactttggggctgatttgtctctttaggggacatccccaacatggttaattccaactctcagatcttgtgctttagttagtacatgtgactcaccagatggggtccttagatcctattcctgctcccagtgggaatttgcttttctttgtcattttgggaaaggggcttggtttctgagtgtcttgccttctcatctttttttttcatatcctttttctcaaaaaagccatcagatctgactttcatggaagtgttgctgaggtcagcctggtgcaagttgggatacaaatgaaacttatgcaggatgtgtgagaggaagcagttaattgtttctgaatatctcagggtaggaaccatgtggagccacacattccctgaccacagggaagcacctggctcaatcatgtcacacagcagtggaaagaatacggactcttaagtcacacctaccactgagcagctgtacgactttggagaagttgtttaacattttcaagcctcagtttttgcttttttaaaggaggggaaatatttgcctcatgtcataattgaaaagattaaataagaaataaagggaagtgtctgctacttagttgccagtcaaaatgttagttctctctctctaccaccttcttcctacctcttcccatattgcttgcctgataaaacagctaatcaccagcatttgttccccatagtcacagggccacacaagggaacatttaggacaaactttctccatggcctatgatccaaattgttatctaaagatgattctaggtgttgctggtagtatgtgaatcttccaatctaggtgtgatcgtgtcctcatatgaatcaggaaaaggcagtttcttacaagttccgaattccaaatacagagactggtggtgttacatttaaccttaaagatgttaatgttgatggaaattcatgtttcatattaaaacaacactttgtctttacaatgaaacattttgcttaatttttaaagtaagacattatgatacctctgatggcagttcctcaaataactttaacttttgtgctttagggatagttgttaaagttacaacttcttttattttattttttaaaggcttcagattaaacaagagcccttaagcccacgcatagcattgccgcttcagcttgctgaggactgtctccaaggaggccaaatggaaaaggagaggctacttcaagtggtgttggcccattgagcctattgggcaaactataaccaggttgccttattttgggtggattactccaggagaggccaccctccagctttctcttatcccagtaactcctcttcccattttccaatccatccccagccttttttttttttcttctgtactcttcttttgccttcaatatgagtttcatttcctctgtgtctttgggcagacttccttctaacatgtgtcagctaccctaccacacacctggcctaggagacacatcattcattgctcctacttgtgtctgtaatcagagagtatttaaggagggcagttctgcgacggactgtgtgtgtgttgaaagtaaagatggggggccgcggggaaggcaagagtttttccaaaagattattagaaatgagggctgtatctactctgtggagtagaaccaagtctacttggagaaaagaaccaagtccttggatatctaggggaaagctgtttggcagaaagaaaaatcaagaggacccaaggggatggagacaggaccacaggaatgggccaaggagcaacgtgcctgccattcagccagcttgggacaggctttcactttcactcccatgaggaggcttccaggcagcctggttcccccatgtatagccattgccctctagcaggccaggcctcccagtgggaaggcctgggtccagggcatcttaagttcatccagcagctccatgagccacacagatatcctagaaaatattcctttctcacacagggcttctgattactcagaaacatgcccctcttccctgaataaccaagaacatgttctatgaacccaatctctgccacatgtcaatacctgctcttcaaagccccttttgaaactcagttttgtgccaagtcctctggatctaattaccttaaacaagcagatttagccatttttaaacagacattcccagtcatcctggtgcttgtacttctcctacatgtcatgaaggaccttggatttactgagaactcagccgtggccttggctttgatacttataggtgtcagcccttgggccgattgttgatcatccagagcctcagttctgtacttgtaaagtggagacagcagttctcatcctccatccttttagcccatggggtggttgtaaggctggattgaaatatgcatgtgactaagccatgtagctataaagtgagggatgacttgtgttttggatcacttattttaattctacttataatccacggcttagaatatttaaacattgtttctattaaactagaaaggttcagcatttctgtcatttacttctgctatgatacacaagaacttatgttggaatgaagtgaaaagtaaaatggccattcttatgaacctac

SEQ ID NO: 6197 - protein, 141 aa, Homo sapiens; identical to SEQ ID NO: 824

SEQ ID NO: 6198 - DNA, 1288 bp, Homo sapiens
gggttctcttggagccacctctcagcctgcctctgcagctttgtcagttaactgttcctacaaatgaaagacacaagccaataaagccagtgagaaaggagcttaccaaaggcagtgtacgaagaaggttcctgggagactgtcagaaatgagtttttcactgaacttcaccctgccggcgaacacaacgtcctctcctgtcacaggtgggaaagaaacggactgtgggccctctcttggattagcggcgggcataccattgctggtggccacagccctgctggtggctttactatttactttgattcaccgaagaagaagcagcattgaggccatggaggaaagtgacagaccatgtgaaatttcagaaattgatgacaatcccaagatatctgagaatcctaggagatcacccacacatgagaagaatacgatgggagcacaagaggcccacatatatgtgaagactgtagcaggaagcgaggaacctgtgcatgaccgttaccgtcctactatagaaatggaaagaaggaggggattgtggtggcttgtgcccagactgagcctggaatgatgcagctcagtcaaggagcagcagacctggcactggaacagggttgaaaacccagggttttgtacttggagaggaaagatgccaagctgcttcttaatcaatccaaatttcatttacagctctggaacactttggggctgatttgtctctttaggggacatccccaacatggttaattccaactctcagatcttgtgctttagttagtacatgtgactcaccagatggggtccttagatcctattcctgctcccagtgggaatttgcttttctttgtcattttgggaaaggggcttggtttctgagtgtcttgccttctcatctttttttttcatatcctttttctcaaaaaagccatcagatctgactttcatggaagtgttgctgaggtcagcctggtgcaagttgggatacaaatgaaacttatgcaggatgtgtgagaggaagcagttaattgtttctgaatatctcagggtaggaaccatgtggagccacacattccctgaccacagggaagcacctggctcaatcatgtcacacagcagtggaaagaatacggactcttaagtcacacctaccactgagcagctgtacgactttggagaagttgtttaacattttcaagcctcagtttttgcttttttaaaggaggggaaatatttgcctcatgtcataattgaaaagattaaataagaaataaagggaagtgtctgc

SEQ ID NO: 6199 - protein, 141 aa, Homo sapiens; identical to SEQ ID NO: 824

SEQ ID NO: 6200 - DNA, 1024 bp, Homo sapiens
agtgcagcgaccatccagtgtccttgcagcacgtgttggtctggtgctagcgtgaagagcagtggttaggtcccttgagcaagaggaccctgacctaagaggcccagacgtccctgtgttccaccgtcatcccagaagcagagagtttttcactgaacttcaccctgccggcgaacacaacgtcctctcctgtcacaggtgggaaagaaacggactgtgggccctctcttggattagcggcgggcataccattgctggtggccacagccctgctggtggctttactatttactttgattcaccgaagaagaagcagcattgaggccatggaggaaagtgacagaccatgtgaaatttcagaaattgatgacaatcccaagatatctgagaatcctaggagatcacccacacatgagaagaatacgatgggagcacaagaggcccacatatatgtgaagactgtagcaggaagcgaggaacctgtgcatgaccgttaccgtcctactatagaaatggaaagaaggaggggattgtggtggcttgtgcccagactgagcctggaatgatgcagctcagtcaaggagcagcagacctggcactggaacagggttgaaaacccagggttttgtacttggagaggaaagatgccaagctgcttcttaatcaatccaaatttcatttacagctctggaacactttggggctgatttgtctctttaggggacatccccaacatggttaattccaactctcagatcttgtgctttagttagtacatgtgactcaccagatggggtccttagatcctattcctgctcccagtgggaatttgcttttctttgtcattttgggaaaggggcttggtttctgagtgtcttgccttctcatctttttttttcatatcctttttctcaaaaaagccatcagatctgactttcatggaagtgttgctgaggtcagcctggtgcaagttgggatacaaatgaaacttatgcaggatgtgtgagaggaagcagttaattgt

SEQ ID NO: 6201 - protein, 79 aa, Homo sapiens
MEESDRPCEISEIDDNPKISENPRRSPTHEKNTMGAQEAHIYVKTVAGSEEPVHDRYRPTIEMERRRGLWWLVPRLSLE

SEQ ID NO: 6202 - DNA, 6756 bp, Homo sapiens
gcagcctcggccgccgggcaagtagctccgagcggctgcttcccggttgcctcgacgaagacagggggcgccgcgctccgcttgctccgcgcctgagccatgcccagcagccctgtgtaaccaccgagtcccggccggagccgaccgacccagtgtgcgccgtctttcggccgagctgagctttcgtgcacgcaactccctctgccccagccggccccgcgccaccatgccccgggcgactgcacttggggccctggtgtcactgctgctgctgctgccgctgcctcgcggcgccgggggactcggggagcgcccggacgccaccgcagactactcagagctggacggcgaggagggcacggagcagcagctggagcattaccacgacccttgcaaagccgctgtcttttggggagacattgccttagatgaagatgacttgaagctgtttcacattgacaaagccagagactggaccaagcagacagtgggggcaacaggacacagcacaggtgggcttgaagagcaggcatctgagagcagcccagacaccacagccatggacactggcaccaaggaagctggaaaggatggccgggagaataccacactcctgcacagccctgggaccttgcatgccgcagccaagaccttctctccccgggtccgaagagccacaacctcaaggacagagaggatatggcctggaggagtcatcccctacgtcattggagggaacttcactgggagccagagggccatttttaagcaggccatgagacactgggagaagcacacctgtgtgaccttcatagaaaggacggatgaggaaagctttattgtattcagttacagaacctgtggctgttgctcctatgttgggcgccgaggaggaggcccacaggccatatccattgggaagaactgtgacaagtttggcattgtggctcacgagctgggccatgtggttgggttttggcatgaacacacccggccagacagagaccaacatgtcaccatcatcagggaaaacatccagccaggtcaggagtataatttcttaaaaatggaagctggggaagtgagctctctgggagagacatacgactttgacagcatcatgcactacgcccggaacaccttctcaagaggagttttcttagacaccatccttccccgtcaagatgacaatggcgtcaggccaaccattggccagcgcgtgcggctcagtcagggagacatagctcaagcccggaagctgtacaaatgcccagcgtgtggggagaccctgcaggacacaacgggaaacttttctgcacctggtttcccaaatgggtacccatcttactcccactgcgtctggaggatctcggtcaccccaggggaaaagatcgtattaaacttcacatccatggatttgtttaaaagccgactgtgctggtatgattacgtggaggtccgggatggttactggagaaaagccccccttttgggcaggttttgtggcgataagatcccggagcccctcgtctccacggacagccggctctgggtggagttccgcagcagcagcaacatcttgggcaagggcttctttgcagcgtacgaagctacctgcgggggagacatgaacaaagatgccggtcagattcaatctcccaactatccggatgactacagaccttccaaggaatgtgtctggaggattacggtttcagaggggtttcacgtgggacttaccttccaagcttttgagattgaaaggcacgacagctgtgcatatgactacctggaagtccgggatggccccacggaagagagtgccctgatcggccacttttgtggctatgagaagccggaggatgtgaaatcgagctccaacagactgtggatgaagtttgtgtccgatggctctatcaataaagcgggctttgcagccaattttttcaaggaggtggatgagtgttcctggccagatcacggcgggtgcgagcatcgctgtgtgaacacgctgggcagctacaagtgtgcctgtgaccctggctacgagctggccgccgataagaagatgtgtgaagtggcctgtggcggtttcattaccaagctgaatggaaccatcaccagccctgggtggccgaaggagtatcccacaaacaaaaactgtgtctggcaggtggtggcccccgctcagtaccggatctcccttcagtttgaagtgtttgaactggaaggcaatgacgtctgtaagtacgactttgtagaggtgcgcagcggcctgtcccccgacgccaagctgcacggcaggttctgcggctctgagacgccggaggtcatcacctcgcagagcaacaacatgcgcgtggagttcaagtccgacaacaccgtctccaagcgcggcttcagggcccacttcttctcagataaggacgagtgtgccaaggacaacggcgggtgtcagcatgagtgcgtcaacaccttcgggagctacctgtgcaggtgcagaaacggctactggctccacgagaatgggcatgactgcaaagaggctggctgtgcacacaagatcagcagtgtggaggggaccctggcgagccccaactggcctgacaaataccccagccggagggagtgtacctggaacatctcttcgactgcaggccacagagtgaaactcacctttaatgagtttgagatcgagcagcaccaggaatgtgcctatgaccacctggaaatgtatgacgggccggacagcctggcccccattctgggccgtttctgcggcagcaagaaaccagaccccacggtggcttccggcagcagtatgtttctcaggttttattcggatgcctcagtgcagaggaaaggcttccaggcagtgcacagcacagagtgcgggggcaggctgaaggctgaagtgcagaccaaagagctctattcccacgcccagtttggggacaacaactacccgagcgaggcccgctgtgactgggtgatcgtggcagaggacggctacggcgtggagctgacattccggacctttgaggttgaggaggaggccgactgcggctacgactacatggaagcctacgacggctacgacagctcagcgcccaggctcggccgcttctgtggctctgggccattagaagaaatctactctgcaggtgattccctgatgattcgattccgcacagatgacaccatcaacaagaaaggctttcatgcccgatacaccagcaccaagttccaggatgccctgcacatgaagaaatagtgctgatgttcttgaaagacagaaactgagaattttttttgttttgttttgtttttaacaacaatagcaccttgaaaatctgccctaaaacagtgtacagtatttttctcaaacaaaaactcagaatccagccttagaggtatatatttgaatgaaagtcttgtaagtttggccaacaaggtggagagaaaaatgttcttttgcttctgtctgcaatgttatcattcatgaactgttaaagtgttaaagattaggattgaagtcactgaccattccggctatgcttcttcataccattctccttgtcccttgctcctatgtggcaaaaggtcagccttggggttggccgttcctctaatctggacttgcttgcaaaggtgccaggctgtcttctgtccatgttgggcataagggatgaaaacttggccgagactaatgtgtggcccacagctttggctggaatcattttctttctctctgccagggacatgtcaaccaagaaacctgaaaatatggatggatgtcaggactaaaaaaaggcatcacagtgagcagtgagcacagagggagtttcgagtataagaatcattgtcatgaagttaggagaccacaaagccatttctcagagtcattcactctccttgtccctttggtttccccccctccctaattgcagtgggggctaaggcatccattatgaatacagcagaacatttgctggcgagagtcctgtctgctgagaagacaatattgtggctcgtcctgatatttttttcattcattgactttgagaagactccacctgtgcttggaattccatgggcttcaaagaacatttcttcttttagctttggaggcacttgccgtggcacacctggactccttgacatccaattcaaactgcatttgcaaaatgtgcaaagacctcttatgagggaccaattcaggtcccttatggggtgaacactgttgaagactggttaattataagttatgtaagaatcatcgccttgtggaacaagtcaatcagtgactagcttcctgtagccaatcaggttaaagagtgcgttggtaactttgctctgattaactagtattcaatcaccaacttgcaaacagaattcataacacttggcacttgttctagagaagtgtagaggatgatgtttacataattttagcacctcaaggtataatttaaacagtgaggtagttttgaatggcatttcattaaggcatctatgggcattatgagctaaaagctgtggtatgttagctttaaaagagtatttatgttggaataatttttaaataatgtttacataactgtaagtcctgtttggttgttgttggacgcagggcggcacatgagtgtttttggttagagccaagatagctcccatgcaccggaattcctttgggatgaatcagcatcattttaaacaaagtatatgtaaaaggtgaaaggttatattttttacagatcagaatgtggcaccagaggactgtgtctcattaaagtgattgctgggagcaaaaactagaatgatacaaagaaaggtcagagaaatgcatgggaatattttttccttaaaacagaaaaaaattaaagtattattaataatatatgtctgtatatatgtatgtatgtaaaagatcagctgtcaaagccttaatcaatgcagtgtggaaaatgccaacccctggtcctcgctttactgtgggccctgcaggactggctctccatttcctgcctctcctttcaccaagctctgttttggcctttctcggccctggactgaggctcagcctacacgctcatattgtgcatatggcagaccctgcccagcgtgcgctttgatacagcaaatggagcagctgacctcatggctccaatcccacctgcctgttagggtagattccatttatctgatttttgtattttctgaggttttatttggtctcatcttgtctatgagagttgaaactggaactgggaaacctaagatgggtgttatggttctttctccaaggaaataaaaattctgcagttttaacctttagaagtctaagcaagattaacaaatttcatagaaaagtgggagggagtcagaaacagagttggtgctgctcagcaggacggtgaaacaatgatacttctttttatctctttagtatgaacattttcaaaaacacacagcttcaacaattgtcaccatatggccaatttgcaacaatgggactcttatgaaaaacctttatttaggccttctgtgtgacgtatccacagaaaagagaagctctgattcagctggggctagctgggccgctcctctggaagcccacacttgtggggacttaggcatgacacaggttcttgcaaagaaactagaggctggcttcactagagagagtccattcagcagaaagtcccaggcctctgccttggtgcttccaattatcagtgacctgcctgcaagcatccccagaagcaaacagcagaggtagaagatatcactgcagcctgctttgtgctttaattgggtaccaagctttggggatgacagtgagttgcaagaatagttttagttcagagaattgtcttaggacaacaggctaatgaaggatttggggtctgggtttttagcctggctccgttctggtgtaacccggtctagcaaaagctaagcctggattgcagggcaggaaaaaatctggaattaactttagccagtggaatttcttcaaacagagaaagagaggctgttcattgatccactattccctctattttcctctaaggtaaatatttagaggtatttacctgtaaggtgaagtttcctttttatttctactttacaatttctctctaaagcaagcttgtccaacccttggcccaggacggctttgaatatggcccgacacaaattcgtaaactttttaaaaaacattgtaagattctttctgtgatttttttttttctcgtcagctatcgttagtgtattttatgtgtggcccaagataattcttcttccaatgtggcccagggaagccaaaagatgggacacccctgctgtaaagtttcatatcactcatgaattgctcagctgatttaaataatttgtaaaatcctgctaactagcaaattcacattgagattttctattgattgggtccctttgatagctttcagattggtattgttagcgttccatttgtgaacaaatgttcccttggctttagcagatgtttttaaagtttcttttgtagaccgaacttctgaagagtaataccaaatgcctaaaattttatttttaaaaaggaaaattgtttaaagtattatatgtaaacatatgggtattttttattttgtgtaattttacatttcatgaaatgatgtcagtttcaaagagaaagtggagaggacctaacatatgtctctacctagaacggatggtttcattaaagaatgtggatttatt

SEQ ID NO: 6203 - protein, 1015 aa, Homo sapiens; identical to SEQ ID NO: 826

SEQ ID NO: 6204 - DNA, 1500 bp, Homo sapiens
ttgggaaacggatggtggctatattgattgcgcgcttttcgctaccatagaatcatcaccagaagtaagagagaaaatgcgcataaatgcttggcatggaataaacactcggcgagagtcagccaccatgagggtgctgcctggagcagcgtgcacctcatacaacctcaccagcgtcatttgtactaaagggtcgtgcagcagagtgcacaggtcaacagcagggtctctgatgccagagcaccagatcatggcccaactctcagtatgtgaccttgggcaagtcatctgacagcgatgagcctcattttcctcacctgtaaagcggggattagacacatcacaggggtgtaaagattaaatgaggcgatacttgtaaagcatttaaaacagctgccgacagagtgggcactcagcccttgctggctcttagccctaagtgagagagaagctgtgtgatgggatggaaggaagacagatttgggctgtgtaaagcctggctctgtcgcttaatagctgtcaaaatgtcaagcatttaatctctgaacccctgctctctcatctgcagtgtggtcattgtagcaatagctcatgtaactacttcatagggccacttgctggaccaaaagcaaggcggaggttgagaccctctctacagatgtcctcaagcatcatcacggccacacaccccctgcacagccagctggacgtctccctgcactgcctcgccccttcctgtcccagaactggaaaggaggcccccaccccagctgaacgccaggcccttgccttactttctgctcttctgtccccagacctttaatgagtttgagatcgagcagcaccaggaatgtgcctatgaccacctggaaatgtatgacgggccggacagcctggcccccattctgggccgtttctgcggcagcaagaaaccagaccccacggtggcttccggcagcagtatgtttctcaggttttattcggatgcctcagtgcagaggaaaggcttccaggcagtgcacagcacaggtacctggggtgggacactggcttccacctgatgagcacttggacaggagacagagaaatggtgaaggcacgacaaggactgccttttattctgactgggggagggcgaggggaggaaggtgcgtgataaaatgtcctattaaaatgaagcatcaagctgggcgtggtggctcatgcctgtaatcccagcactttgggaggccgaggcaggcggatcatctgaggtcaggagttcgagaccagcctgggcaacatggtgaaaccccgtctctactaaaaatacaaaattagctgggcatggtggttggtgcctgtaattccagctactcaggaggctgaggcaggagaattgcttgaacctggaggcagagattgcagtgagccaagatcgtgccattgcactctagcctggacgatagagtgagactttgtctctaaaaaaataaaaaaaataaaatgaagcatcagcaa

SEQ ID NO: 6205 - protein, 129 aa, Homo sapiens
MSLRSSSTRNVPMTTWKCMTGRTAWPPFWAVSAAARNQTPRWLPAAVCFSGFIRMPQCRGKASRQCTAQVPGVGHWLPPDEHLDRRQRNGEGTTRTAFYSDWGRARGGRCVIKCPIKMKHQAGRGGSCL

SEQ ID NO: 6206 - DNA, 1896 bp, Homo sapiens
agccgccgcagcctcggccgccgggcaagtagctccgagcggctgcttcccggttgcctcgacgaagacagggggcgccgcgctccgcttgctccgcgcctgagccatgcccagcagccctgtgtaaccaccgagtcccggccggagccgaccgacccagtgtgcgccgtctttcggccgagctgagctttcgtgcacgcaactccctctgccccagccggccccgcgccaccatgccccgggcgactgcacttggggccctggtgtcactgctgctgctgctgccgctgcctcgcggcgccgggggactcggggagcgcccggacgccaccgcagactactcagagctggacggcgaggagggcacggagcagcagctggagcattaccacgacccttgcaaagccgctgtcttttggggagacattgccttagatgaagatgacttgaagctgtttcacattgacaaagccagagactggaccaagcagacagtgggggcaacaggacacagcacaggtgggcttgaagagcaggcatctgagagcagcccagacaccacagccatggacactggcaccaaggaagctggaaaggggagccagagggccatttttaagcaggccatgagacactgggagaagcacacctgtgtgaccttcatagaaaggacggatgaggaaagctttattgtattcagttacagaacctgtggctgttgctcctatgttgggcgccgaggaggaggcccacaggccatatccattgggaagaactgtgacaagtttggcattgtggctcacgagctgggccatgtggttgggttttggcatgaacacacccggccagacagagaccaacatgtcaccatcatcagggaaaacatccagccaggtcaggagtataatttcttaaaaatggaagctggggaagtgagctctctgggagagacatacgactttgacagcatcatgcactacgcccggaacaccttctcaagaggagttttcttagacaccatccttccccgtcaagatgacaatggcgtcaggccaaccattggccagcgcgtgcggctcagtcagggagacatagctcaagcccggaagctgtacaaatgcccaggtcctacttgtgcttttgttagccagaaaacatcaatctgcttgctacacttctcaccaacctgttccgagggctttggctggcaaagggcgtgtggggagaccctgcaggacacaacgggaaacttttctgcacctggtttcccaaatgggtacccatcttactcccactgcgtctggaggatctcggtcaccccaggggaaaagatcgtattaaacttcacatccatggatttgtttaaaagccgactgtgctggtatgattacgtggaggtccgggatggttactggagaaaagccccccttttgggcaggttttgtggcgataagatcccggagcccctcgtctccacggacagccggctctgggtggagttccgcagcagcagcaacatcttgggcaagggcttctttgcagcgtacgaagctacctgcgggggagacatgaacaaagatgccggtcagattcaatctcccaactatccggatgactacagaccttccaaggaatgtgtctggaggattacggtttcagaggggtttcacgtgggacttaccttccaagcttttgagattgaaaggcacgacagctgtgcatatgactacctggaagtccgggatggccccacggaagagagtgccctgatcggccacttttgtggctatgagaagccggaggatgtgaaatcgagctccaacagactgtggatgaagtttgtgtccgatggctctatcaataaagcgggctttgcagccaattttttcaagggta

SEQ ID NO: 6207 - protein, 553 aa, Homo sapiens
MPRATALGALVSLLLLLPLPRGAGGLGERPDATADYSELDGEEGTEQQLEHYHDPCKAAVFWGDIALDEDDLKLFHIDKARDWTKQTVGATGHSTGGLEEQASESSPDTTAMDTGTKEAGKGSQRAIFKQAMRHWEKHTCVTFIERTDEESFIVFSYRTCGCCSYVGRRGGGPQAISIGKNCDKFGIVAHELGHVVGFWHEHTRPDRDQHVTIIRENIQPGQEYNFLKMEAGEVSSLGETYDFDSIMHYARNTFSRGVFLDTILPRQDDNGVRPTIGQRVRLSQGDIAQARKLYKCPGPTCAFVSQKTSICLLHFSPTCSEGFGWQRACGETLQDTTGNFSAPGFPNGYPSYSHCVWRISVTPGEKIVLNFTSMDLFKSRLCWYDYVEVRDGYWRKAPLLGRFCGDKIPEPLVSTDSRLWVEFRSSSNILGKGFFAAYEATCGGDMNKDAGQIQSPNYPDDYRPSKECVWRITVSEGFHVGLTFQAFEIERHDSCAYDYLEVRDGPTEESALIGHFCGYEKPEDVKSSSNRLWMKFVSDGSINKAGFAANFFK

SEQ ID NO: 6208 - DNA, 1951 bp, Homo sapiens
cagcctcggccgccgggcaagtagctccgagcggctgcttcccggttgcctcgacgaagacagggggcgccgcgctccgcttgctccgcgcctgagccatgcccagcagccctgtgtaaccaccgagtcccggccggagccgaccgacccagtgtgcgccgtctttcggccgagctgagctttcgtgcacgcaactccctctgccccagccggccccgcgccaccatgccccgggcgactgcacttggggccctggtgtcactgctgctgctgctgccgctgcctcgcggcgccgggggactcggggagcgcccggacgccaccgcagactactcagagctggacggcgaggagggcacggagcagcagctggagcattaccacgacccttgcaaagccgctgtcttttggggagacattgccttagatgaagatgacttgaagctgtttcacattgacaaagccagagactggaccaagcagacagtgggggcaacaggacacagcacaggtgggcttgaagagcaggcatctgagagcagcccagacaccacagccatggacactggcaccaaggaagctggaaaggatggccgggagaataccacactcctgcacagccctgggaccttgcatgccgcagccaagaccttctctccccgggtccgaagagccacaacctcaaggacagagaggatatggcctggaggagtcatcccctacgtcattggagggaacttcactgggagccagagggccatttttaagcaggccatgagacactgggagaagcacacctgtgtgaccttcatagaaaggacggatgaggaaagctttattgtattcagttacagaacctgtggctgttgctcctatgttgggcgccgaggaggaggcccacaggccatatccattgggaagaactgtgacaagtttggcattgtggctcacgagctgggccatgtggttgggttttggcatgaacacacccggccagacagagaccaacatgtcaccatcatcagggaaaacatccagccaggtcaggagtataatttcttaaaaatggaagctggggaagtgagctctctgggagagacatacgactttgacagcatcatgcactacgcccggaacaccttctcaagaggagttttcttagacaccatccttccccgtcaagatgacaatggcgtcaggccaaccattggccagcgcgtgcggctcagtcagggagacatagctcaagcccggaagctgtacaaatgcccagcgtgtggggagaccctgcaggacacaacgggaaacttttctgcacctggtttcccaaatgggtacccatcttactcccactgcgtctggaggatctcggtcaccccaggggaaaagatcgtattaaacttcacatccatggatttgtttaaaagccgactgtgctggtatgattacgtggaggtccgggatggttactggagaaaagccccccttttgggcaggttttgtggcgataagatcccggagcccctcgtctccacggacagccggctctgggtggagttccgcagcagcagcaacatcttgggcaagggcttctttgcagcgtacgaagctacctgcgggggagacatgaacaaagatgccggtcagattcaatctcccaactatccggatgactacagaccttccaaggaatgtgtctggaggattacggtttcagaggggtttcacgtgggacttaccttccaagcttttgagattgaaaggcacgacagctgtgcatatgactacctggaagtccgggatggccccacggaagagagtgccctgatcggccacttttgtggctatgagaagccggaggatgtgaaatcgagctccaacagactgtggatgaagtttgtgtccgatggctctatcaataaagcgggctttgcagccaattttttcaagg

SEQ ID NO: 6209 - protein, 574 aa, Homo sapiens
MPRATALGALVSLLLLLPLPRGAGGLGERPDATADYSELDGEEGTEQQLEHYHDPCKAAVFWGDIALDEDDLKLFHIDKARDWTKQTVGATGHSTGGLEEQASESSPDTTAMDTGTKEAGKDGRENTTLLHSPGTLHAAAKTFSPRVRRATTSRTERIWPGGVIPYVIGGNFTGSQRAIFKQAMRHWEKHTCVTFIERTDEESFIVFSYRTCGCCSYVGRRGGGPQAISIGKNCDKFGIVAHELGHVVGFWHEHTRPDRDQHVTIIRENIQPGQEYNFLKMEAGEVSSLGETYDFDSIMHYARNTFSRGVFLDTILPRQDDNGVRPTIGQRVRLSQGDIAQARKLYKCPACGETLQDTTGNFSAPGFPNGYPSYSHCVWRISVTPGEKIVLNFTSMDLFKSRLCWYDYVEVRDGYWRKAPLLGRFCGDKIPEPLVSTDSRLWVEFRSSSNILGKGFFAAYEATCGGDMNKDAGQIQSPNYPDDYRPSKECVWRITVSEGFHVGLTFQAFEIERHDSCAYDYLEVRDGPTEESALIGHFCGYEKPEDVKSSSNRLWMKFVSDGSINKAGFAANFF

SEQ ID NO: 6210 - DNA, 2834 bp, Homo sapiens
atgagggtgctttgtgccttccctgaagccatgccctccagcaactcccgcccccccgcgtgcctagccccgggggctctctacttggctctgttgctccatctctccctttcctcccaggctggagacaggagacccttgcctgtagacagagctgcaggtttgaaggaaaagaccctgattctacttgatgtgagcaccaagaacccagtcaggacagtcaatgagaacttcctctctctgcagctggatccgtccatcattcatgatggctggctcgatttcctaagctccaagcgcttggtgaccctggcccggggactttcgcccgcctttctgcgcttcgggggcaaaaggaccgacttcctgcagttccagaacctgaggaacccggcgaaaagccgcgggggcccgggcccggattactatctcaaaaactatgaggatgacattgttcgaagtgatgttgccttagataaacagaaaggctgcaagattgcccagcaccctgatgttatgctggagctccaaagggagaaggcagctcagatgcatctggttcttctaaaggagcaattctccaatacttacagtaatctcatattaacagccaggtctctagacaaactttataactttgctgattgctctggactccacctgatatttgctctaaatgcactgcgtcgtaatcccaataactcctggaacagttctagtgccctgagtctgttgaagtacagcgccagcaaaaagtacaacatttcttgggaactgggtaatgagccaaataactatcggaccatgcatggccgggcagtaaatggcagccagttgggaaaggattacatccagctgaagagcctgttgcagcccatccggatttattccagagccagcttatatggccctaatattgggcggccgaggaagaatgtcatcgccctcctagatggattcatgaaggtggcaggaagtacagtagatgcagttacctggcaacattgctacattgatggccgggtggtcaaggtgatggacttcctgaaaactcgcctgttagacacactctctgaccagattaggaaaattcagaaagtggttaatacatacactccaggaaagaagatttggcttgaaggtgtggtgaccacctcagctggaggcacaaacaatctatccgattcctatgctgcaggattcttatggttgaacactttaggaatgctggccaatcagggcattgatgtcgtgatacggcactcattttttgaccatggatacaatcacctcgtggaccagaattttaacccattaccagactactggctctctctcctctacaagcgcctgatcggccccaaagtcttggctgtgcatgtggctgggctccagcggaagccacggcctggccgagtgatccgggacaaactaaggatttatgctcactgcacaaaccaccacaaccacaactacgttcgtgggtccattacactttttatcatcaacttgcatcgatcaagaaagaaaatcaagctggctgggactctcagagacaagctggttcaccagtacctgctgcagccctatgggcaggagggcctaaagtccaaaacccaaagatgtcaatactgtgggatcatctgaatctaaaagggcattacctaattcttcagaagaaaggtcagtgcaactgaatggccagcccttagtgatggtggacgacgggaccctcccagaattgaagccccgcccccttcgggccggccggacattggtcatccctccagtcaccatgggcttttatgtggtcaagaatgtcaatgctttggcctgccgctaccgataagctatcctcacactcacggctaccagtgggcctgctgggctgcttccactcctccactccagtagtatcctctgttttcagacatcctagcaaccagcccctgctgccccatcctgctggaatcaacacagacttgctctccaaagagactaaatgtcatagcgtgatcttagcctaggtaggccacatccatcccaaaggaaaatgtagacatcacctgtacctatataaggataaaggcatgtgtatagagcagaatgtttcccttcatgtgcactatgaaaacgagctgacagcacactcccaggagaaatgtttccagacaactccccatgatcctgtcacacagcattataaccacaaatccaaaccttagcctgctgctgctgctgccctcagaggaagatgaggaaggaaaaaaactgggtggacctacaaaaacccatcctctcccaactccttcttctctgcctctttcttgctgctgccctgagttttttgacacatctctttccataggggagtaatgggtgtgtcagccctggcctgctgggagagctgtttgtatgatttcccggctgatgtatgagcgtgcgcatctgggttcctgacagtggcatccatcactggcagttcttctgggaagcgggtgcttcaaaagtaaaattacaatcacactccagatttggtaagaaggttctattcctctgtgaatccagattcccccagagttgtaatgggagtcaagtaacaatattcattgagtggagagcagtttattaggcacaacaaaaagtagtcatcattcttcatgttgctatgagggagagtttgagtacaaagagaaagcatactgaaacatcaggtacacacacacaccccaactggacaaagcaaattagacctctccaaaattaagagaatattaggggctctatagggtaagcccttaattgtttggttaactcaaatcattatttttaaa

SEQ ID NO: 6211 - protein, 548 aa, Homo sapiens
MRVLCAFPEAMPSSNSRPPACLAPGALYLALLLHLSLSSQAGDRRPLPVDRAAGLKEKTLILLDVSTKNPVRTVNENFLSLQLDPSIIHDGWLDFLSSKRLVTLARGLSPAFLRFGGKRTDFLQFQNLRNPAKSRGGPGPDYYLKNYEDDIVRSDVALDKQKGCKIAQHPDVMLELQREKAAQMHLVLLKEQFSNTYSNLILTARSLDKLYNFADCSGLHLIFALNALRRNPNNSWNSSSALSLLKYSASKKYNISWELGNEPNNYRTMHGRAVNGSQLGKDYIQLKSLLQPIRIYSRASLYGPNIGRPRKNVIALLDGFMKVAGSTVDAVTWQHCYIDGRVVKVMDFLKTRLLDTLSDQIRKIQKVVNTYTPGKKIWLEGVVTTSAGGTNNLSDSYAAGFLWLNTLGMLANQGIDVVIRHSFFDHGYNHLVDQNFNPLPDYWLSLLYKRLIGPKVLAVHVAGLQRKPRPGRVIRDKLRIYAHCTNHHNHNYVRGSITLFIINLHRSRKKIKLAGTLRDKLVHQYLLQPYGQEGLKSKTQRCQYCGII

SEQ ID NO: 6212 - DNA, 2650 bp, Homo sapiens
aaggacaattagtcactagcgagacccagtaggaagagaggtttaaatcagagggattgaatgagggtgctttgtgccttccctgaagccatgccctccagcaactcccgcccccccgcgtgcctagccccgggggctctctacttggctctgttgctccatctctccctttcctcccaggctggagacaggagacccttgcctgtagacagagctgcaggtttgaaggaaaagaccctgattctacttgatgtgagcaccaagaacccagtcaggacagtcaatgagaacttcctctctctgcagctggatccgtccatcattcatgatggctggctcgatttcctaagctccaagcgcttggtgaccctggcccggggactttcgcccgcctttctgcgcttcgggggcaaaaggaccgacttcctgcagttccagaacctgaggaacccggcgaaaagccgcgggggcccgggcccggattactatctcaaaaactatgaggatgacattgttcgaagtgatgttgccttagataaacagaaaggctgcaagattgcccagcaccctgatgttatgctggagctccaaagggagaaggcagctcagatgcatctggttcttctaaaggagcaattctccaatacttacagtaatctcatattaacagagccaaataactatcggaccatgcatggccgggcagtaaatggcagccagttgggaaaggattacatccagctgaagagcctgttgcagcccatccggatttattccagagccagcttatatggccctaatattgggcggccgaggaagaatgtcatcgccctcctagatggattcatgaaggtggcaggaagtacagtagatgcagttacctggcaacattgctacattgatggccgggtggtcaaggtgatggacttcctgaaaactcgcctgttagacacactctctgaccagattaggaaaattcagaaagtggttaatacatacactccaggaaagaagatttggcttgaaggtgtggtgaccacctcagctggaggcacaaacaatctatccgattcctatgctgcaggattcttatggttgaacactttaggaatgctggccaatcagggcattgatgtcgtgatacggcactcattttttgaccatggatacaatcacctcgtggaccagaattttaacccattaccagactactggctctctctcctctacaagcgcctgatcggccccaaagtcttggctgtgcatgtggctgggctccagcggaagccacggcctggccgagtgatccgggacaaactaaggatttatgctcactgcacaaaccaccacaaccacaactacgttcgtgggtccattacactttttatcatcaacttgcatcgatcaagaaagaaaatcaagctggctgggactctcagagacaagctggttcaccagtacctgctgcagccctatgggcaggagggcctaaagtccaagtcagtgcaactgaatggccagcccttagtgatggtggacgacgggaccctcccagaattgaagccccgcccccttcgggccggccggacattggtcatccctccagtcaccatgggcttttatgtggtcaagaatgtcaatgctttggcctgccgctaccgataagctatcctcacactcacggctaccagtgggcctgctgggctgcttccactcctccactccagtagtatcctctgttttcagacatcctagcaaccagcccctgctgccccatcctgctggaatcaacacagacttgctctccaaagagactaaatgtcatagcgtgatcttagcctaggtaggccacatccatcccaaaggaaaatgtagacatcacctgtacctatataaggataaaggcatgtgtatagagcagaatgtttcccttcatgtgcactatgaaaacgagctgacagcacactcccaggagaaatgtttccagacaactccccatgatcctgtcacacagcattataaccacaaatccaaaccttagcctgctgctgctgctgccctcagaggaagatgaggaaggaaaaaaactgggtggacctacaaaaacccatcctctcccaactccttcttctctgcctctttcttgctgctgccctgagttttttgacacatctctttccataggggagtaatgggtgtgtcagccctggcctgctgggagagctgtttgtatgatttcccggctgatgtatgagcgtgcgcatctgggttcctgacagtggcatccatcactggcagttcttctgggaagcgggtgcttcaaaagtaaaattacaatcacactccagatttggtaagaaggttctattcctctgtgaatccagattcccccagagttgtaatgggagtcaagtaacaatattcattgagtggagagcagtttattaggcacaacaaaaagtagtcatcattcttcatgttgctatgagggagagtttgagtacaaagagaaagcatactgaaacatcaggtacacacacacaccccaactggacaaagcaaattagacctctccaaaattaagagaatattaggggctctatagggtaagcccttaattgtttggttaactcaaatcattatttttaaa

SEQ ID NO: 6213 - protein, 534 aa, Homo sapiens
MRVLCAFPEAMPSSNSRPPACLAPGALYLALLLHLSLSSQAGDRRPLPVDRAAGLKEKTLILLDVSTKNPVRTVNENFLSLQLDPSIIHDGWLDFLSSKRLVTLARGLSPAFLRFGGKRTDFLQFQNLRNPAKSRGGPGPDYYLKNYEDDIVRSDVALDKQKGCKIAQHPDVMLELQREKAAQMHLVLLKEQFSNTYSNLILTEPNNYRTMHGRAVNGSQLGKDYIQLKSLLQPIRIYSRASLYGPNIGRPRKNVIALLDGFMKVAGSTVDAVTWQHCYIDGRVVKVMDFLKTRLLDTLSDQIRKIQKVVNTYTPGKKIWLEGVVTTSAGGTNNLSDSYAAGFLWLNTLGMLANQGIDVVIRHSFFDHGYNHLVDQNFNPLPDYWLSLLYKRLIGPKVLAVHVAGLQRKPRPGRVIRDKLRIYAHCTNHHNHNYVRGSITLFIINLHRSRKKIKLAGTLRDKLVHQYLLQPYGQEGLKSKSVQLNGQPLVMVDDGTLPELKPRPLRAGRTLVIPPVTMGFYVVKNVNALACRYR

SEQ ID NO: 6214 - DNA, 2824 bp, Homo sapiens
aaggacaattagtcactagcgagacccagtaggaagagaggtttaaatcagagggattgaatgagggtgctttgtgccttccctgaagccatgccctccagcaactcccgcccccccgcgtgcctagccccgggggctctctacttggctctgttgctccatctctccctttcctcccaggctggagacaggagacccttgcctgtagacagagctgcaggtttgaaggaaaagaccctgattctacttgatgtgagcaccaagaacccagtcaggacagtcaatgagaacttcctctctctgcagctggatccgtccatcattcatgatggctggctcgatttcctaagctccaagcgcttggtgaccctggcccggggactttcgcccgcctttctgcgcttcgggggcaaaaggaccgacttcctgcagttccagaacctgaggaacccggcgaaaagccgcgggggcccgggcccggattactatctcaaaaactatgaggatgacattgttcgaagtgatgttgccttagataaacagaaaggctgcaagattgcccagcaccctgatgttatgctggagctccaaagggagaaggcagctcagatgcatctggttcttctaaaggagcaattctccaatacttacagtaatctcatattaacagccaggtctctagacaaactttataactttgctgattgctctggactccacctgatatttgctctaaatgcactgcgtcgtaatcccaataactcctggaacagttctagtgccctgagtctgttgaagtacagcgccagcaaaaagtacaacatttcttgggaactgggtaatgagccaaataactatcggaccatgcatggccgggcagtaaatggcagccagttgggaaaggattacatccagctgaagagcctgttgcagcccatccggatttattccagagccagcttatatggccctaatattgggcggccgaggaagaatgtcatcgccctcctagatggattcatgaaggtggcaggaagtacagtagatgcagttacctggcaacattgctacattgatggccgggtggtcaaggtgatggacttcctgaaaactcgcctgttagacacactctctgaccagattaggaaaattcagaaagtggttaatacatacactccaggaaagaagatttggcttgaaggtgtggtgaccacctcagctggaggcacaaacaatctatccgattcctatgctgcaggattcttatggttgaacactttaggaatgctggccaatcagggcattgatgtcgtgatacggcactcattttttgaccatggatacaatcacctcgtggaccagaattttaacccattaccagactactggctctctctcctctacaagcgcctgatcggccccaaagtcttggctgtgcatgtggctgggctccagcggaagccacggcctggccgagtgatccgggacaaactaaggatttatgctcactgcacaaaccaccacaaccacaactacgttcgtgggtccattacactttttatcatcaacttgcatcgatcaagaaagaaaatcaagctggctgggactctcagagacaagctggttcaccagtacctgctgcagccctatgggcaggagggcctaaagtccaagtcagtgcaactgaatggccagcccttagtgatggtggacgacgggaccctcccagaattgaagccccgcccccttcgggccggccggacattggtcatccctccagtcaccatgggcttttatgtggtcaagaatgtcaatgctttggcctgccgctaccgataagctatcctcacactcacggctaccagtgggcctgctgggctgcttccactcctccactccagtagtatcctctgttttcagacatcctagcaaccagcccctgctgccccatcctgctggaatcaacacagacttgctctccaaagagactaaatgtcatagcgtgatcttagcctaggtaggccacatccatcccaaaggaaaatgtagacatcacctgtacctatataaggataaaggcatgtgtatagagcagaatgtttcccttcatgtgcactatgaaaacgagctgacagcacactcccaggagaaatgtttccagacaactccccatgatcctgtcacacagcattataaccacaaatccaaaccttagcctgctgctgctgctgccctcagaggaagatgaggaaggaaaaaaactgggtggacctacaaaaacccatcctctcccaactccttcttctctgcctctttcttgctgctgccctgagttttttgacacatctctttccataggggagtaatgggtgtgtcagccctggcctgctgggagagctgtttgtatgatttcccggctgatgtatgagcgtgcgcatctgggttcctgacagtggcatccatcactggcagttcttctgggaagcgggtgcttcaaaagtaaaattacaatcacactccagatttggtaagaaggttctattcctctgtgaatccagattcccccagagttgtaatgggagtcaagtaacaatattcattgagtggagagcagtttattaggcacaacaaaaagtagtcatcattcttcatgttgctatgagggagagtttgagtacaaagagaaagcatactgaaacatcaggtacacacacacaccccaactggacaaagcaaattagacctctccaaaattaagagaatattaggggctctatagggtaagcccttaattgtttggttaactcaaatcattatttttaaa

SEQ ID NO: 6215 - protein, 592 aa, Homo sapiens
MRVLCAFPEAMPSSNSRPPACLAPGALYLALLLHLSLSSQAGDRRPLPVDRAAGLKEKTLILLDVSTKNPVRTVNENFLSLQLDPSIIHDGWLDFLSSKRLVTLARGLSPAFLRFGGKRTDFLQFQNLRNPAKSRGGPGPDYYLKNYEDDIVRSDVALDKQKGCKIAQHPDVMLELQREKAAQMHLVLLKEQFSNTYSNLILTARSLDKLYNFADCSGLHLIFALNALRRNPNNSWNSSSALSLLKYSASKKYNISWELGNEPNNYRTMHGRAVNGSQLGKDYIQLKSLLQPIRIYSRASLYGPNIGRPRKNVIALLDGFMKVAGSTVDAVTWQHCYIDGRVVKVMDFLKTRLLDTLSDQIRKIQKVVNTYTPGKKIWLEGVVTTSAGGTNNLSDSYAAGFLWLNTLGMLANQGIDVVIRHSFFDHGYNHLVDQNFNPLPDYWLSLLYKRLIGPKVLAVHVAGLQRKPRPGRVIRDKLRIYAHCTNHHNHNYVRGSITLFIINLHRSRKKIKLAGTLRDKLVHQYLLQPYGQEGLKSKSVQLNGQPLVMVDDGTLPELKPRPLRAGRTLVIPPVTMGFYVVKNVNALACRYR

SEQ ID NO: 6216 - DNA, 2488 bp, Homo sapiens
aaggacaattagtcactagcgagacccagtaggaagagaggtttaaatcagagggattgaatgagggtgctttgtgccttccctgaagccatgccctccagcaactcccgcccccccgcgtgcctagccccgggggctctctacttggctctgttgctccatctctccctttcctcccaggctggagacaggagacccttgcctgtagacagagctgcaggtttgaaggaaaagaccctgattctacttgatgtgagcaccaagaacccagtcaggacagtcaatgagaacttcctctctctgcagctggatccgtccatcattcatgatggctggctcgatttcctaagctccaagcgcttggtgaccctggcccggggactttcgcccgcctttctgcgcttcgggggcaaaaggaccgacttcctgcagttccagaacctgaggaacccggcgaaaagccgcgggggcccgggcccggattactatctcaaaaactatgaggatgagccaaataactatcggaccatgcatggccgggcagtaaatggcagccagttgggaaaggattacatccagctgaagagcctgttgcagcccatccggatttattccagagccagcttatatggccctaatattgggcggccgaggaagaatgtcatcgccctcctagatggattcatgaaggtggcaggaagtacagtagatgcagttacctggcaacattgctacattgatggccgggtggtcaaggtgatggacttcctgaaaactcgcctgttagacacactctctgaccagattaggaaaattcagaaagtggttaatacatacactccaggaaagaagatttggcttgaaggtgtggtgaccacctcagctggaggcacaaacaatctatccgattcctatgctgcaggattcttatggttgaacactttaggaatgctggccaatcagggcattgatgtcgtgatacggcactcattttttgaccatggatacaatcacctcgtggaccagaattttaacccattaccagactactggctctctctcctctacaagcgcctgatcggccccaaagtcttggctgtgcatgtggctgggctccagcggaagccacggcctggccgagtgatccgggacaaactaaggatttatgctcactgcacaaaccaccacaaccacaactacgttcgtgggtccattacactttttatcatcaacttgcatcgatcaagaaagaaaatcaagctggctgggactctcagagacaagctggttcaccagtacctgctgcagccctatgggcaggagggcctaaagtccaagtcagtgcaactgaatggccagcccttagtgatggtggacgacgggaccctcccagaattgaagccccgcccccttcgggccggccggacattggtcatccctccagtcaccatgggcttttatgtggtcaagaatgtcaatgctttggcctgccgctaccgataagctatcctcacactcacggctaccagtgggcctgctgggctgcttccactcctccactccagtagtatcctctgttttcagacatcctagcaaccagcccctgctgccccatcctgctggaatcaacacagacttgctctccaaagagactaaatgtcatagcgtgatcttagcctaggtaggccacatccatcccaaaggaaaatgtagacatcacctgtacctatataaggataaaggcatgtgtatagagcagaatgtttcccttcatgtgcactatgaaaacgagctgacagcacactcccaggagaaatgtttccagacaactccccatgatcctgtcacacagcattataaccacaaatccaaaccttagcctgctgctgctgctgccctcagaggaagatgaggaaggaaaaaaactgggtggacctacaaaaacccatcctctcccaactccttcttctctgcctctttcttgctgctgccctgagttttttgacacatctctttccataggggagtaatgggtgtgtcagccctggcctgctgggagagctgtttgtatgatttcccggctgatgtatgagcgtgcgcatctgggttcctgacagtggcatccatcactggcagttcttctgggaagcgggtgcttcaaaagtaaaattacaatcacactccagatttggtaagaaggttctattcctctgtgaatccagattcccccagagttgtaatgggagtcaagtaacaatattcattgagtggagagcagtttattaggcacaacaaaaagtagtcatcattcttcatgttgctatgagggagagtttgagtacaaagagaaagcatactgaaacatcaggtacacacacacaccccaactggacaaagcaaattagacctctccaaaattaagagaatattaggggctctatagggtaagcccttaattgtttggttaactcaaatcattatttttaaa

SEQ ID NO: 6217 - protein, 480 aa, Homo sapiens
MRVLCAFPEAMPSSNSRPPACLAPGALYLALLLHLSLSSQAGDRRPLPVDRAAGLKEKTLILLDVSTKNPVRTVNENFLSLQLDPSIIHDGWLDFLSSKRLVTLARGLSPAFLRFGGKRTDFLQFQNLRNPAKSRGGPGPDYYLKNYEDEPNNYRTMHGRAVNGSQLGKDYIQLKSLLQPIRIYSRASLYGPNIGRPRKNVIALLDGFMKVAGSTVDAVTWQHCYIDGRVVKVMDFLKTRLLDTLSDQIRKIQKVVNTYTPGKKIWLEGVVTTSAGGTNNLSDSYAAGFLWLNTLGMLANQGIDVVIRHSFFDHGYNHLVDQNFNPLPDYWLSLLYKRLIGPKVLAVHVAGLQRKPRPGRVIRDKLRIYAHCTNHHNHNYVRGSITLFIINLHRSRKKIKLAGTLRDKLVHQYLLQPYGQEGLKSKSVQLNGQPLVMVDDGTLPELKPRPLRAGRTLVIPPVTMGFYVVKNVNALACRYR

SEQ ID NO: 6218 - DNA, 990 bp, Homo sapiens; identical to SEQ ID NO: 829

SEQ ID NO: 6219 - protein, 329 aa, Homo sapiens; identical to SEQ ID NO: 830

SEQ ID NO: 6220 - DNA, 330 bp, Homo sapiens
gacctgcgataaacggaagcgcctcctgcgagaccagaccgggggagtcctggtcgtggagctctccctgcggagcaggggattttccagtctctatagcttctcagcacacctgagtggcgcagagggggcgagatcaagaggtctccctctgaccagcccctgaactctgaagagagggaggaaccgaaggtaaatcggatgaagcagaactggacctcacttccccaagtcttagtaaagccatccccagatggcttcccttggattccaacatttacagaacaagattttcagtgatctgttcattcaacaaatatttgaattctt

SEQ ID NO: 6221 - protein, 32 aa, Homo sapiens
MKQNWTSLPQVLVKPSPDGFPWIPTFTEQDFQ

SEQ ID NO: 6222 - DNA, 3355 bp, Homo sapiens
cttactgtcagaggttactacaagtgtttgaacaggtaacttctacctttgaacttctgttgtgacagattcaaaggttccaggggagtgtgttggccactctcaggacagtacacagtagcttcgggtgtgtcccagtcagtcctaggagctgtggaaagagtagaagtgcctgaatgtggtgctgaatcaatacagccagctgtgaggggagcacttcctggacccaggaagggagagtcttcttccaaggtctgaatttcctgctgctgttcacaaagatgctttttatctttaactttttgttttccccacttccgaccccggcgttgatctgcatcctgacatttggagctgccatcttcttgtggctgatcaccagacctcaacccgtcttacctcttcttgacctgaacaatcagtctgtgggaattgagggaggagcacggaagggggtttcccagaagaacaatgacctaacaagttgctgcttctcagatgccaagactatgtatgaggttttccaaagaggactcgctgtgtctgacaatgggccctgcttgggatatagaaaaccaaaccagccctacagatggctatcttacaaacaggtgtctgatagagcagagtacctgggttcctgtctcttgcataaaggttataaatcatcaccagaccagtttgtcggcatctttgctcagaataggccagagtggatcatctccgaattggcttgttacacgtactctatggtagctgtacctctgtatgacaccttgggaccagaagccatcgtacatattgtcaacaaggctgatatcgccatggtgatctgtgacacaccccaaaaggcattggtgctgatagggaatgtagagaaaggcttcaccccgagcctgaaggtgatcatccttatggacccctttgatgatgacctgaagcaaagaggggagaagagtggaattgagatcttatccctatatgatgctgagaacctaggcaaagagcacttcagaaaacctgtgcctcctagcccagaagacctgagcgtcatctgcttcaccagtgggaccacaggtgaccccaaaggagccatgataacccatcaaaatattgtttcaaatgctgctgcctttctcaaatgtgtggagcatgcttatgagcccactcctgatgatgtggccatatcctacctccctctggctcatatgtttgagaggattgtacaggctgttgtgtacagctgtggagccagagttggattcttccaaggggatattcggttgctggctgacgacatgaagactttgaagcccacattgtttcccgcggtgcctcgactccttaacaggatctacgataaggtacaaaatgaggccaagacacccttgaagaagttcttgttgaagctggctgtttccagtaaattcaaagagcttcaaaagggtatcatcaggcatgatagtttctgggacaagctcatctttgcaaagatccaggacagcctgggcggaagggttcgtgtaattgtcactggagctgcccccatgtccacttcagtcatgacattcttccgggcagcaatgggatgtcaggtgtatgaagcttatggtcaaacagaatgcacaggtggctgtacatttacattacctggggactggacatcaggtcacgttggggtgcccctggcttgcaattacgtgaagctggaagatgtggctgacatgaactactttacagtgaataatgaaggagaggtctgcatcaagggtacaaacgtgttcaaaggatacctgaaggaccctgagaagacacaggaagccctggacagtgatggctggcttcacacaggagacattggtcgctggctcccgaatggaactctgaagatcatcgaccgtaaaaagaacattttcaagctggcccaaggagaatacattgcaccagagaagatagaaaatatctacaacaggagtcaaccagtgttacaaatttttgtacacggggagagcttacggtcatccttagtaggagtggtggttcctgacacagatgtacttccctcatttgcagccaagcttggggtgaagggctcctttgaggaactgtgccaaaaccaagttgtaagggaagccattttagaagacttgcagaaaattgggaaagaaagtggccttaaaacttttgaacaggtcaaagccatttttcttcatccagagccattttccattgaaaatgggctcttgacaccaacattgaaagcaaagcgaggagagctttccaaatactttcggacccaaattgacagcctgtatgagcacatccaggattaggataaggtacttaagtacctgccggcccactgtgcactgcttgtgagaaaatggattaaaaactattcttacatttgttttgcctttcctcctatttttttttaacctgttaaactctaaagccatagcttttgttttatattgagacatataatgtgtaaacttagttcccaaataaatcaatcctgtctttcccatcttcgatgttgctaatattaaggcttcagggctacttttatcaacatgcctgtcttcaagatcccagtttatgttctgtgtccttcctcatgatttccaaccttaatactattagtaaccacaagttcaagggtcaaagggaccctctgtgccttcttctttgttttgtgataaacataacttgccaacagtctctatgcttatttacatcttctactgttcaaactaagagatttttaaattctgaaaaactgcttacaattcatgttttctagccactccacaaaccactaaaattttagttttagcctatcactcatgtcaatcatatctatgagacaaatgtctccgatgctcttctgcgtaaattaaattgtgtactgaagggaaaagtttgatcataccaaacatttcctaaactctctagttagatatctgacttgggagtattaaaaattgggtctatgacatattgtccaaaaggaatgctgttcttaaagcattatttacagtaggaactggggagtaaatctgttccctacagtttgctgctgagctggaagctgtgggggaaggagttgacaggtgggcccagtgaacttttccagtaaatgaagcaagcactgaataaaaacctcctgaactgggaacaaagatctacaggcaagcaagatgcccacacaacaggcttattttctgtgaaggaaccaactgatctcccccacccttggattagagttcctgctctaccttacccacagataacacatgttgtttctacttgtaaatgtaaagtctttaaaataaactattacagatactta

SEQ ID NO: 6223 - protein, 683 aa, Homo sapiens; identical to SEQ ID NO: 834

SEQ ID NO: 6224 - DNA, 3411 bp, Homo sapiens
atgacaagtgctcctccagccgtgagatgagccagaggatggaatgccacaggccccacttcgtctcccagcccttcatctttcttccatgtccaaaggcggctccccagaggccaagggctcagctcttgtgttctctgagactgtggcacagctcaccctggcttccttagtaggaagcttttaagaactgctctgtagaaagaacaaaccctaatctagctccagcaaagagccaggatcatgctgaacttcctgtgagccttcgtgggggatcgaggctggagaaagtgctgcttcattctgaggtctgaatttcctgctgctgttcacaaagatgctttttatctttaactttttgttttccccacttccgaccccggcgttgatctgcatcctgacatttggagctgccatcttcttgtggctgatcaccagacctcaacccgtcttacctcttcttgacctgaacaatcagtctgtgggaattgagggaggagcacggaagggggtttcccagaagaacaatgacctaacaagttgctgcttctcagatgccaagactatgtatgaggttttccaaagaggactcgctgtgtctgacaatgggccctgcttgggatatagaaaaccaaaccagccctacagatggctatcttacaaacaggtgtctgatagagcagagtacctgggttcctgtctcttgcataaaggttataaatcatcaccagaccagtttgtcggcatctttgctcagaataggccagagtggatcatctccgaattggcttgttacacgtactctatggtagctgtacctctgtatgacaccttgggaccagaagccatcgtacatattgtcaacaaggctgatatcgccatggtgatctgtgacacaccccaaaaggcattggtgctgatagggaatgtagagaaaggcttcaccccgagcctgaaggtgatcatccttatggacccctttgatgatgacctgaagcaaagaggggagaagagtggaattgagatcttatccctatatgatgctgagaacctaggcaaagagcacttcagaaaacctgtgcctcctagcccagaagacctgagcgtcatctgcttcaccagtgggaccacaggtgaccccaaaggagccatgataacccatcaaaatattgtttcaaatgctgctgcctttctcaaatgtgtggagcatgcttatgagcccactcctgatgatgtggccatatcctacctccctctggctcatatgtttgagaggattgtacaggctgttgtgtacagctgtggagccagagttggattcttccaaggggatattcggttgctggctgacgacatgaagactttgaagcccacattgtttcccgcggtgcctcgactccttaacaggatctacgataaggtacaaaatgaggccaagacacccttgaagaagttcttgttgaagctggctgtttccagtaaattcaaagagcttcaaaagggtatcatcaggcatgatagtttctgggacaagctcatctttgcaaagatccaggacagcctgggcggaagggttcgtgtaattgtcactggagctgcccccatgtccacttcagtcatgacattcttccgggcagcaatgggatgtcaggtgtatgaagcttatggtcaaacagaatgcacaggtggctgtacatttacattacctggggactggacatcaggtcacgttggggtgcccctggcttgcaattacgtgaagctggaagatgtggctgacatgaactactttacagtgaataatgaaggagaggtctgcatcaagggtacaaacgtgttcaaaggatacctgaaggaccctgagaagacacaggaagccctggacagtgatggctggcttcacacaggagacattggtcgctggctcccgaatggaactctgaagatcatcgaccgtaaaaagaacattttcaagctggcccaaggagaatacattgcaccagagaagatagaaaatatctacaacaggagtcaaccagtgttacaaatttttgtacacggggagagcttacggtcatccttagtaggagtggtggttcctgacacagatgtacttccctcatttgcagccaagcttggggtgaagggctcctttgaggaactgtgccaaaaccaagttgtaagggaagccattttagaagacttgcagaaaattgggaaagaaagtggccttaaaacttttgaacaggtcaaagccatttttcttcatccagagccattttccattgaaaatgggctcttgacaccaacattgaaagcaaagcgaggagagctttccaaatactttcggacccaaattgacagcctgtatgagcacatccaggattaggataaggtacttaagtacctgccggcccactgtgcactgcttgtgagaaaatggattaaaaactattcttacatttgttttgcctttcctcctatttttttttaacctgttaaactctaaagccatagcttttgttttatattgagacatataatgtgtaaacttagttcccaaataaatcaatcctgtctttcccatcttcgatgttgctaatattaaggcttcagggctacttttatcaacatgcctgtcttcaagatcccagtttatgttctgtgtccttcctcatgatttccaaccttaatactattagtaaccacaagttcaagggtcaaagggaccctctgtgccttcttctttgttttgtgataaacataacttgccaacagtctctatgcttatttacatcttctactgttcaaactaagagatttttaaattctgaaaaactgcttacaattcatgttttctagccactccacaaaccactaaaattttagttttagcctatcactcatgtcaatcatatctatgagacaaatgtctccgatgctcttctgcgtaaattaaattgtgtactgaagggaaaagtttgatcataccaaacatttcctaaactctctagttagatatctgacttgggagtattaaaaattgggtctatgacatattgtccaaaaggaatgctgttcttaaagcattatttacagtaggaactggggagtaaatctgttccctacagtttgctgctgagctggaagctgtgggggaaggagttgacaggtgggcccagtgaacttttccagtaaatgaagcaagcactgaataaaaacctcctgaactgggaacaaagatctacaggcaagcaagatgcccacacaacaggcttattttctgtgaaggaaccaactgatctcccccacccttggattagagttcctgctctaccttacccacagataacacatgttgtttctacttgtaaatgtaaagtctttaaaataaactattacagatactta

SEQ ID NO: 6225 - protein, 683 aa, Homo sapiens; identical to SEQ ID NO: 834

SEQ ID NO: 6226 - DNA, 2902 bp, Homo sapiens
gatttttaagttaagttttgaggtgtgactgtatcagagggaaagaaaccatgccaattgaacgactcacagccctgtcgttcctgacttgcttattttcttggctttgccagaacttcttcagagaccaaggcaggcagctctggcgactggagagaggcggggtagaaggtgtttgtgtgggtctgagggctgaggtaccctctagccagactttcctgtcctccgaatccagcagggaacagcgtcacctctgcctctgtgaggcttctgatctgagggggcacctcaagtcattttagtttgtttgttttcatcttagttgaaagatgataggccacaggagggcagggtcaactgtgttgaggcaagctggcttttgtgtcggcccttaggggctgaggtgaaaggctttgacacggagccagggtagctttggcagcttctcccctcctggtcagaacacttccactttcagttgtgaaaaaaaaaattaaaaccaggaagtgaagtccccgagcacgttagaaagcctgacatggcctgactcgggacagctcagagcagggcagaactggggacactctgggccggccttctgcctgcatggacgctctgaagccaccctgtctctggaggaaccacgagcgagggaagaaggacagggactcgtgtggcaggaagaactcagagccgggaagcccccattcactagaagcactgagagatgcggccccctcgcagggtctgaatttcctgctgctgttcacaaagatgctttttatctttaactttttgttttccccacttccgaccccggcgttgatctgcatcctgacatttggagctgccatcttcttgtggctgatcaccagacctcaacccgtcttacctcttcttgacctgaacaatcagtctgtgggaattgagggaggagcacggaagggggtttcccagaagaacaatgacctaacaagttgctgcttctcagatgccaagactatgtatgaggttttccaaagaggactcgctgtgtctgacaatgggccctgcttgggatatagaaaaccaaaccagccctacagatggctatcttacaaacaggtgtctgatagagcagagtacctgggttcctgtctcttgcataaaggttataaatcatcaccagaccagtttgtcggcatctttgctcagaataggccagagtggatcatctccgaattggcttgttacacgtactctatggtagctgtacctctgtatgacaccttgggaccagaagccatcgtacatattgtcaacaaggctgatatcgccatggtgatctgtgacacaccccaaaaggcattggtgctgatagggaatgtagagaaaggcttcaccccgagcctgaaggtgatcatccttatggacccctttgatgatgacctgaagcaaagaggggagaagagtggaattgagatcttatccctatatgatgctgagaacctaggcaaagagcacttcagaaaacctgtgcctcctagcccagaagacctgagcgtcatctgcttcaccagtgggaccacaggtgaccccaaaggagccatgataacccatcaaaatattgtttcaaatgctgctgcctttctcaaatgtgtggagcatgcttatgagcccactcctgatgatgtggccatatcctacctccctctggctcatatgtttgagaggattgtacaggctgttgtgtacagctgtggagccagagttggattcttccaaggggatattcggttgctggctgacgacatgaagactttgaagcccacattgtttcccgcggtgcctcgactccttaacaggatctacgataaggtacaaaatgaggccaagacacccttgaagaagttcttgttgaagctggctgtttccagtaaattcaaagagcttcaaaagggtatcatcaggcatgatagtttctgggacaagctcatctttgcaaagatccaggacagcctgggcggaagggttcgtgtaattgtcactggagctgcccccatgtccacttcagtcatgacattcttccgggcagcaatgggatgtcaggtgtatgaagcttatggtcaaacagaatgcacaggtggctgtacatttacattacctggggactggacatcaggtcacgttggggtgcccctggcttgcaattacgtgaagctggaagatgtggctgacatgaactactttacagtgaataatgaaggagaggtctgcatcaagggtacaaacgtgttcaaaggatacctgaaggaccctgagaagacacaggaagccctggacagtgatggctggcttcacacaggagacattggtcgctggctcccgaatggaactctgaagatcatcgaccgtaaaaagaacattttcaagctggcccaaggagaatacattgcaccagagaagatagaaaatatctacaacaggagtcaaccagtgttacaaatttttgtacacggggagagcttacggtcatccttagtaggagtggtggttcctgacacagatgtacttccctcatttgcagccaagcttggggtgaagggctcctttgaggaactgtgccaaaaccaagttgtaagggaagccattttagaagacttgcagaaaattgggaaagaaagtggccttaaaacttttgaacaggtcaaagccatttttcttcatccagagccattttccattgaaaatgggctcttgacaccaacattgaaagcaaagcgaggagagctttccaaatactttcggacccaaattgacagcctgtatgagcacatccaggattaggataaggtacttaagtacctgccggcccactgtgcactgcttgtgagaaaatggattaaaaactattcttacattt

SEQ ID NO: 6227 - protein, 739 aa, Homo sapiens; identical to SEQ ID NO: 832

SEQ ID NO: 6228 - DNA, 3848 bp, Homo sapiens
gatttttaagttaagttttgaggtgtgactgtatcagagggaaagaaaccatgccaattgaacgactcacagccctgtcgttcctgacttgcttattttcttggctttgccagaacttcttcagagaccaaggcaggcagctctggcgactggagagaggcggggtagaaggtgtttgtgtgggtctgagggctgaggtaccctctagccagactttcctgtcctccgaatccagcagggaacagcgtcacctctgcctctgtgaggcttctgatctgagggggcacctcaagtcattttagtttgtttgttttcatcttagttgaaagatgataggccacaggagggcagggtcaactgtgttgaggcaagctggcttttgtgtcggcccttaggggctgaggtgaaaggctttgacacggagccagggtagctttggcagcttctcccctcctggtcagaacacttccactttcagttgtgaaaaaaaaaattaaaaccaggaagtgaagtccccgagcacgttagaaagcctgacatggcctgactcgggacagctcagagcagggcagaactggggacactctgggccggccttctgcctgcatggacgctctgaagccaccctgtctctggaggaaccacgagcgagggaagaaggacagggactcgtgtggcaggaagaactcagagccgggaagcccccattcactagaagcactgagagatgcggccccctcgcagggtctgaatttcctgctgctgttcacaaagatgctttttatctttaactttttgttttccccacttccgaccccggcgttgatctgcatcctgacatttggagctgccatcttcttgtggctgatcaccagacctcaacccgtcttacctcttcttgacctgaacaatcagtctgtgggaattgagggaggagcacggaagggggtttcccagaagaacaatgacctaacaagttgctgcttctcagatgccaagactatgtatgaggttttccaaagaggactcgctgtgtctgacaatgggccctgcttgggatatagaaaaccaaaccagccctacagatggctatcttacaaacaggtgtctgatagagcagagtacctgggttcctgtctcttgcataaaggttataaatcatcaccagaccagtttgtcggcatctttgctcagaataggccagagtggatcatctccgaattggcttgttacacgtactctatggtagctgtacctctgtatgacaccttgggaccagaagccatcgtacatattgtcaacaaggctgatatcgccatggtgatctgtgacacaccccaaaaggcattggtgctgatagggaatgtagagaaaggcttcaccccgagcctgaaggtgatcatccttatggacccctttgatgatgacctgaagcaaagaggggagaagagtggaattgagatcttatccctatatgatgctgagaacctaggcaaagagcacttcagaaaacctgtgcctcctagcccagaagacctgagcgtcatctgcttcaccagtgggaccacaggtgaccccaaaggagccatgataacccatcaaaatattgtttcaaatgctgctgcctttctcaaatgtgtggagcatgcttatgagcccactcctgatgatgtggccatatcctacctccctctggctcatatgtttgagaggattgtacaggctgttgtgtacagctgtggagccagagttggattcttccaaggggatattcggttgctggctgacgacatgaagactttgaagcccacattgtttcccgcggtgcctcgactccttaacaggatctacgataaggtacaaaatgaggccaagacacccttgaagaagttcttgttgaagctggctgtttccagtaaattcaaagagcttcaaaagggtatcatcaggcatgatagtttctgggacaagctcatctttgcaaagatccaggacagcctgggcggaagggttcgtgtaattgtcactggagctgcccccatgtccacttcagtcatgacattcttccgggcagcaatgggatgtcaggtgtatgaagcttatggtcaaacagaatgcacaggtggctgtacatttacattacctggggactggacatcaggtcacgttggggtgcccctggcttgcaattacgtgaagctggaagatgtggctgacatgaactactttacagtgaataatgaaggagaggtctgcatcaagggtacaaacgtgttcaaaggatacctgaaggaccctgagaagacacaggaagccctggacagtgatggctggcttcacacaggagacattggtcgctggctcccgaatggaactctgaagatcatcgaccgtaaaaagaacattttcaagctggcccaaggagaatacattgcaccagagaagatagaaaatatctacaacaggagtcaaccagtgttacaaatttttgtacacggggagagcttacggtcatccttagtaggagtggtggttcctgacacagatgtacttccctcatttgcagccaagcttggggtgaagggctcctttgaggaactgtgccaaaaccaagttgtaagggaagccattttagaagacttgcagaaaattgggaaagaaagtggccttaaaacttttgaacaggtcaaagccatttttcttcatccagagccattttccattgaaaatgggctcttgacaccaacattgaaagcaaagcgaggagagctttccaaatactttcggacccaaattgacagcctgtatgagcacatccaggattaggataaggtacttaagtacctgccggcccactgtgcactgcttgtgagaaaatggattaaaaactattcttacatttgttttgcctttcctcctatttttttttaacctgttaaactctaaagccatagcttttgttttatattgagacatataatgtgtaaacttagttcccaaataaatcaatcctgtctttcccatcttcgatgttgctaatattaaggcttcagggctacttttatcaacatgcctgtcttcaagatcccagtttatgttctgtgtccttcctcatgatttccaaccttaatactattagtaaccacaagttcaagggtcaaagggaccctctgtgccttcttctttgttttgtgataaacataacttgccaacagtctctatgcttatttacatcttctactgttcaaactaagagatttttaaattctgaaaaactgcttacaattcatgttttctagccactccacaaaccactaaaattttagttttagcctatcactcatgtcaatcatatctatgagacaaatgtctccgatgctcttctgcgtaaattaaattgtgtactgaagggaaaagtttgatcataccaaacatttcctaaactctctagttagatatctgacttgggagtattaaaaattgggtctatgacatattgtccaaaaggaatgctgttcttaaagcattatttacagtaggaactggggagtaaatctgttccctacagtttgctgctgagctggaagctgtgggggaaggagttgacaggtgggcccagtgaacttttccagtaaatgaagcaagcactgaataaaaacctcctgaactgggaacaaagatctacaggcaagcaagatgcccacacaacaggcttattttctgtgaaggaaccaactgatctcccccacccttggattagagttcctgctctaccttacccacagataacacatgttgtttctacttgtaaatgtaaagtctttaaaataaactattacagatactta

SEQ ID NO: 6229 - protein, 739 aa, Homo sapiens; identical to SEQ ID NO: 832

SEQ ID NO: 6230 - DNA, 506 bp, Homo sapiens
atagaaccagaggtcattccctctctctgctaagtacctgattgccttgcaagaaggaagaggttttaaaagttttcaaagctaacaggtgtccaaaggagattacacctgcaaatcagatttataatgtacaacctgaaacattccattgatgataaatgaacttaactgaaacagaagcacatgttcttgaactgtgccagcagattttacagtttctagaggaaccacagaattccttctgcttaagaagtcattcagataacctaaacaggttactgagactcaccatggacattggtacatgctggttaactgtattgacttggatttacaaagtctcaggtatttcttcgtaacagtgtgataacgaactaatacagacagcataacatcattgtgtggatacacattagcaagcttgaagactacaggaaataaaactggaaagaagaacggtcatgagggatacatgtgcacagagaaaaggccgtgtgaagacaaaa

SEQ ID NO: 6231 - protein, 66 aa, Homo sapiens
MNLTETEAHVLELCQQILQFLEEPQNSFCLRSHSDNLNRLLRLTMDIGTCWLTVLTWIYKVSGISS

SEQ ID NO: 6232 - DNA, 541 bp, Homo sapiens
tcatgctctgcatggttggttgaatgaatgaactaattatccatctgggtgaaaattgagacaatatgcatggccaagcacttggacaaatttcaggtggaactgagacttaaaaggaaaaaatggaaaatgcctactcaacatgaagacagtgaggatgaagacctttatgatgatccatttccacttaatgaatagcatcaaccatgagcttgttgaagaggcatttgggggtagcgaggagcagagagagaactttccaaccacactacctgcgtttttgaaaggctgacatggctcttggttctcaaatcagcctcaaaatagcctgaaaagcctggagtccactcacagaagagcagacctcctccggtatgcaccatgctgacagcaccaccttacacactcaggtgtgcaaaaaccggcgcgggggacatctcacaccttatgtagatcaaatgctccttccctgatcctctgtagggaacttccttttctctaatcctagatcttttcaaaaattctaaccaaaataaaattt

SEQ ID NO: 6233 - protein, 49 aa, Homo sapiens
MKTVRMKTFMMIHFHLMNSINHELVEEAFGGSEEQRENFPTTLPAFLKG

SEQ ID NO: 6234 - DNA, 3613 bp, Homo sapiens
gtgccttgtagcgtgtggatccggagccgattcccagaacacgaaggggggaaaaaacgcttctaatgatccctcagaacttgcatattttcatacgcttttctggggggaggcactaattggggcgcttttcctttgcgaacttacttatcttaaagtcggagcggaaaataaagcacgcacgcaacccaatttccggagaaccgagattgcgacgaacaaccaggaagcggctgggttgagagctgtccccggttctccgttctgctctcgggggcaccttccggggttcctaagccgcggggcccctcgctgcccctcgaggccctttccctgacctaggctttggcctgggctactcgttccggagccgccatgtcgtccgacttcgaaggttacgagcaggacttcgcggtgctcactgcagagatcaccagcaagattgcgagggtcccacgactcccgcctgatgaaaagaaacagatggttgcaaatgtggagaaacagcttgaagaagcgaaagaactgcttgaacagatggatttggaagtccgagagataccaccccaaagtcgagggatgtacagcaacagaatgagaagctacaaacaagaaatgggaaaactcgaaacagattttaaaaggtcacggatcgcctacagtgacgaagtacggaatgagctcctgggggatgatgggaattcctcagagaaccagagggcacatctgctcgataacacagagaggctggaaaggtcatctcggagactagaggctggataccaaatagcagtggaaaccgagcaaattggtcaggagatgttggaaaaccttagtcatgacagagaaaagatacagcgagcacgtgaaagacttcgggaaacagatgctaatttgggaaaaagctccaggattctgacagggatgttgcgaagaatcatccagaaccgcatcctgctcgtcatcctagggatcatcgtggtcatcaccatcctgatggcgatcactttttctgtcagaagacactgatgtatctgctctcccttgataaacagcaacaacagcttgttctgagtaattaagacaaaatggtcacatgaatcattctgttgcgctgacaggccccaggtgaccctctctctccctcaccgccgttgggctgaagtgcaaagagtgtaaaaatattttctattcctgtttgcatgtgggttggtttccttttcgaggtttgtcttcacccagattcgttttttagaggggaaggtgaatgtttatttacctttttgctaatgtcatcaactagccaaaatagccccagtgacactcctagccctctggacgtgtcaagggccgtggtttgggagaggacatgatgagtcagtcacgagagcttctgtttgtcacccgcctcttgttgctgaaaagctcttctgtgatgtctgaggataaaaatgcagcaaaaagcaggggatggagtcagtgaccccgtccagcaagccagccctgttcctacacaggcctcatgaatatagtcatcaacctgcctgagtgctttcattgtaaaggtcggtatttaatgtcggttgtacaggaaattgacttagcactttccctgtttttctattgcataattttttttttaacccaaagatattttttttgctgagcctgcccagtattcactgttcacaactttgattactggctacaagaaatattttcttgccttccccaaatcccatactccccagaatctgctggcaaagtgagccctggtacaggatttaattgtgacctcgtcttccctgacctgtgtaagcatctctgtatcctttcggttttaatatctgcactgccaaaagcagtcctcatacttgcaaaaggtctgacaaggttctctccacatacattccagtatgtaaagagaccatgaatatttcagtaagagcaagaacatgactccatcagtgtgaaatttcaaatgtgattataaatatgggagagtcctataggagggtccaccagagataaacttcacggaaaacgttccctaacctcctttaaaagaatagaggatggcagattgttccaaaaggaatggcttgggtttttaactaacaaatgttagcaagcctttcttgaattcactatgtattcaaacttctaatatgctttgtgatttttttctttcatttctttctgtctgaggtaaccaggaattgcgttcaaaatgagctcatttgtgatcaggcttaaaagttgcccaagctgaggtcgtttccccccagtcacaaagcagaatgtttttctcaagacttcataggcacttactggtccgtactatctttggaatataattagaagctttgaatccttgaaaagcaaacctgttctcttcatcaaaaatgctaaccacctgtgcccgtggatcaatatcacctggatgtagtgcttgatatttttcccaactcagaagaaaaccattatggtttagagaggaaatgcagaatggcagaatccaccagagaaattgcacttatcgaaacaggccaaggcctgcatgtgttcggataaatcatttagtattgtgtaaataaagctgcagcctttacttcggagggatggtgtgggattttggccgagggaagcaggacagagaaggagcaggaagctatgctaattttcctgtcagcttaagggatccgtctcagcaagaatcttgtattctgataacggaatgctgtacgtgctgaccacatctaagaaccattaaaaagcaaggaaacaaacaaacaacccttttctcattccgacacacgaatagtcatcgagtattacaccagcccctctggtggcttccttcaaaactgttgatcttagctaaagtgtataaccagttaccagctgcacttcgcacggccatcccgtccacaatgcagcagactcttcccaaggccacctagcaagcaaggttgatcggatcatctaaactggccgcctcctgaatatttcactgaatcctggcgttcatgttgaagcagacaaaatgagaaaggaggagggcattgctcacctctcaatagcttttttcgttcaagttctatgtctttatcagctcttgcctgtgattttaccccaattcaaccttgggagtgggaagaatatgaacagataacccttggcctaacagctccatcaaacctccttgagagcaactacctaggccaggctagtgagtgctttgtgaggaagctggtcagaaggttccctcaactccttcctggtcctcctggacactgcagaaaagacttaggggatccccagcagaggccaattgctctccttccttccctgccccaccaggaaaggaataacgtccacagacttgaagcagatagtgaagtagatctgtgagaggttctaggtacttagtgtgtagactttgacgaatatttctcaagttgggagcccttgttaaaaatgatgtttaagggagtggttggggggaagatgaaggcatggaggaggaagaagagaaggaagcccttgccatataaaattcatgcagactaaacagtttccctgacagaataaataaagtggatgctacccc

SEQ ID NO: 6235 - protein, 217 aa, Homo sapiens
MSSDFEGYEQDFAVLTAEITSKIARVPRLPPDEKKQMVANVEKQLEEAKELLEQMDLEVREIPPQSRGMYSNRMRSYKQEMGKLETDFKRSRIAYSDEVRNELLGDDGNSSENQRAHLLDNTERLERSSRRLEAGYQIAVETEQIGQEMLENLSHDREKIQRARERLRETDANLGKSSRILTGMLRRIIQNRILLVILGIIVVITILMAITFSVRRH

SEQ ID NO: 6236 - DNA, 4388 bp, Homo sapiens
gtgccttgtagcgtgtggatccggagccgattcccagaacacgaaggggggaaaaaacgcttctaatgatccctcagaacttgcatattttcatacgcttttctggggggaggcactaattggggcgcttttcctttgcgaacttacttatcttaaagtcggagcggaaaataaagcacgcacgcaacccaatttccggagaaccgagattgcgacgaacaaccaggaagcggctgggttgagagctgtccccggttctccgttctgctctcgggggcaccttccggggttcctaagccgcggggcccctcgctgcccctcgaggccctttccctgacctaggctttggcctgggctactcgttccggagccgccatgtcgtccgacttcgaaggttacgagcaggacttcgcggtgctcactgcagagatcaccagcaagattgcgagggtcccacgactcccgcctgatgaaaagaaacagatggttgcaaatgtggagaaacagcttgaagaagcgaaagaactgcttgaacagatggatttggaagtccgagagataccaccccaaagtcgagggatgtacagcaacagaatgagaagctacaaacaagaaatgggaaaactcgaaacagattttaaaaggtcacggatcgcctacagtgacgaagtacggaatgagctcctgggggatgatgggaattcctcagagaaccagagggcacatctgctcgataacacagagaggctggaaaggtcatctcggagactagaggctggataccaaatagcagtggaaaccgagcaaattggtcaggagatgttggaaaaccttagtcatgacagagaaaagatacagcgagcacgtgaaagacttcgggaaacagatgctaatttgggaaaaagctccaggattctgacagggatgttgcgaagaatcatccagaaccgcatcctgctcgtcatcctagggatcatcgtggtcatcaccatcctgatggcgatcactttttctgtcagaagacactgatgtatctgctctcccttgataaacagcaacaacagcttgttctgagtaattaagacaaaatggtcacatgaatcattctgttgcgctgacaggccccaggtgaccctctctctccctcaccgccgttgggctgaagtgcaaagagtgtaaaaatattttctattcctgtttgcatgtgggttggtttccttttcgaggtttgtcttcacccagattcgttttttagaggggaaggtgaatgtttatttacctttttgctaatgtcatcaactagccaaaatagccccagtgacactcctagccctctggacgtgtcaagggccgtggtttgggagaggacatgatgagtcagtcacgagagcttctgtttgtcacccgcctcttgttgctgaaaagctcttctgtgatgtctgaggataaaaatgcagcaaaaagcaggggatggagtcagtgaccccgtccagcaagccagccctgttcctacacaggcctcatgaatatagtcatcaacctgcctgagtgctttcattgtaaaggtcggtatttaatgtcggttgtacaggaaattgacttagcactttccctgtttttctattgcataattttttttttaacccaaagatattttttttgctgagcctgcccagtattcactgttcacaactttgattactggctacaagaaatattttcttgccttccccaaatcccatactccccagaatctgctggcaaagtgagccctggtacaggatttaattgtgacctcgtcttccctgacctgtgtaagcatctctgtatcctttcggttttaatatctgcactgccaaaagcagtcctcatacttgcaaaaggtctgacaaggttctctccacatacattccagtatgtaaagagaccatgaatatttcagtaagagcaagaacatgactccatcagtgtgaaatttcaaatgtgattataaatatgggagagtcctataggagggtccaccagagataaacttcacggaaaacgttccctaacctcctttaaaagaatagaggatggcagattgttccaaaaggaatggcttgggtttttaactaacaaatgttagcaagcctttcttgaattcactatgtattcaaacttctaatatgctttgtgatttttttctttcatttctttctgtctgaggtaaccaggaattgcgttcaaaatgagctcatttgtgatcaggcttaaaagttgcccaagctgaggtcgtttccccccagtcacaaagcagaatgtttttctcaagacttcataggcacttactggtccgtactatctttggaatataattagaagctttgaatccttgaaaagcaaacctgttctcttcatcaaaaatgctaaccacctgtgcccgtggatcaatatcacctggatgtagtgcttgatatttttcccaactcagaagaaaaccattatggtttagagaggaaatgcagaatggcagaatccaccagagaaattgcacttatcgaaacaggccaaggcctgcatgtgttcggataaatcatttagtattgtgtaaataaagctgcagcctttacttcggagggatggtgtgggattttggccgagggaagcaggacagagaaggagcaggaagctatgctaattttcctgtcagcttaagggatccgtctcagcaagaatcttgtattctgataacggaatgctgtacgtgctgaccacatctaagaaccattaaaaagcaaggaaacaaacaaacaacccttttctcattccgacacacgaatagtcatcgagtattacaccagcccctctggtggcttccttcaaaactgttgatcttagctaaagtgtataaccagttaccagctgcacttcgcacggccatcccgtccacaatgcagcagactcttcccaaggccacctagcaagcaaggttgatcggatcatctaaactggccgcctcctgaatatttcactgaatcctggcgttcatgttgaagcagacaaaatgagaaaggaggagggcattgctcacctctcaatagcttttttcgttcaagttctatgtctttatcagctcttgcctgtgattttaccccaattcaaccttgggagtgggaagaatatgaacagataacccttggcctaacagctccatcaaacctccttgagagcaactacctaggccaggctagtgagtgctttgtgaggaagctggtcagaaggttccctcaactccttcctggtcctcctggacactgcagaaaagacttaggggatccccagcagaggccaattgctctccttccttccctgccccaccaggaaaggaataacgtccacagacttgaagcagatagtgaagtagatctgtgagaggttctaggtacttagtgtgtagactttgacgaatatttctcaagttgggagcccttgttaaaaatgatgtttaagggagtggttggggggaagatgaaggcatggaggaggaagaagagaaggaagcccttgccatataaaattcatgcagactaaacagtttccctgacagaataaataaagtggatgctaccccactccagaatcaaaagcaatttaattaaagtctcttaagttgtaaagagttttaaatgatccgtgttgaaggcgaatgcctgcaaatgcagtgggtctgacgtcagctgccgggcctgggctgggaggccatttgctattctgtttaaggcaggctggattgtcttattttggaaccagcttggtggggggtttgctttgctactgcttctgagccctgagcttcaaaggctgaaattaatggtgaacaaaattgtgcggctctggccatcccatgcggggcaagcccattgagggttatcattaagtaaagaaataaagagggggaaaaaagcctgcctgttccaaaaacctcatcagataatgacctcagtgattgggttttcattaccaaacagcatccagagattatcaacccatagaagaagggaggggaaaaaaaagaaagaaaggaaaagcaactgtctttctctccctctctttctcctttttttttgcacatcttttctttaaaactgtcagatcatttcagtatttcaaatccgaggaaaacagcctgcctgctgctgtatttgaagttgtaatggtgtcaaaaagtcacgactgactgacagccgtcagtcccagaggggctcattaaatcataaaaacttgacaaggaaataattgcgcattgccagcaacttggcgcctgtttagacgtttttattttctttcattattagtccccaccattacgttcattaacaaattgcattaaacaactgttaagggct

SEQ ID NO: 6237 - protein, 217 aa, Homo sapiens; identical to SEQ ID NO: 6235

SEQ ID NO: 6238 - DNA, 3210 bp, Homo sapiens
aaatgccagttgattcaaataaacctcagcctctcctgagaattctcttatgccctagtgtgtcagattagtccaccttgcagcacctgagactgaagctcctcccaagacagaggcgcatgtttccttccgaactctgctttcacatggaagattggctttaagatgaaggcctgcatttgcaaacagaaactatagcagacacataaaatccattgtattttcaggcattcagattggagcagaacttaagagagtgtgtggggtgatcctaaaagtctcagagcatttgactgaatcatttcaaggtgctccttcagagcctgggccacatgcattccttttctgggtcgcctgtgatattagggcaatgataatgattgaaaacgtgtctgttgagtaaacatagcctctcttccaactagacaatgtgctcatggcacattgacatgatatgtgtcatactcatggtaattgacaaaccttcatatgcttcttcccctgcccagaaagatctttctagtacctccttcaatcgagattctgtctacacgctgaacccctgtggaagtggcaccttcaggcagccctgcctttgagatgaagtaggctgctctgtttgggaagtaaggggtgccccttcctcaagggtgtttgggttaaggctggacatcaattagtgagcacacccagcaaagtccacccaggaaaaagaaaccagaaagtattgaaaacagagggatgtgagcgcaggaattggtttttgcaggagatggaagagctgagaagccatacaggggcttctgaactgaagcttctgaactagggagacgcatttgaacttgagaactgtagggaacctttccagctcagggaggggcacttggcaggaacactctttactttccaccacacgcgcccggccagggctgtctttcaaagtgccatgttctccttgtccaaggtacagccaggcaacctggccaaatccataagactcactcttccaggggggtaaattctgaatggggtgacaagttaaagctcactatttcgcctgcaatctccagtgaccatgtctgtgagctcctactacctccaaccccagaactgcccacatccttgtccttgcaagacctgcttgctcagctttttcttgagtctttaagaatgagtttctgttgcttgcagccatcaaactccaagtgatgcagggtctgatagtgggcaaggtgtgtagcctctttgagccctggattctgcatttatatactggagataccaggacatacctcatgaggcgaggggcaaggtgcttagtccatcatgtgtgtttcacaaatatttcaccctttcttccttgccctgctgaacaagtgaccttcaaaaggtaatggactgtacccacattccacaggtggccagtggcaaacatcgatggtcaagtctcctgagacctcgtgttgttcttcaagacctctctgcttttcaagcatttccttgagtcacacagatgggtgagcagtgttttatccatttcaatggaggaaaagtgaaatttctttaaaaataaaaacaaaacttgccaaaaactcatcataaggaacaaaagcaacagattctccagctgtggccctttaccaaaagctctggcccaagcttctacacagcaaagctgctacactccgtggactcctctctccatcagactgccactgattttgttttagaagcatacgtaggaagagccttggctttgagggacctgctgcctcccctgtgactctgtattggtaagcacagaagatcctcagatcctccgagaagttctcagcagacatcctcagctccaggcctcccttcttctccaccctgctcagcatgaacctagagctggaggcagctagccatgtctggctgcctccctgggtcctcatatgatactgagccaggtctccagggaacactgttcacatggacagagtctgaactcagtagtgatgctcctgagtgggttccacaggaaacacaccggctattccaaaggcctgctggccacaaagccttctaacaataataagtactagcagtatcactgctgtttattgcttcctgtcaggtgggaactaagtccattagcccaagttcagtagccctgttttacaaatgcagaaacaggcttagaacaattaagaaacttgatcaagaccacacaattattaagggatagagtcaagaatttcactcaggtctccctgactccaaagcctgtgctcttaaccactatagatgtctctaatgcttcggaggggaggccaccatgacccccacttacagtcaccagctgggccccggccgcccagagatcatgcagagtgaacagaactgatttccagcactgctgttccatggctgtgtgactttcgaccgtctcatttcccctctgtttctcagttccctcttatgaaagatggaggacactatacctgccatgcctcagtgggacaagatcatctataatgttctgcatggaagcaccatgaaaggcattaccagcttgaagaaaaccagtgtctggaatgaggcgacaccagtatgtagggagagcaatcgggaagcgataagaaggagattcactaggggtctgctgggccgcctgctgcagagaacgcctctagaatcctgcactcccgtcttccttcctgcagctcaaagctggcccaccctggagatggtaccagctggggctctccttccgggcctcagtgagggaggggaaggagccaagaatgggtcagtaaccacaggattctttgagttcacagagagtctgcctgctgtgggcctccaaagagttctgccagttcttcccaagtcagcttgggcttaaagtccttcctgcaccaactgggaaggagctggagaagctccacctgggatgggaagctcgacctgggatgggaagctcgacccgggatgggaagctcgacccaggatgggaagcctactttgtgttgaacttcctattttgtcactctctgcaggcccaatgaccagagaattttctctgccctttctggcaagattagtggcttcccctcacccactctacccccacctcctcattacagaacaaaggaacctggcttcttcccgccagtccagagagggttcctaattggctttccattaaagagaaaatagactact

SEQ ID NO: 6239 - protein, 139 aa, Homo sapiens
MEDTIPAMPQWDKIIYNVLHGSTMKGITSLKKTSVWNEATPVCRESNREAIRRRFTRGLLGRLLQRTPLESCTPVFLPAAQSWPTLEMVPAGALLPGLSEGGEGAKNGSVTTGFFEFTESLPAVGLQRVLPVLPKSAWA

SEQ ID NO: 6240 - DNA, 1243 bp, Homo sapiens
ctccgctcccagactactccgttcctccggatttcgatccccctttttctatctgtcaatcagcgccgcctttgaactgaaaagctctcagtctaacttcaactcactcaaatccgagcggcacgagcacctcctgtatcttcggcttccccccccctttgctctttatatctgacttcttgttgttgttggtgttttttttttttttaccccccttttttatttattatttttttgcacattgatcggatccttgggaacgagagaaaaaagaaacccaaactcacgcgtgcagaagatctccccccccttcccctcccctcctccctcttttcccctccccaggagaaaaagacccccaagcagaaaaaagttcaccttggactcgtctttttcttgcaatattttttgggggggcaaaactttttgggggtgattttttttggcttttcttcctccttcatttttcttccaaaattgctgctggtgggtgaaaaaaaaatgccgcagctgaacggcggtggaggggatgacctaggcgccaacgacgaactgatttccttcaaagacgagggcgaacaggaggagaagagctccgaaaactcctcggcagagagggatttagctgatgtcaaatcgtctctagtcaatgaatcagaaacgaatcaaaacagctcctccgattccgaggcggaaagacggcctccgcctcgctccgaaagtttccgagacaaatcccgggaaagtttggaagaagcggccaagaggcaagatggagggctctttaaggggccaccgtatcccggctaccccttcatcatgatccccgacctgacgagcccctacctccccaacggatcgctctcgcccaccgcccgaaccctccattttcagtccggcagcacacattactctgcgtacaaaacgattgaacaccagattgcagttcagtatctccagatgaaatggccactgcttgatgtccaggcagggagcctccagagtagacaagccctcaaggatgcccggtccccatcaccggcacacattgtcgtaagtaacctcccagagatgatggcttcctttattgagggggtgaaaaagaaaatgcttttttgatgataacaggccttatttgtcatttttttctttctttaaacacattttctttggaaatattgttgggtatagtttatatctataaggtattcattttctgctattggaccttaatgattgtaac

SEQ ID NO: 6241 - protein, 205 aa, Homo sapiens
MPQLNGGGGDDLGANDELISFKDEGEQEEKSSENSSAERDLADVKSSLVNESETNQNSSSDSEAERRPPPRSESFRDKSRESLEEAAKRQDGGLFKGPPYPGYPFIMIPDLTSPYLPNGSLSPTARTLHFQSGSTHYSAYKTIEHQIAVQYLQMKWPLLDVQAGSLQSRQALKDARSPSPAHIVVSNLPEMMASFIEGVKKKMLF

SEQ ID NO: 6242 - DNA, 3830 bp, Homo sapiens
ctccgctcccagactactccgttcctccggatttcgatccccctttttctatctgtcaatcagcgccgcctttgaactgaaaagctctcagtctaacttcaactcactcaaatccgagcggcacgagcacctcctgtatcttcggcttccccccccctttgctctttatatctgacttcttgttgttgttggtgttttttttttttttaccccccttttttatttattatttttttgcacattgatcggatccttgggaacgagagaaaaaagaaacccaaactcacgcgtgcagaagatctccccccccttcccctcccctcctccctcttttcccctccccaggagaaaaagacccccaagcagaaaaaagttcaccttggactcgtctttttcttgcaatattttttgggggggcaaaactttttgggggtgattttttttggcttttcttcctccttcatttttcttccaaaattgctgctggtgggtgaaaaaaaaatgccgcagctgaacggcggtggaggggatgacctaggcgccaacgacgaactgatttccttcaaagacgagggcgaacaggaggagaagagctccgaaaactcctcggcagagagggatttagctgatgtcaaatcgtctctagtcaatgaatcagaaacgaatcaaaacagctcctccgattccgaggcggaaagacggcctccgcctcgctccgaaagtttccgagacaaatcccgggaaagtttggaagaagcggccaagaggcaagatggagggctctttaaggggccaccgtatcccggctaccccttcatcatgatccccgacctgacgagcccctacctccccaacggatcgctctcgcccaccgcccgaaccctccattttcagtccggcagcacacattactctgcgtacaaaacgattgaacaccagattgcagttcagtatctccagatgaaatggccactgcttgatgtccaggcagggagcctccagagtagacaagccctcaaggatgcccggtccccatcaccggcacacattgtctctaacaaagtgccagtggtgcagcaccctcaccatgtccaccccctcacgcctcttatcacgtacagcaatgaacacttcacgccgggaaacccacctccacacttaccagccgacgtagaccccaaaacaggaatcccacggcctccgcaccctccagatatatccccgtattacccactatcgcctggcaccgtaggacaaatcccccatccgctaggatggttagtaccacagcaaggtcaaccagtgtacccaatcacgacaggaggattcagacacccctaccccacagctctgaccgtcaatgcttccatgtccaggttccctccccatatggtcccaccacatcatacgctacacacgacgggcattccgcatccggccatagtcacaccaacagtcaaacaggaatcgtcccagagtgatgtcggctcactccatagttcaaagcatcaggactccaaaaaggaagaagaaaagaagaagccccacataaagaaacctcttaatgcattcatgttgtatatgaaggaaatgagagcaaaggtcgtagctgagtgcacgttgaaagaaagcgcggccatcaaccagatccttgggcggaggtggcatgcactgtccagagaagagcaagcgaaatactacgagctggcccggaaggagcgacagcttcatatgcaactgtaccccggctggtccgcgcgggataactatggaaagaagaagaagaggaaaagggacaagcagccgggagagaccaatgatgcaaatactccaaagaagtgtcgggcactgttcgggcttgaccgacagactttatggtgcaaaccgtgcaggagaaaaaaaaagtgcgttcgctacatacaaggtgaaggcagctgcctcagcccaccctcttcagatggaagcttactagattcgcctcccccctccccgaacctgctaggctcccctccccgagacgccaagtcacagactgagcagacccagcctctgtcgctgtccctgaagcccgaccccctggcccacctgtccatgatgcctccgccacccgccctcctgctcgctgaggccacccacaaggcctccgccctctgtcccaacggggccctggacctgcccccagccgctttgcagcctgccgccccctcctcatcaattgcacagccgtcgacttcttccttacattcccacagctccctggccgggacccagccccagccgctgtcgctcgtcaccaagtctttagaatagctttagcgtcgtgaaccccgctgctttgtttatggttttgtttcacttttcttaatttgccccccacccccaccttgaaaggttttgttttgtactctcttaattttgtgccatgtggctacattagttgatgtttatcgagttcattggtcaatatttgacccattcttatttcaatttctccttttaaatatgtagatgagagaagaacctcatgattctaccaaaatttttatcaacagctgtttaaagtctttgtagcgtttaaaaaatatatatatatacataactgttatgtagttcggatagcttagttttaaaagactgattaaaaaacaaaaagaaaaaaaaagcaattttgaagcagccctccagaaggagttggttctgtattatttgtattaaatacgagcttgcgaaccaatcattttacatctggtttttaaaccgtaagggcaccatgaatgcagtgccgttactttttttttttttttctgtgtgaaacaactcttattgtgatgttacttgttattgtttaaatgtacagaaacaaagggtaaaaatgtgttaatataccttgttccatggtgttgttcttttggggggaggggacgctactcaacacttaatagaatcacaacgctgttgggccagtagtatttattgctttagagattgcttgtcgtacctgtatgtcgtccctttttaaatatgttttcctttttcttgaaactgtataaagtttttttcccccttagcataagcatcttatatataacaactcatttgtacaaggtttttaagtttatatataaaatgtgtatatatatttttgtttcccctttttgacttttttttttctgtatgaaacccagatgtcaccaaatggacattaatagttgcattaaggatcagtagcattaacaaaagttgctttaaaagccattatgtaaaacaagacttgaaaatgagtgagggaattttagcgacactgtctgagcagcagtgggaaccatcttcgtttcccctttgaactcccagtgggatgccctaccctgcgcccttaggacccggactgaccgtgtacaaaactttacgtgccaaaattctcagtgaatttagctttctccctctttttgatgctgtaatttttgttcatcatgttttgctgtgatgttacataggtagatttgtatgtagttttaatgtcacctataacaaaatgtgtttggtagcagattgtccagaaagcattttaaatgaagaggtataaacccttaagggccaaaattctgtatattagattactcttaaacgaaaaaccagctgccgcttttatgtacacatattacatacgagtaggcagcagactttaaaaataaaaaaaacctaggcatgttgatgttgcaaaatgctgtataaagctgaaacctgttcattcagtgccattgtagttgacatgaagcgattgtaaaactgtctccgatttttctctggtttattaaaatgctaactataac

SEQ ID NO: 6243 - protein, 602 aa, Homo sapiens
MPQLNGGGGDDLGANDELISFKDEGEQEEKSSENSSAERDLADVKSSLVNESETNQNSSSDSEAERRPPPRSESFRDKSRESLEEAAKRQDGGLFKGPPYPGYPFIMIPDLTSPYLPNGSLSPTARTLHFQSGSTHYSAYKTIEHQIAVQYLQMKWPLLDVQAGSLQSRQALKDARSPSPAHIVSNKVPVVQHPHHVHPLTPLITYSNEHFTPGNPPPHLPADVDPKTGIPRPPHPPDISPYYPLSPGTVGQIPHPLGWLVPQQGQPVYPITTGGFRHPYPTALTVNASMSRFPPHMVPPHHTLHTTGIPHPAIVTPTVKQESSQSDVGSLHSSKHQDSKKEEEKKKPHIKKPLNAFMLYMKEMRAKVVAECTLKESAAINQILGRRWHALSREEQAKYYELARKERQLHMQLYPGWSARDNYGKKKKRKRDKQPGETNDANTPKKCRALFGLDRQTLWCKPCRRKKKCVRYIQGEGSCLSPPSSDGSLLDSPPPSPNLLGSPPRDAKSQTEQTQPLSLSLKPDPLAHLSMMPPPPALLLAEATHKASALCPNGALDLPPAALQPAAPSSSIAQPSTSSLHSHSSLAGTQPQPLSLVTKSLE

SEQ ID NO: 6244 - DNA, 3998 bp, Homo sapiens
ctccgctcccagactactccgttcctccggatttcgatccccctttttctatctgtcaatcagcgccgcctttgaactgaaaagctctcagtctaacttcaactcactcaaatccgagcggcacgagcacctcctgtatcttcggcttccccccccctttgctctttatatctgacttcttgttgttgttggtgttttttttttttttaccccccttttttatttattatttttttgcacattgatcggatccttgggaacgagagaaaaaagaaacccaaactcacgcgtgcagaagatctccccccccttcccctcccctcctccctcttttcccctccccaggagaaaaagacccccaagcagaaaaaagttcaccttggactcgtctttttcttgcaatattttttgggggggcaaaactttttgggggtgattttttttggcttttcttcctccttcatttttcttccaaaattgctgctggtgggtgaaaaaaaaatgccgcagctgaacggcggtggaggggatgacctaggcgccaacgacgaactgatttccttcaaagacgagggcgaacaggaggagaagagctccgaaaactcctcggcagagagggatttagctgatgtcaaatcgtctctagtcaatgaatcagaaacgaatcaaaacagctcctccgattccgaggcggaaagacggcctccgcctcgctccgaaagtttccgagacaaatcccgggaaagtttggaagaagcggccaagaggcaagatggagggctctttaaggggccaccgtatcccggctaccccttcatcatgatccccgacctgacgagcccctacctccccaacggatcgctctcgcccaccgcccgaacctatctccagatgaaatggccactgcttgatgtccaggcagggagcctccagagtagacaagccctcaaggatgcccggtccccatcaccggcacacattgtctctaacaaagtgccagtggtgcagcaccctcaccatgtccaccccctcacgcctcttatcacgtacagcaatgaacacttcacgccgggaaacccacctccacacttaccagccgacgtagaccccaaaacaggaatcccacggcctccgcaccctccagatatatccccgtattacccactatcgcctggcaccgtaggacaaatcccccatccgctaggatggttagtaccacagcaaggtcaaccagtgtacccaatcacgacaggaggattcagacacccctaccccacagctctgaccgtcaatgcttccatgtccaggttccctccccatatggtcccaccacatcatacgctacacacgacgggcattccgcatccggccatagtcacaccaacagtcaaacaggaatcgtcccagagtgatgtcggctcactccatagttcaaagcatcaggactccaaaaaggaagaagaaaagaagaagccccacataaagaaacctcttaatgcattcatgttgtatatgaaggaaatgagagcaaaggtcgtagctgagtgcacgttgaaagaaagcgcggccatcaaccagatccttgggcggaggtggcatgcactgtccagagaagagcaagcgaaatactacgagctggcccggaaggagcgacagcttcatatgcaactgtaccccggctggtccgcgcgggataactatggaaagaagaagaagaggaaaagggacaagcagccgggagagaccaatgaacacagcgaatgtttcctaaatccttgcctttcacttcctccgattacagacctgagcgctcctaagaaatgccgagcgcgctttggccttgatcaacagaataactggtgcggcccttgcaggagaaaaaaaaagtgcgttcgctacatacaaggtgaaggcagctgcctcagcccaccctcttcagatggaagcttactagattcgcctcccccctccccgaacctgctaggctcccctccccgagacgccaagtcacagactgagcagacccagcctctgtcgctgtccctgaagcccgaccccctggcccacctgtccatgatgcctccgccacccgccctcctgctcgctgaggccacccacaaggcctccgccctctgtcccaacggggccctggacctgcccccagccgctttgcagcctgccgccccctcctcatcaattgcacagccgtcgacttcttccttacattcccacagctccctggccgggacccagccccagccgctgtcgctcgtcaccaagtctttagaatagctttagcgtcgtgaaccccgctgctttgtttatggttttgtttcacttttcttaatttgccccccacccccaccttgaaaggttttgttttgtactctcttaattttgtgccatgtggctacattagttgatgtttatcgagttcattggtcaatatttgacccattcttatttcaatttctccttttaaatatgtagatgagagaagaacctcatgattctaccaaaatttttatcaacagctgtttaaagtctttgtagcgtttaaaaaatatatatatatacataactgttatgtagttcggatagcttagttttaaaagactgattaaaaaacaaaaagaaaaaaaaagcaattttgaagcagccctccagaaggagttggttctgtattatttgtattaaatacgagcttgcgaaccaatcattttacatctggtttttaaaccgtaagggcaccatgaatgcagtgccgttactttttttttttttttctgtgtgaaacaactcttattgtgatgttacttgttattgtttaaatgtacagaaacaaagggtaaaaatgtgttaatataccttgttccatggtgttgttcttttggggggaggggacgctactcaacacttaatagaatcacaacgctgttgggccagtagtatttattgctttagagattgcttgtcgtacctgtatgtcgtccctttttaaatatgttttcctttttcttgaaactgtataaagtttttttcccccttagcataagcatcttatatataacaactcatttgtacaaggtttttaagtttatatataaaatgtgtatatatatttttgtttcccctttttgacttttttttttctgtatgaaacccagatgtcaccaaatggacattaatagttgcattaaggatcagtagcattaacaaaagttgctttaaaagccattatgtaaaacaagacttgaaaatgagtgagggaattttagcgacactgtctgagcagcagtgggaaccatcttcgtttcccctttgaactcccagtgggatgccctaccctgcgcccttaggacccggactgaccgtgtacaaaactttacgtgccaaaattctcagtgaatttagctttctccctctttttgatgctgtaatttttgttcatcatgttttgctgtgatgttacataggtagatttgtatgtagttttaatgtcacctataacaaaatgtgtttggtagcagattgtccagaaagcattttaaatgaagaggtataaacccttaagggccaaaattctgtatattagattactcttaaacgaaaaaccagctgccgcttttatgtacacatattacatacgagtaggcagcagactttaaaaataaaaaaaacctaggcatgttgatgttgcaaaatgctgtataaagctgaaacctgttcattcagtgccattgtagttgacatgaagcgattgtaaaactgtctccgatttttctctggtttattaaaatgctaactataacattttttgtgaatactttgaatgtttcctaacagttgtgatgttactgttccgttttatgctcttattccaagttcatttttaatggtttggaagccatttttgtaatgaataaatgttcatgctgtacagtatctgtagcatgccgttctggattaataaaagcaacttagtatgtgcagataaa

SEQ ID NO: 6245 - protein, 596 aa, Homo sapiens
MPQLNGGGGDDLGANDELISFKDEGEQEEKSSENSSAERDLADVKSSLVNESETNQNSSSDSEAERRPPPRSESFRDKSRESLEEAAKRQDGGLFKGPPYPGYPFIMIPDLTSPYLPNGSLSPTARTYLQMKWPLLDVQAGSLQSRQALKDARSPSPAHIVSNKVPVVQHPHHVHPLTPLITYSNEHFTPGNPPPHLPADVDPKTGIPRPPHPPDISPYYPLSPGTVGQIPHPLGWLVPQQGQPVYPITTGGFRHPYPTALTVNASMSRFPPHMVPPHHTLHTTGIPHPAIVTPTVKQESSQSDVGSLHSSKHQDSKKEEEKKKPHIKKPLNAFMLYMKEMRAKVVAECTLKESAAINQILGRRWHALSREEQAKYYELARKERQLHMQLYPGWSARDNYGKKKKRKRDKQPGETNEHSECFLNPCLSLPPITDLSAPKKCRARFGLDQQNNWCGPCRRKKKCVRYIQGEGSCLSPPSSDGSLLDSPPPSPNLLGSPPRDAKSQTEQTQPLSLSLKPDPLAHLSMMPPPPALLLAEATHKASALCPNGALDLPPAALQPAAPSSSIAQPSTSSLHSHSSLAGTQPQPLSLVTKSLE

SEQ ID NO: 6246 - DNA, 3925 bp, Homo sapiens
ctccgctcccagactactccgttcctccggatttcgatccccctttttctatctgtcaatcagcgccgcctttgaactgaaaagctctcagtctaacttcaactcactcaaatccgagcggcacgagcacctcctgtatcttcggcttccccccccctttgctctttatatctgacttcttgttgttgttggtgttttttttttttttaccccccttttttatttattatttttttgcacattgatcggatccttgggaacgagagaaaaaagaaacccaaactcacgcgtgcagaagatctccccccccttcccctcccctcctccctcttttcccctccccaggagaaaaagacccccaagcagaaaaaagttcaccttggactcgtctttttcttgcaatattttttgggggggcaaaactttttgggggtgattttttttggcttttcttcctccttcatttttcttccaaaattgctgctggtgggtgaaaaaaaaatgccgcagctgaacggcggtggaggggatgacctaggcgccaacgacgaactgatttccttcaaagacgagggcgaacaggaggagaagagctccgaaaactcctcggcagagagggatttagctgatgtcaaatcgtctctagtcaatgaatcagaaacgaatcaaaacagctcctccgattccgaggcggaaagacggcctccgcctcgctccgaaagtttccgagacaaatcccgggaaagtttggaagaagcggccaagaggcaagatggagggctctttaaggggccaccgtatcccggctaccccttcatcatgatccccgacctgacgagcccctacctccccaacggatcgctctcgcccaccgcccgaacctatctccagatgaaatggccactgcttgatgtccaggcagggagcctccagagtagacaagccctcaaggatgcccggtccccatcaccggcacacattgtctctaacaaagtgccagtggtgcagcaccctcaccatgtccaccccctcacgcctcttatcacgtacagcaatgaacacttcacgccgggaaacccacctccacacttaccagccgacgtagaccccaaaacaggaatcccacggcctccgcaccctccagatatatccccgtattacccactatcgcctggcaccgtaggacaaatcccccatccgctaggatggttagtaccacagcaaggtcaaccagtgtacccaatcacgacaggaggattcagacacccctaccccacagctctgaccgtcaatgcttccatgtccaggttccctccccatatggtcccaccacatcatacgctacacacgacgggcattccgcatccggccatagtcacaccaacagtcaaacaggaatcgtcccagagtgatgtcggctcactccatagttcaaagcatcaggactccaaaaaggaagaagaaaagaagaagccccacataaagaaacctcttaatgcattcatgttgtatatgaaggaaatgagagcaaaggtcgtagctgagtgcacgttgaaagaaagcgcggccatcaaccagatccttgggcggaggtggcatgcactgtccagagaagagcaagcgaaatactacgagctggcccggaaggagcgacagcttcatatgcaactgtaccccggctggtccgcgcgggataactatggaaagaagaagaagaggaaaagggacaagcagccgggagagaccaatgaacacagcgaatgtttcctaaatccttgcctttcacttcctccgattacaggagaaaaaaaaagtgcgttcgctacatacaaggtgaaggcagctgcctcagcccaccctcttcagatggaagcttactagattcgcctcccccctccccgaacctgctaggctcccctccccgagacgccaagtcacagactgagcagacccagcctctgtcgctgtccctgaagcccgaccccctggcccacctgtccatgatgcctccgccacccgccctcctgctcgctgaggccacccacaaggcctccgccctctgtcccaacggggccctggacctgcccccagccgctttgcagcctgccgccccctcctcatcaattgcacagccgtcgacttcttccttacattcccacagctccctggccgggacccagccccagccgctgtcgctcgtcaccaagtctttagaatagctttagcgtcgtgaaccccgctgctttgtttatggttttgtttcacttttcttaatttgccccccacccccaccttgaaaggttttgttttgtactctcttaattttgtgccatgtggctacattagttgatgtttatcgagttcattggtcaatatttgacccattcttatttcaatttctccttttaaatatgtagatgagagaagaacctcatgattctaccaaaatttttatcaacagctgtttaaagtctttgtagcgtttaaaaaatatatatatatacataactgttatgtagttcggatagcttagttttaaaagactgattaaaaaacaaaaagaaaaaaaaagcaattttgaagcagccctccagaaggagttggttctgtattatttgtattaaatacgagcttgcgaaccaatcattttacatctggtttttaaaccgtaagggcaccatgaatgcagtgccgttactttttttttttttttctgtgtgaaacaactcttattgtgatgttacttgttattgtttaaatgtacagaaacaaagggtaaaaatgtgttaatataccttgttccatggtgttgttcttttggggggaggggacgctactcaacacttaatagaatcacaacgctgttgggccagtagtatttattgctttagagattgcttgtcgtacctgtatgtcgtccctttttaaatatgttttcctttttcttgaaactgtataaagtttttttcccccttagcataagcatcttatatataacaactcatttgtacaaggtttttaagtttatatataaaatgtgtatatatatttttgtttcccctttttgacttttttttttctgtatgaaacccagatgtcaccaaatggacattaatagttgcattaaggatcagtagcattaacaaaagttgctttaaaagccattatgtaaaacaagacttgaaaatgagtgagggaattttagcgacactgtctgagcagcagtgggaaccatcttcgtttcccctttgaactcccagtgggatgccctaccctgcgcccttaggacccggactgaccgtgtacaaaactttacgtgccaaaattctcagtgaatttagctttctccctctttttgatgctgtaatttttgttcatcatgttttgctgtgatgttacataggtagatttgtatgtagttttaatgtcacctataacaaaatgtgtttggtagcagattgtccagaaagcattttaaatgaagaggtataaacccttaagggccaaaattctgtatattagattactcttaaacgaaaaaccagctgccgcttttatgtacacatattacatacgagtaggcagcagactttaaaaataaaaaaaacctaggcatgttgatgttgcaaaatgctgtataaagctgaaacctgttcattcagtgccattgtagttgacatgaagcgattgtaaaactgtctccgatttttctctggtttattaaaatgctaactataacattttttgtgaatactttgaatgtttcctaacagttgtgatgttactgttccgttttatgctcttattccaagttcatttttaatggtttggaagccatttttgtaatgaataaatgttcatgctgtacagtatctgtagcatgccgttctggattaataaaagcaacttagtatgtgcagataaa

SEQ ID NO: 6247 - protein, 459 aa, Homo sapiens
MPQLNGGGGDDLGANDELISFKDEGEQEEKSSENSSAERDLADVKSSLVNESETNQNSSSDSEAERRPPPRSESFRDKSRESLEEAAKRQDGGLFKGPPYPGYPFIMIPDLTSPYLPNGSLSPTARTYLQMKWPLLDVQAGSLQSRQALKDARSPSPAHIVSNKVPVVQHPHHVHPLTPLITYSNEHFTPGNPPPHLPADVDPKTGIPRPPHPPDISPYYPLSPGTVGQIPHPLGWLVPQQGQPVYPITTGGFRHPYPTALTVNASMSRFPPHMVPPHHTLHTTGIPHPAIVTPTVKQESSQSDVGSLHSSKHQDSKKEEEKKKPHIKKPLNAFMLYMKEMRAKVVAECTLKESAAINQILGRRWHALSREEQAKYYELARKERQLHMQLYPGWSARDNYGKKKKRKRDKQPGETNEHSECFLNPCLSLPPITGEKKSAFATYKVKAAASAHPLQMEAY

SEQ ID NO: 6248 - DNA, 937 bp, Homo sapiens
cttcccagggtgaagaaacaaacaccaccaccaaagggggagggggaaccagaacgcaaaggaaagttcttcggattcccccccctccccaccaacaaagccctgcttggacagagaggtctccccaacatcacgaggcagcaaactgaaagcaagaacgtggcgaagtgcaaacaaatccagtccacaaaaggcagaaaacaacatttgccaagcccaggaaacagataaaaaaccccaccagcccgaggggcttttcctacctcggaatcggaggagctgttttgattcgtttctgattcattgactagagacgatttgacatcagctaaatccctctctgccgaggagttttcggagctcttctcctcctgttcgccctcgtctttgaaggaaatcagttcgtcgttggcgcctaggtcatcccctccaccgccgttcagctgcggcatttttttttcacccaccagcagcaattttggaagaaaaatgaaggaggaagaaaagccaaaaaaaatcacccccaaaaagttttgcccccccaaaaaatattgcaagaaaaagacgagtccaaggtgaacttttttctgcttgggggtctttttctcctggggaggggaaaagagggaggaggggaggggaaggggggggagatcttctgcacgcgtgagtttgggtttcttttttctctcgttcccaaggatccgatcaatgtgcaaaaaaataataaataaaaaaggggggtaaaaaaaaaaaaaacaccaacaacaacaagaagtcagatataaagagcaaagggggggggaagccgaagatacaggaggtgctcgtgccgctcggatttgagtgagttgaagttagactgagagcttttcagttcaaaggcggcgctgattgacagatagaaaaagggggatcgaaatccggaggaacggag

SEQ ID NO: 6249 - protein, 97 aa, Homo sapiens
RNKHHHQRGRGNQNAKESSSDSPPSPPTKPCLDREVSPTSRGSKLKARTWRSANKSSPQKAENNICQAQETDKKPHQPEGLFLPRNRRSCFDSFLIH

SEQ ID NO: 6250 - DNA, 560 bp, Homo sapiens
aatggtggctcacgcctgtaatcccagcactttgggaggctgaggcgggcggatcacgaggtcaagagatcgagaccatcctggctaatactgtgaaaccccgtctctactaaaaatacaaaaaattagccgggcgtggtggtggatgcctgtagtcccagctactgggaggctgaggtaggagaacggcatgaacccgggaggcggagcttgcagtgagccaagatcgtgccatgtactctagcctgggtgacagagcaagactccgtctcaaaaaaaaaaaaaatcacaaaattcctgggaatgaaagccaaaaaagactactatgagaaattaggatatgaggtccttatacatcctaatgagtttgaggtacagaaaacaccaatatctagctctgaaaactgcctctcaagttcaatgctttcattcacctaatcagtatacattcagcacccactatgtgcaaagctgggtcaccacttagtagctattaaaaaatagagagggagatttttaaatagacaagaccttctagactccatttcaaatatgcataa

SEQ ID NO: 6251 - protein, 31 aa, Homo sapiens
MYSSLGDRARLRLKKKKNHKIPGNESQKRLL

SEQ ID NO: 6252 - DNA, 3616 bp, Homo sapiens
gaagcagaagttttttttttttttttttcccccaaatgcattcaaaataaacaaatctccttttactaccataacggtgtatgtgaatgtcctggcggatgctctcaagagcgtcaacaatgtgggaaagagaagcaaacaccaggttcttctcaggtggagctccagagtcgtccagtttctaagtgtgatgatgaagcatgggtgcattgacgaatttgaaattaccgatcatcacgaagcagggaagattgtgatgaacctcacaggcaggttatcaagtgtgaagtggtcagctggagatttgatgtgcagctcaaagatctaaaaagatggcagaatcatctgctcctgtcccagcagctggcctgcattgtgctgacctcagctggcatcatggaccacaaagagatgagatgaaaacacacaggaggaaaaagcctgggattctttttctaggggtgtaatacacccatgaaaaaataaataaataaataaataaaaataaaataaaaatgcctcaatgggggaaaaaaaacgcaccagagacaaatacttatttaggatctgtaatgtacccattgccatacctaggcatcctagatacagcaacatatccctgccctttaggaatgtacagtttactgggaaaaagataacacttatcagaggagggtgtttgggactgtgaatcccgtgtgtgtgtgtgttttgagacagagtcttgctcttgttgcccaggctggagtacagtggctctcagctcacggcaacctctgtctcctgggttcaagcaattctcttgcctcagcctcccgagtagctgggattacaggtgcctgccaccaggctgggctgatttttagtatttttagtagtgatggggttttgccatgttggccaggctggtctcgaactcctgacctcaggtgatccacccgccttagcctcccaaagtgctgggattacaggcgtgagccactgcacctggcccgtgtgttgttttgagcttctgtcttatgtaccacttcccttggctcaaggcgtcctttttatctttcttccacttgactaaatgagaatagtgtgggtcactctctacctgcctcccatctgtggttccttttggagataggccgagtgggccactcaccctttaattttctcttagtttcctttctgtacaccagtttgaaccttagtattatcactaatgcaaatatgagcctaggctcaatttttccagttatgaaatggggctggcattattccgtgatgtgcatgttaagagaggggaaagctcacatttttgaggtcctcttgtggttctatcttgtgtaggaactcacgctttgtttattcagcaatcattcctccagaaataaccttaatagcaacaagaaaaaagaataggtgttttttgagctctatctgccagtttctctatatatggacattatatattgcaacataacactcacaatgcctttaaacatcatccccgttatacagataagaaaacagaatttcaaagaaggtaggggacttgcccagggatacatagctagcaagtggcagcgctggattgagtctgggccttgtctgaggctcgggtcctgtcatgctctgcggttgctatgttgacatgcaaagggagaggcagctgctgggagtctaggtgggtttctctttgagaatgctaacgtgaaccctcaaggtgaatcagaatccttttgcaagtgaataatcagatgtaggttcctgtgtctccctgtaaaatgaaagcctcttttttccaaggtccagtatagacctgaagctgggttactctggaatttccctctctggctggagtgactgaggccttgcacgtgacattggtgaggactcgcagcctcaggtctggcttcccttagcaacccccctttcctgtctctgcctctggagttcaccattaaaaaaaaaaaaagaaaaaaagccaaaacactttataaagttacatgctgggtttcttctatgtcctagaaactgtcttaattcatcttcccctttactcttatatgagcaggaagaaaaaaaaattgctagtcaatgctaataattatggcatgtaatgtaattggaagtgtttcactgacatgctcatgagagtttgcggcttcatcttcaggctgggatgtagcactagacttgccttgagtgtctgcacaagcctttgatgcaggtagaccatattataaataggcgcgttgctatggtgaggatggcagtccttgcttgctgtgggtaaccttttctaccttctcggacactgttttaaaacacagcagcgtgatagcatttcatttaatttggaccaaggtggggtagatgaaatgttgagatttagatctaaaatgttgttgtggtgtttcagggggttctggctcacctagtactatggaagattttgcagattgggcttcctcatgatttatttagaaatagattttctaatagatggggtgaggggagggtggtgggcagaaggctgggctttcttctcttccccctcctcctttcattgagcgcttctgcgaatgtgttggctttgatgccccaggagctcatacagtgaaatggaagttcaggttggcacgttgcagaaatgattattcctggtagtacgtttcccattactgttaataatataaagacaattgcctgcctctcaggactcctgcacgtggctacagtcatttcttcatggaattagacacatagcagtggggaccaggagtgttttattagtgattgtcctcctgcaagtttccagggtatctcagcttagacacatgaattattttttcctgttgcttggagggtatacttttaattatattcattcaataacagagcagttcaggtttgtaaaatattttttctcccccaaccttttccccagcatacatccccgtcccgtaagtttctgggcagagacaatctcaggaacctaaaggttgctaaaaaattagctagttggccaggcgcatgactcatgccagtaatcccagcactttgggaggctgaggtgggtggatcgcttgagcccagaaattcgagaccagcctagacaacatggcaaaaccctgtctctacaaacaaaacaaaatctagctgggcatggtggtgcatgcctgtagtcccagctactggggaggctgaggtgggcgggcgattgagctcaggaggtccaggctgcagtgagccgtgattgtgccactgcactgcagcctggatgactgagtgggaccctgtctcaataataaataaataaataaataaaaaataaaaaaaattagctagccaagctgcttataggtcttttacatggccaagccactttctcacctttaaaatggtaataacgtttccgtactcatctcaatgggttttgagtgccaagacagaccgtttgatggaagccctctggggagaaaaatgctacccaagacaggcttttcaattggagactgatccattggtgttttggtcagttggtgttgaaatccctatttttccagcaggagaatggcgtgaacccgggaggcggagcttgcagtgagccgagatcgcc

SEQ ID NO: 6253 - protein, 68 aa, Homo sapiens
MVITFPYSSQWVLSAKTDRLMEALWGEKCYPRQAFQLETDPLVFWSVGVEIPIFPAGEWREPGRRSLQ

SEQ ID NO: 6254 - DNA, 536 bp, Homo sapiens
gttggccaggctggtctcgaactcctgacctcaggtgatctgcccttctcggcctcccgaagtggtgggattataggcgtgagtcaccgagcctggccccaggcaataatataccagtgggcaagaaaatattcttgctctcatgggacttctgttgggggtcagggtatagggaggaaggcatagagatgaaaaccagtaaataactttctggtttactagggtattcttcaaaaaaagagaaaagattaaagctgcacagacatgatgatgtaaaagctagtagcttctcaagctgtgaaaggtctgtggtgcagagaatagctccctgtgagctgaattttgtttgctgtggtgcagcatgggtttagatcctacctggttagtgaaagagataatgtgaagtcattgcatttgcatttgtcaaaatcctagttttccacttacctaatagttttttgtttgtttgtttgtttcattttgtttttaaagacaggatcttacagccggggcctgtaatcctagcactctgggag

SEQ ID NO: 6255 - protein, 54 aa, Homo sapiens
LSGLLGYSSKKEKRLKLHRHDDVKASSFSSCERSVVQRIAPCELNFVCCGAAWV

SEQ ID NO: 6256 - DNA, 2065 bp, Homo sapiens
gttgctctttgttttttggcatccttgtgtgtgaatacatgataagaaatatgaggatgttaccttctcaccaatttttaaaaattgtcagttcagtactttgcttttttagtggaatggcccttagcaatatccttcttttaaatggatttcttattgttccaaagatgtggcatttccaaaagaaaattcttccatttatgcatagaaccttgaactctagtctttaaaaatctaggctttagtttcagctcttttttagctgtgtggtcctggacaggcccttttacatctagacttggagatttaaagaaaatcataaagaattaaatgagatgatttctaagactcatttcattttaaaactctgatctttcagagacgcacaaatccattccctcttgctgtggaggagaaaatacatgaaaatctgaatccatatgcatttgtcagggttctccagagacataaaaccaataggatgtatgtgtttatatagagagatttgtaataaggaactggctcacccagtcatggaattccataatctgcatcatcaagtgtcatggtctgtagctgggaagctggagacccaggagagtccatggtgcagctctaccttggcctctgacagtgctgggattataggtgtaagccaccacacccagccctgagtgacattatttcatacaaaattctcatctctggaggcctttgtatttttaggggttttgtttttcaaatgctttttacctctttctatacttgttcatttttaaatgtttcctggcagagcaattagtattttctggcttactaggtgctattcgattgcattagcgtttgaatattacccagctagttgtggagtggggcagtaagctcataaagaagcaagataatggaatacacaaatattactacgactttatgggtggcataccttgattcttgatccacgtggctgtgttcagatctggttagcacacattgacatcaggggctgagccaccagtgagagtcaaacccagcagccctgtcagtctaccttctctcttgacttgatccagcctcataacttcactttccgcaggagaaacacacctcttgaggtcctctgtcacaaataggcagtgtttctggagaaagccaggaggcagattttagtgctgttcagcatctgtggtctctactttctggatctggtgcattatggagaccatgaaatgacatgaaatagctcagtgctgccagtggcggtgacagggacactagaggtgaaggagggcccttggggcaattccagcaggtgggtggtggctgaaggtccttgtcttctttctgcagagactggccacctgcttcattctttcaagaagcaccaaatccctacttcagtactttgcccactcgtcatgtcaggagcatgaaactcacgaggccttcatttacttttatcctgtaacaccttcaatttttcccacatcctcccttgattcgtggatggacaactatggaggccaatctggctgaggtgaggactgcttgagtctaaattcctctctcctcaaacccaattcaaactggcctgagcaaaatgaatgtattgatccataactgaaaagtccagaatgatcaggcatcaggcatggttgcatccaggggcccatgtattagaaccatctccttccagttctgggctctgcttgcctcccagttggttttactgcacagaggcttattcaagtccagagagatcttatctttccctacaagtctgtgaccttgattctgaacctgcatctatgggaagggcttgcagtgtctgagtgagcttggactgtgtaaactttcccacttctgaagctgggggtggggttcactccactaagctacatggctctagagtcagggggttgccccctaagtaactggcagtattgttaccagaaaaatcatgaatggacactgagcagaaaactcagcagatgtttatttcctggtctttaggatttgttgaagagttttttatttgtttgttttttaagaaagactcaaaaggaaa

SEQ ID NO: 6257 - protein, 77 aa, Homo sapiens [sequence omitted]

SEQ ID NO: 6258 - DNA, 557 bp, Homo sapiens
ggaataagtcatctttaaaagtttgttctggcgtaggaagtgatgaatagccacataagacaactagaaactgtaaaaatacataaagaaaatgtaaatacctatactcttattacctacttgggaggctgaggcaggagaattgcttgaatctgggggacggaggttgcagtgagccaagatagcaccactgctgtccagcctgggcaacagagccaagactccctcggctgggggggttggtgggggcagggtaagaattttggtgatctctgaaaatccggatcccacagcatgggtgtgatagaaatggctctgcagagtgtgatgggaacctcttgtgactggtcgtcagaactaagtttgagtccaacactcacttttttggcaaggtgcttccccgctccgtgatgcaattcttgcatctgcaaaacaggcggtggtcatgggatattcccgcagtctgctccactgggtacctacagagatcccttgacatttaacacaggcttcctgtgatccaggaactactgtacgaactactgtaactacctcct

SEQ ID NO: 6259 - protein, 38 aa, Homo sapiens
MGVIEMALQSVMGTSCDWSSELSLSPTLTFLARCFPAP

SEQ ID NO: 6260 - DNA, 2811 bp, Homo sapiens
caggactgagaccacagccttaacaaacaaggaggggcacttatctttttgctttgaaagccagcatcctggagctggtccggccctatgaatgccttggtggcccgggtactgagcacagagagccaccatttccaaaggtttgaatgagttaacacttggcagcaattgcattcccgtgcacttagagtcgagacacatggagaagggttctggggtaggcttcttctttcccttttttctttttcctttttggttgttttatgtttaaaaaccacatgtctgtacggaggagcttggttagctgacattgttttacagtgctgaaaaagaagcgtggcattgaacggcatgcaccagctaaagggctgcaagcagtgagtcatgcagtctcagactgcagcgtccctaggcctgcagaattaacaaaatatatgtgtgtatatatgtagcattggttccaaaaggaatcagaacagcccagaagtgtccaaattaagcacccatgttccacctgcaggtctccatccagcctgcattctcagggaaagtgtaggtacttccttcttggtggagggataccgactagctcctgtctcatttcctttctttaatgaccacctttggttaaatgtgttgtttctttgttctgatacaagcagtctttgaatttggaatattacaatggagaaaaaaaaagtgcgttcgctacatacaaggtgaaggcagctgcctcagcccaccctcttcagatggaagcttactagattcgcctcccccctccccgaacctgctaggctcccctccccgagacgccaagtcacagactgagcagacccagcctctgtcgctgtccctgaagcccgaccccctggcccacctgtccatgatgcctccgccacccgccctcctgctcgctgaggccacccacaaggcctccgccctctgtcccaacggggccctggacctgcccccagccgctttgcagcctgccgccccctcctcatcaattgcacagccgtcgacttcttccttacattcccacagctccctggccgggacccagccccagccgctgtcgctcgtcaccaagtctttagaatagctttagcgtcgtgaaccccgctgctttgtttatggttttgtttcacttttcttaatttgccccccacccccaccttgaaaggttttgttttgtactctcttaattttgtgccatgtggctacattagttgatgtttatcgagttcattggtcaatatttgacccattcttatttcaatttctccttttaaatatgtagatgagagaagaacctcatgattctaccaaaatttttatcaacagctgtttaaagtctttgtagcgtttaaaaaatatatatatatacataactgttatgtagttcggatagcttagttttaaaagactgattaaaaaacaaaaagaaaaaaaaagcaattttgaagcagccctccagaaggagttggttctgtattatttgtattaaatacgagcttgcgaaccaatcattttacatctggtttttaaaccgtaagggcaccatgaatgcagtgccgttactttttttttttttttctgtgtgaaacaactcttattgtgatgttacttgttattgtttaaatgtacagaaacaaagggtaaaaatgtgttaatataccttgttccatggtgttgttcttttggggggaggggacgctactcaacacttaatagaatcacaacgctgttgggccagtagtatttattgctttagagattgcttgtcgtacctgtatgtcgtccctttttaaatatgttttcctttttcttgaaactgtataaagtttttttcccccttagcataagcatcttatatataacaactcatttgtacaaggtttttaagtttatatataaaatgtgtatatatatttttgtttcccctttttgacttttttttttctgtatgaaacccagatgtcaccaaatggacattaatagttgcattaaggatcagtagcattaacaaaagttgctttaaaagccattatgtaaaacaagacttgaaaatgagtgagggaattttagcgacactgtctgagcagcagtgggaaccatcttcgtttcccctttgaactcccagtgggatgccctaccctgcgcccttaggacccggactgaccgtgtacaaaactttacgtgccaaaattctcagtgaatttagctttctccctctttttgatgctgtaatttttgttcatcatgttttgctgtgatgttacataggtagatttgtatgtagttttaatgtcacctataacaaaatgtgtttggtagcagattgtccagaaagcattttaaatgaagaggtataaacccttaagggccaaaattctgtatattagattactcttaaacgaaaaaccagctgccgcttttatgtacacatattacatacgagtaggcagcagactttaaaaataaaaaaaacctaggcatgttgatgttgcaaaatgctgtataaagctgaaacctgttcattcagtgccattgtagttgacatgaagcgattgtaaaactgtctccgatttttctctggtttattaaaatgctaactataacattttttgtgaatactttgaatgtttcctaacagttgtgatgttactgttccgttttatgctcttattccaagttcatttttaatggtttggaagccatttttgtaatgaataaatgttcatgctgtacagtatctgtagcatgccgttctggattaataaaagcaacttagtatgtgcagataaa

SEQ ID NO: 6261 - protein, 157 aa, Homo sapiens
MCCFFVLIQAVFEFGILQWRKKKCVRYIQGEGSCLSPPSSDGSLLDSPPPSPNLLGSPPRDAKSQTEQTQPLSLSLKPDPLAHLSMMPPPPALLLAEATHKASALCPNGALDLPPAALQPAAPSSSIAQPSTSSLHSHSSLAGTQPQPLSLVTKSLE

SEQ ID NO: 6262 - DNA, 340 bp, Homo sapiens
ggagatgctggttttggtgcagggcaaaattagtctttctggtttaaacacgaatcacgataacccaaacccaggaaggtccatgctgcgattccctggcacttcttctttgtagtcacttcggtgaccggcttgtgctgcaccctccattgactagccttggcatattgacaagagcaggatgcccctccatccatcccatcctcaccatctctccttccaacctttgtttatcctcttctacctgtttttggtggtttcttttttttgtttcgttttttgttttttgtttttgttttaagtttattttgttttatttttgtttcccttcctcccttct

SEQ ID NO: 6263 - protein, 39 aa, Homo sapiens
MPLHPSHPHHLSFQPLFILFYLFLVVSFFCFVFCFLFLF

SEQ ID NO: 6264 - DNA, 506 bp, Homo sapiens
atcttcgtttcccctttgaactcccagtgggatgccctaccctgcgcccttaggacccggactgaccgtgtacaaaactttacggccaaaattctgtatattagattactcttaaacgaaaaaccagctgccgcttttatgtacacatattacatacgagtaggcagcagactttaaaaataaaaaaaacctaggcatgttgatgttgcaaaatgctgtataaagctgaaacctgttcattcagtgccattgtagttgacatgaagcgattgtaaaactgtctccgatttttctctggtttattaaaatgctaactataacattttttgtgaatactttgaatgtttcctaacagttgtgatgttactgttccgttttatgctcttattccaagttcatttttaatggtttggaagccatttttgtaatgaataaatgttcatgctgtacagtatctgtagcatgccgttctggattaataaaagcaacttagtatgtgcagataa

SEQ ID NO: 6265 - DNA, 716 bp, Homo sapiens
agattgggatgcttggaaggtgtgtctacgacttcgagataatggacttctggccaagccaacccatggcgacattatcaggtttgcgcctccgctggtgatcaaggaggatgagcttcgagagtccattgaaattattaacaagaccatcttgtctttctgagggtagccagctgttttcagtggtccctgggagccagctggagacaggtggtcctgtaaaagctttattcctaatgtgggcacattccactcccatgagtcttcaaaaactttttttttgaatatatttttttcagttgatacataatagaacaacgtttatgaacctgccgtttgctttgtaacgtaactaaataatgtaatggcatctatattcagttgaagtgttttgatgtgcatgtgtacttcctaaggtgaaatgcatctatatacagacagcctctaaatcaagtccttcagcttcatcttataaagtgaaatcattgttattgaattttaggaaggattaatggttaagtgtatataaaatactaatattaagtaaacttcatattggccaacaccagggttgtattctatggatgtcattattttgaattaagaattagtgtttaacattcctaaattgttttgagtgcttgattataatttgtaaaaaatgtttattttcaatacttctttaaatttaaaataaagcttatatttcaaatgtc

SEQ ID NO: 6266 - protein, 57 aa, Homo sapiens
MSFESPLKLLTRPSCLSEGSQLFSVVPGSQLETGGPVKALFLMWAHSTPMSLQKLFF

SEQ ID NO: 6267 - DNA, 1469 bp, Homo sapiens
tacaaaaccctcacctttgcatcagcaccttttcactatgtagagcagggcagaatgggcctctagggagatagtggcctgacaaaggaaatagttggtgagtctacaagattcttataggatactcttgaaattgtgtgcagttaaaacatttttacaaatttgagggcacatcagaattacacatttattgttggtggggggacagtgaaataaggatggctattttccctgtggaaacgaaagtgatcactaataggggtattttttttccccaataggttctctttattgctgatgaaatacagacaggattggccagaactggtagatggctggctgttgattatgaaaatgtcagacctgatatagtcctccttggaaaggccctttctgggggcttataccctgtgtctgcagtgctgtgtgatgatgacatcatgctgaccattaagccaggggagcatgggtccacatacggtggcaatccactaggctgccgagtggccatcgcagcccttgaggttttagaagaagaaaaccttgctgaaaatgcagacaaattgggcattatcttgagaaatgaactcatgaagctaccttctgatgttgtaactgccgtaagaggaaaaggattattaaacgctattgtcattaaagaaaccaaagattgggatgcttggaaggtgtgtctacgacttcgagataatggacttctggccaagccaacccatggcgacattatcaggtttgcgcctccgctggtgatcaaggaggatgagcttcgagagtccattgaaattattaacaagaccatcttgtctttctgagggtagccagctgttttcagtggtccctgggagccagctggagacaggtggtcctgtaaaagctttattcctaatgtgggcacattccactcccatgagtcttcaaaaactttttttttgaatatatttttttcagttgatacataatagaacaacgtttatgaacctgccgtttgctttgtaacgtaactaaataatgtaatggcatctatattcagttgaagtgttttgatgtgcatgtgtacttcctaaggtgaaatgcatctatatacagacagcctctaaatcaagtccttcagtataattgatatatgtttttataatttcctcactggtataagtgtttcatatttgaaaaagttatctctgggtattgcataaaaggcttcatcttataaagtgaaatcattgttattgaattttaggaaggattaatggttaagtgtatataaaatactaatattaagtaaacttcatattggccaacaccagggttgtattctatggatgtcattattttgaattaagaattagtgtttaacattcctaaattgttttgagtgcttgattataatttgtaaaaaatgtttattttcaatacttctttaaatttaaaataaagcttatatttcaaatgtc

SEQ ID NO: 6268 - protein, 129 aa, Homo sapiens [sequence omitted]

SEQ ID NO: 6269 - DNA, 2307 bp, Homo sapiens
tcaggagattttggactctctgcagactgtccctggatcttgggttaaaaatctgtattctagactgaaccgtgggaagaaaaaatagtcagtgagtctttggcaaaccggagtactggattttgtttagcaattgcaaattcctgaacatactggatttactgggtagtgccaagtttaaagggaagtaagccaaactccaagtattatgttttgctaatttggcagctcgaatcaagagtggctgtgagattatacatggtttgacttgtcattggtagacttctgttgaaacatgaattaactagtcttttagaaaatctgtggtttttctacttgaaggacacaatgttttccaaactagcacatttgcagaggtttgctgtacttagtcgcggagttcattcttcagtggcttctgctacatctgttgcaactaaaaaaacagtccaaggccctccaacctctgatgacatttttgaaagggaatataagtatggtgcacacaactaccatcctttacctgtagccctggagagaggaaaaggtatttacttatgggatgtagaaggcagaaaatattttgacttcctgagttcttacagtgctgtcaaccaagggcattgtcaccccaagattgtgaatgctctgaagagtcaagtggacaaattgaccttaacatctagagctttctataataacgtacttggtgaatatgaggagtatattactaaacttttcaactaccacaaagttcttcctatgaatacaggagtggaggctggagagactgcctgtaaactagctcgtaagtggggctataccgtgaagggcattcagaaatacaaagcaaagattgtttttgcagctgggaacttctggggtaggacgttgtctgctatctccagttccacagacccaaccagttacgatggttttggaccatttatgccgggattcgacatcattccctataatgatctgcccgcactggagcgtgctcttcaggatccaaatgtggctgcgttcatggtagaaccaattcagggtgaagcaggcgttgttgttccggatccaggttacctaatgggagtgcgagagctctgcaccaggcaccaggttctctttattgctgatgaaatacagacaggattggccagaactggtagatggctggctgttgattatgaaaatgtcagacctgatatagtcctccttggaaaggccctttctgggggcttataccctgtgtctgcagtgctgtgtgatgatgacatcatgctgaccattaagccaggggagcatgggtccacatacggtggcaatccactaggctgccgagtggccatcgcagcccttgaggttttagaagaagaaaaccttgctgaaaatgcagacaaattgggcattatcttgagaaatgaactcatgaagctaccttctgatgttgtaactgccgtaagaggaaaaggattattaaacgctattgtcattaaagaaaccaaagattgggatgcttggaaggtgtgtctacgacttcgagataatggacttctggccaagccaacccatggcgacattatcaggtttgcgcctccgctggtgatcaaggaggatgagcttcgagagtccattgaaattattaacaagaccatcttgtctttctgagggtagccagctgttttcagtggtccctgggagccagctggagacaggtggtcctgtaaaagctttattcctaatgtgggcacattccactcccatgagtcttcaaaaactttttttttgaatatatttttttcagttgatacataatagaacaacgtttatgaacctgccgtttgctttgtaacgtaactaaataatgtaatggcatctatattcagttgaagtgttttgatgtgcatgtgtacttcctaaggtgaaatgcatctatatacagacagcctctaaatcaagtccttcagtataattgatatatgtttttataatttcctcactggtataagtgtttcatatttgaaaaagttatctctgggtattgcataaaaggcttcatcttataaagtgaaatcattgttattgaattttaggaaggattaatggttaagtgtatataaaatactaatattaagtaaacttcatattggccaacaccagggttgtattctatggatgtcattattttgaattaagaattagtgtttaacattcctaaattgttttgagtgcttgattataatttgtaaaaaatgtttattttcaatacttctttaaatttaaaataaagcttatatttcaaatgtc

SEQ ID NO: 6270 - protein, 439 aa, Homo sapiens; identical to SEQ ID NO: 840

SEQ ID NO: 6271 - DNA, 2257 bp, Homo sapiens
gttgcgcttcatagacgccgcgtgtacccggttgtcctcaggcgctgtcaggtaccgtctggcgctttgtagcccaggctggagtgctggtggcacagatcgtggctcactgcagcccagaactcagggctcaagagatctttccaccttagtcttagtctcctaagtaccagatactacaggagattttggactctctgcagactgtccctggatcttgggttaaaaatctgtattctagactgaaccgtgggaagaaaaaatagtcaatctgtggtttttctacttgaaggacacaatgttttccaaactagcacatttgcagaggtttgctgtacttagtcgcggagttcattcttcagtggcttctgctacatctgttgcaactaaaaaaacagtccaaggccctccaacctctgatgacatttttgaaagggaatataagtatggtgcacacaactaccatcctttacctgtagccctggagagaggaaaaggtatttacttatgggatgtagaaggcagaaaatattttgacttcctgagttcttacagtgctgtcaaccaagggcattgtcaccccaagattgtgaatgctctgaagagtcaagtggacaaattgaccttaacatctagagctttctataataacgtacttggtgaatatgaggagtatattactaaacttttcaactaccacaaagttcttcctatgaatacaggagtggaggctggagagactgcctgtaaactagctcgtaagtggggctataccgtgaagggcattcagaaatacaaagcaaagattgtttttgcagctgggaacttctggggtaggacgttgtctgctatctccagttccacagacccaaccagttacgatggttttggaccatttatgccgggattcgacatcattccctataatgatctgcccgcactggagcgtgctcttcaggatccaaatgtggctgcgttcatggtagaaccaattcagggtgaagcaggcgttgttgttccggatccaggttacctaatgggagtgcgagagctctgcaccaggcaccaggttctctttattgctgatgaaatacagacaggattggccagaactggtagatggctggctgttgattatgaaaatgtcagacctgatatagtcctccttggaaaggccctttctgggggcttataccctgtgtctgcagtgctgtgtgatgatgacatcatgctgaccattaagccaggggagcatgggtccacatacggtggcaatccactaggctgccgagtggccatcgcagcccttgaggttttagaagaagaaaaccttgctgaaaatgcagacaaattgggcattatcttgagaaatgaactcatgaagctaccttctgatgttgtaactgccgtaagaggaaaaggattattaaacgctattgtcattaaagaaaccaaagattgggatgcttggaaggtgtgtctacgacttcgagataatggacttctggccaagccaacccatggcgacattatcaggtttgcgcctccgctggtgatcaaggaggatgagcttcgagagtccattgaaattattaacaagaccatcttgtctttctgagggtagccagctgttttcagtggtccctgggagccagctggagacaggtggtcctgtaaaagctttattcctaatgtgggcacattccactcccatgagtcttcaaaaactttttttttgaatatatttttttcagttgatacataatagaacaacgtttatgaacctgccgtttgctttgtaacgtaactaaataatgtaatggcatctatattcagttgaagtgttttgatgtgcatgtgtacttcctaaggtgaaatgcatctatatacagacagcctctaaatcaagtccttcagtataattgatatatgtttttataatttcctcactggtataagtgtttcatatttgaaaaagttatctctgggtattgcataaaaggcttcatcttataaagtgaaatcattgttattgaattttaggaaggattaatggttaagtgtatataaaatactaatattaagtaaacttcatattggccaacaccagggttgtattctatggatgtcattattttgaattaagaattagtgtttaacattcctaaattgttttgagtgcttgattataatttgtaaaaaatgtttattttcaatacttctttaaatttaaaataaagcttatatttcaaatgtc

SEQ ID NO: 6272 - protein, 439 aa, Homo sapiens; identical to SEQ ID NO: 840

SEQ ID NO: 6273 - DNA, 1811 bp, Homo sapiens
gttgcgcttcatagacgccgcgtgtacccggttgtcctcaggcgctgtcaggtatttacttatgggatgtagaaggcagaaaatattttgacttcctgagttcttacagtgctgtcaaccaagggcattgtcaccccaagattgtgaatgctctgaagagtcaagtggacaaattgaccttaacatctagagctttctataataacgtacttggtgaatatgaggagtatattactaaacttttcaactaccacaaagttcttcctatgaatacaggagtggaggctggagagactgcctgtaaactagctcgtaagtggggctataccgtgaagggcattcagaaatacaaagcaaagattgtttttgcagctgggaacttctggggtaggacgttgtctgctatctccagttccacagacccaaccagttacgatggttttggaccatttatgccgggattcgacatcattccctataatgatctgcccgcactggagcgtgctcttcaggatccaaatgtggctgcgttcatggtagaaccaattcagggtgaagcaggcgttgttgttccggatccaggttacctaatgggagtgcgagagctctgcaccaggcaccaggttctctttattgctgatgaaatacagacaggattggccagaactggtagatggctggctgttgattatgaaaatgtcagacctgatatagtcctccttggaaaggccctttctgggggcttataccctgtgtctgcagtgctgtgtgatgatgacatcatgctgaccattaagccaggggagcatgggtccacatacggtggcaatccactaggctgccgagtggccatcgcagcccttgaggttttagaagaagaaaaccttgctgaaaatgcagacaaattgggcattatcttgagaaatgaactcatgaagctaccttctgatgttgtaactgccgtaagaggaaaaggattattaaacgctattgtcattaaagaaaccaaagattgggatgcttggaaggtgtgtctacgacttcgagataatggacttctggccaagccaacccatggcgacattatcaggtttgcgcctccgctggtgatcaaggaggatgagcttcgagagtccattgaaattattaacaagaccatcttgtctttctgagggtagccagctgttttcagtggtccctgggagccagctggagacaggtggtcctgtaaaagctttattcctaatgtgggcacattccactcccatgagtcttcaaaaactttttttttgaatatatttttttcagttgatacataatagaacaacgtttatgaacctgccgtttgctttgtaacgtaactaaataatgtaatggcatctatattcagttgaagtgttttgatgtgcatgtgtacttcctaaggtgaaatgcatctatatacagacagcctctaaatcaagtccttcagtataattgatatatgtttttataatttcctcactggtataagtgtttcatatttgaaaaagttatctctgggtattgcataaaaggcttcatcttataaagtgaaatcattgttattgaattttaggaaggattaatggttaagtgtatataaaatactaatattaagtaaacttcatattggccaacaccagggttgtattctatggatgtcattattttgaattaagaattagtgtttaacattcctaaattgttttgagtgcttgattataatttgtaaaaaatgtttattttcaatacttctttaaatttaaaataaagcttatatttcaaatgtc

SEQ ID NO: 6274 - protein, 301 aa, Homo sapiens
MNTGVEAGETACKLARKWGYTVKGIQKYKAKIVFAAGNFWGRTLSAISSSTDPTSYDGFGPFMPGFDIIPYNDLPALERALQDPNVAAFMVEPIQGEAGVVVPDPGYLMGVRELCTRHQVLFIADEIQTGLARTGRWLAVDYENVRPDIVLLGKALSGGLYPVSAVLCDDDIMLTIKPGEHGSTYGGNPLGCRVAIAALEVLEEENLAENADKLGIILRNELMKLPSDVVTAVRGKGLLNAIVIKETKDWDAWKVCLRLRDNGLLAKPTHGDIIRFAPPLVIKEDELRESIEIINKTILSF

SEQ ID NO: 6275 - DNA, 2066 bp, Homo sapiens
aagttgcagtgactctccggcgtcactgttgcgcttcatagacgccgcgtgtacccggttgtcctcaggcgctgtcagatctgtggtttttctacttgaaggacacaatgttttccaaactagcacatttgcagaggtttgctgtacttagtcgcggagttcattcttcagtggcttctgctacatctgttgcaactaaaaaaacagtccaaggccctccaacctctgatgacatttttgaaagggaatataagtatggtgcacacaactaccatcctttacctgtagccctggagagaggaaaaggtatttacttatgggatgtagaaggcagaaaatattttgacttcctgagttcttacagtgctgtcaaccaagggcattgtcaccccaagattgtgaatgctctgaagagtcaagtggacaaattgaccttaacatctagagctttctataataacgtacttggtgaatatgaggagtatattactaaacttttcaactaccacaaagttcttcctatgaatacaggagtggaggctggagagactgcctgtaaactagctcgtaagtggggctataccgtgaagggcattcagaaatacaaagcaaagattgtttttgcagctgggaacttctggggtaggacgttgtctgctatctccagttccacagacccaaccagttacgatggttttggaccatttatgccgggattcgacatcattccctataatgatctgcccgcactggagcgtgctcttcaggatccaaatgtggctgcgttcatggtagaaccaattcagggtgaagcaggcgttgttgttccggatccaggttacctaatgggagtgcgagagctctgcaccaggcaccaggttctctttattgctgatgaaatacagacaggattggccagaactggtagatggctggctgttgattatgaaaatgtcagacctgatatagtcctccttggaaaggccctttctgggggcttataccctgtgtctgcagtgctgtgtgatgatgacatcatgctgaccattaagccaggggagcatgggtccacatacggtggcaatccactaggctgccgagtggccatcgcagcccttgaggttttagaagaagaaaaccttgctgaaaatgcagacaaattgggcattatcttgagaaatgaactcatgaagctaccttctgatgttgtaactgccgtaagaggaaaaggattattaaacgctattgtcattaaagaaaccaaagattgggatgcttggaaggtgtgtctacgacttcgagataatggacttctggccaagccaacccatggcgacattatcaggtttgcgcctccgctggtgatcaaggaggatgagcttcgagagtccattgaaattattaacaagaccatcttgtctttctgagggtagccagctgttttcagtggtccctgggagccagctggagacaggtggtcctgtaaaagctttattcctaatgtgggcacattccactcccatgagtcttcaaaaactttttttttgaatatatttttttcagttgatacataatagaacaacgtttatgaacctgccgtttgctttgtaacgtaactaaataatgtaatggcatctatattcagttgaagtgttttgatgtgcatgtgtacttcctaaggtgaaatgcatctatatacagacagcctctaaatcaagtccttcagtataattgatatatgtttttataatttcctcactggtataagtgtttcatatttgaaaaagttatctctgggtattgcataaaaggcttcatcttataaagtgaaatcattgttattgaattttaggaaggattaatggttaagtgtatataaaatactaatattaagtaaacttcatattggccaacaccagggttgtattctatggatgtcattattttgaattaagaattagtgtttaacattcctaaattgttttgagtgcttgattataatttgtaaaaaatgtttattttcaatacttctttaaatttaaaataaagcttatatttcaaatgtc

SEQ ID NO: 6276 - protein, 439 aa, Homo sapiens; identical to SEQ ID NO: 840

SEQ ID NO: 6277 - DNA, 699 bp, Homo sapiens
ttacggaagcagaaccttccttacagtaacgtgcagatctgtggtttttctacttgaaggacacaatgttttccaaactagcacatttgcagaggtttgctgtacttagtcgcggagttcattcttcagtggcttctgctacatctgttgcaactaaaaaaacagtccaaggccctccaacctctgatgacatttttgaaagggaatataagtatggtgcacacaactaccatcctttacctgtagccctggagagaggaaaaggtatttacttatgggatgtagaaggcagaaaatattttgacttcctgagttcttacagtgctgtcaaccaagggcattgtcaccccaagattgtgaatgctctgaagagtcaagtggacaaattgaccttaacatctagagctttctataataacgtacttggtgaatatgaggagtatattactaaacttttcaactaccacaaagttcttcctatgaatacaggagtggaggctggagagactgcctgtaaactagctcgtaagtggggctataccgtgaagggcattcagaaatacaaagcaaagattgtttttgcagactgtgtccagtctctttcttaatagcaaagggtgcaaagatgttttcacctgagtattgaaagaagctggtgagtcagtggggtggagagacagaggaagactgtccctaact

SEQ ID NO: 6278 - protein, 180 aa, Homo sapiens
MFSKLAHLQRFAVLSRGVHSSVASATSVATKKTVQGPPTSDDIFEREYKYGAHNYHPLPVALERGKGIYLWDVEGRKYFDFLSSYSAVNQGHCHPKIVNALKSQVDKLTLTSRAFYNNVLGEYEEYITKLFNYHKVLPMNTGVEAGETACKLARKWGYTVKGIQKYKAKIVFADCVQSLS

SEQ ID NO: 6279 - DNA, 735 bp, Homo sapiens
aagttgcagtgactctccggcgtcactgttgcgcttcatagacgccgcgtgtacccggttgtcctcaggcgctgtcagatctgtggtttttctacttgaaggacacaatgttttccaaactagcacatttgcagaggtttgctgtacttagtcgcggagttcattcttcagtggcttctgctacatctgttgcaactaaaaaaacagtccaaggccctccaacctctgatgacatttttgaaagggaatataagtatggtgcacacaactaccatcctttacctgtagccctggagagaggaaaaggtatttacttatgggatgtagaaggcagaaaatattttgacttcctgagttcttacagtgctgtcaaccaagggcattgtcaccccaagattgtgaatgctctgaagagtcaagtggacaaattgaccttaacatctagagctttctataataacgtacttggtgaatatgaggagtatattactaaacttttcaactaccacaaagttcttcctatgaatacaggagtggaggctggagagactgcctgtaaactagctcgtaagtggggctataccgtgaagggcattcagaaatacaaagcaaagattgtttttgcaggtatgtgaaattaaatattaacttctatgattgaaacatacaatataatttactgtggccaggcatggtggctcatgcctgtaatcctagcattttgggaggccaagg

SEQ ID NO: 6280 - protein, 175 aa, Homo sapiens
MFSKLAHLQRFAVLSRGVHSSVASATSVATKKTVQGPPTSDDIFEREYKYGAHNYHPLPVALERGKGIYLWDVEGRKYFDFLSSYSAVNQGHCHPKIVNALKSQVDKLTLTSRAFYNNVLGEYEEYITKLFNYHKVLPMNTGVEAGETACKLARKWGYTVKGIQKYKAKIVFAGM

SEQ ID NO: 6281 - DNA, 915 bp, Homo sapiens
atgtgggaaggagtgctccagtccgcgtgggcttcacttggcagcgcggacccggctcctggctggaaagctaccgccaagccacagccgaaggcaagcccgagcggcgccatccccaaccccgcgccgccgaccgccggcccgtgggcgacgggcatgctggcatggcaggacggcggggccaaggcggctccctcccaccacaagatttctttctctgtcctggacatcctggacccacagaaattcacccgcgcagcgctccctgccgtgcgcccggctccccgggaagccaggaaaagtttggcggaggtcgaagcggggaaagatgccagctccagggaccctgtccgacagctggagacccctgatgctgcgggcccaggcgccggccaggcgtcccccctggagggttccgaggcggaagaggaggaggatgcggaggatccgaggaggccgcggctgcgggagcgggctgcgcgcttgctgccgggcctagcgcgctcacctgacgccccggccggggcattggcgtctggggagccctgcgaggacggcgggggcggccctgtgaggtcccccccgggatcccccggctccccgcgtcccaggcgccggcgcctggagcccaactgcgccaagccgcggcgcgcgcgcaccgccttcacctacgagcagctggtggccttggagaacaagttccgggccacgcgctacctgtcagtgtgcgagcgcctgaacctcgcgctgtctctcagcctcaccgagacgcagactttcccctcctactccgcggccaatgtcctcttcccgtccgccgcctccttcccgctgacggctgccgcccccgggagccctttcgcgccgttccttgggccttcctacctgacccccttctacgccccgcgtctatga

SEQ ID NO: 6282 - protein, 304 aa, Homo sapiens [sequence omitted]

SEQ ID NO: 6283 - DNA, 858 bp, Homo sapiens
cgccggcgtcggttgggacgcggagctgaggagcagggccgggcgccatggcaccgtggggcaagcggctggctggcgtgcgcggggtgctgcttgacatctcgggcgtgctgtacgacagcggcgcgggcggcggcacggccatcgccggctcggtggaggcggtggccagactgaagcgttcccggctgaaggtgaggttctgcaccaacgagtcgcagaagtcccgggcagagctggtggggcagcttcagaggctgggatttgacatctctgagcaggaggtgaccgccccggcaccagctgcctgccagatcctgaaggagcaaggcctgcgaccatacctgctcatccatgacggagtccgctcagaatttgatcagatcgacacatccaacccaaactgtgtggtaattgcagacgcaggagaaagcttttcttatcaaaacatgaataacgccttccaggtgctcatggagctggaaaaacctgtgctcatatcactgggaaaagggcgttactacaaggagacctctggcctgatgctggacgttggtccctacatgaaggcgcttgagtatgcctgtggcatcaaagccgaggtggtggggaagccttctcctgagtttttcaagtctgccctgcaagcgataggagtggaagcccaccagttactttcagtatgaaagcaagaagcagaaatgcctgcggcttttcctgagtttttgctgcttctctgaaaggataagaattgacaagtcctatcagtgtgttaatatatctcactggcaagacagtgtaacagcaagattacaacaatatggaggaaataataaagtcactcattttgcgaccttt

SEQ ID NO: 6284 - protein, 212 aa, Homo sapiens
MAPWGKRLAGVRGVLLDISGVLYDSGAGGGTAIAGSVEAVARLKRSRLKVRFCTNESQKSRAELVGQLQRLGFDISEQEVTAPAPAACQILKEQGLRPYLLIHDGVRSEFDQIDTSNPNCVVIADAGESFSYQNMNNAFQVLMELEKPVLISLGKGRYYKETSGLMLDVGPYMKALEYACGIKAEVVGKPSPEFFKSALQAIGVEAHQLLSV

SEQ ID NO: 6285 - DNA, 1641 bp, Homo sapiens
cgccggcgtcggttgggacgcggagctgaggagcagggccgggcgccatggcaccgtggggcaagcggctggctggcgtgcgcggggtgctgcttgacatctcgggcgtgctgtacgacagcggcgcgggcggcggcacggccatcgccggctcggtggaggcggtggccagactgaagcgttcccggctgaaggtgaggttctgcaccaacgagtcgcagaagtcccgggcagagctggtggggcagcttcagaggctgggatttgacatctctgagcaggaggtgaccgccccggcaccagctgcctgccagatcctgaaggagcaaggcctgcgaccatacctgctcatccatgacggagtccgctcagaatttgatcagatcgacacatccaacccaaactgtgtggtaattgcagacgcaggagaaagcttttcttatcaaaacatgaataacgccttccaggtgctcatggagctggaaaaacctgtgctcatatcactgggaaaagggcgttactacaaggagacctctggcctgatgctggacgttggtccctacatgaaggcgcttgagtatgcctgtggcatcaaagccgaggtggtggggaagccttctcctgagtttttcaagtctgccctgcaagcgataggagtggaagcccaccaggccgtcatgattggggacgatatcgtgggcgacgtcggcggtgcccagcggtgtggaatgagagcgctgcaggtgcgcaccgggaagttcaggcccagtgacgagcaccatccggaagtgaaggctgatgggtacgtggacaacctcgcagaggcagtggacctgctgctgcagcacgccgacaagtgatggcctcctgggagagccccgcctcctccacccctgcctctcctccacccctgcctcccctccacccctgcctctcctccacccgcccaggagagccccacctcctccacccctgcctctcctccacccctgcctcccctccacctgccccagtgcccagaccaaccaaggccctgacagccctgccttctgccctctgccctgcatgggcaggcatttgttccctacctgggtggcctgctcccctgcctgggccctgacttcagctccctgtagtgaagtccaggagggtgggacaggcctgtcaggcctctgggaatctcccaaatcccagaactcaccactcaccatgggcctttaaatgcagtaaactccacctaaccagattcaggggcactatgcccactgcctcctcttcagactctttgcatttcagtgaagagcctggaagaaacccaggggcctcctatgcacagatcttgcagcccagaaccaagtcagcctccctgcgactgcccaggcacactgcccaccaccccacccccgaaacaatgccagcccgctgctttttctatcctcccagtcacctttgcagacaaagaccaggggcagctcccgagggcactgtgaaggctcccatgccacacagtgagaactgtagcctctgcgtccaaggcacacagggtactttctggacccactgctggacagacttgaaggtgtcatgcccggtgtgtgcaggaggaaactaacagttcagtaaactctgccttgaccagca

SEQ ID NO: 6286 - protein, 270 aa, Homo sapiens
MAPWGKRLAGVRGVLLDISGVLYDSGAGGGTAIAGSVEAVARLKRSRLKVRFCTNESQKSRAELVGQLQRLGFDISEQEVTAPAPAACQILKEQGLRPYLLIHDGVRSEFDQIDTSNPNCVVIADAGESFSYQNMNNAFQVLMELEKPVLISLGKGRYYKETSGLMLDVGPYMKALEYACGIKAEVVGKPSPEFFKSALQAIGVEAHQAVMIGDDIVGDVGGAQRCGMRALQVRTGKFRPSDEHHPEVKADGYVDNLAEAVDLLLQHADK

SEQ ID NO: 6287 - DNA, 1549 bp, Homo sapiens
cgccggcgtcggttgggacgcggagctgaggagcagggccgggcgccatggcaccgtggggcaagcggctggctggcgtgcgcggggtgctgcttgacatctcgggcgtgctgtacgacagcggcgcgggcggcggcacggccatcgccggctcggtggaggcggtggccagactgaagcgttcccggctgaaggtgaggttctgcaccaacgagtcgcagaagtcccgggcagagctggtggggcagcttcagaggctgggatttgacatctctgagcaggaggtgaccgccccggcaccagctgcctgccagatcctgaaggagcaaggcctgcgaccatacctgctcatccatgacggagtccgctcagaatttgatcagatcgacacatccaacccaaactgtgtggtaattgcagacgcaggagaaagcttttcttatcaaaacatgaataacgccttccaggtgctcatggagctggaaaaacctgtgctcatatcactgggaaaagggcgttactacaaggagacctctggcctgatgctggacgttggtccctacatgaaggcgcttgagtatgcctgtggcatcaaagccgaggtggtggggaagccttctcctgagtttttcaagtctgccctgcaagcgataggagtggaagcccaccaggcccagtgacgagcaccatccggaagtgaaggctgatgggtacgtggacaacctcgcagaggcagtggacctgctgctgcagcacgccgacaagtgatggcctcctgggagagccccgcctcctccacccctgcctctcctccacccctgcctcccctccacccctgcctctcctccacccgcccaggagagccccacctcctccacccctgcctctcctccacccctgcctcccctccacctgccccagtgcccagaccaaccaaggccctgacagccctgccttctgccctctgccctgcatgggcaggcatttgttccctacctgggtggcctgctcccctgcctgggccctgacttcagctccctgtagtgaagtccaggagggtgggacaggcctgtcaggcctctgggaatctcccaaatcccagaactcaccactcaccatgggcctttaaatgcagtaaactccacctaaccagattcaggggcactatgcccactgcctcctcttcagactctttgcatttcagtgaagagcctggaagaaacccaggggcctcctatgcacagatcttgcagcccagaaccaagtcagcctccctgcgactgcccaggcacactgcccaccaccccacccccgaaacaatgccagcccgctgctttttctatcctcccagtcacctttgcagacaaagaccaggggcagctcccgagggcactgtgaaggctcccatgccacacagtgagaactgtagcctctgcgtccaaggcacacagggtactttctggacccactgctggacagacttgaaggtgtcatgcccggtgtgtgcaggaggaaactaacagttcagtaaactctgccttgaccagca

SEQ ID NO: 6288 - protein, 210 aa, Homo sapiens
MAPWGKRLAGVRGVLLDISGVLYDSGAGGGTAIAGSVEAVARLKRSRLKVRFCTNESQKSRAELVGQLQRLGFDISEQEVTAPAPAACQILKEQGLRPYLLIHDGVRSEFDQIDTSNPNCVVIADAGESFSYQNMNNAFQVLMELEKPVLISLGKGRYYKETSGLMLDVGPYMKALEYACGIKAEVVGKPSPEFFKSALQAIGVEAHQAQ

SEQ ID NO: 6289 - DNA, 1376 bp, Homo sapiens
gacgcggagctgaggagcagggccgggcgccatggcaccgtggggcaagcggctggctggcgtgcgcggggtgctgcttgacatctcgggcgtgctgtacgacagcggcgcgggcggcggcacggccatcgccggctcggtggaggcggtggccagactgaagcgttcccggctgaaggtgaggttctgcaccaacgagtcgcagaagtcccgggcagagctggtggggcagcttcagaggctgggatttgacatctctgagcaggaggtgaccgccccggcaccagctgcctgccagatcctgaaggagcaaggcctgcgaccatacctgctcatccatgacggagtccgctcagaatttgatcagatcgacacatccaacccaaactgtgtggtaattgcagacgcaggagaaagcttttcttatcaaaacatgaataacgccttccaggtgctcatggagctggaaaaacctgtgctcatatcactgggaaaagggcccagtgacgagcaccatccggaagtgaaggctgatgggtacgtggacaacctcgcagaggcagtggacctgctgctgcagcacgccgacaagtgatggcctcctgggagagccccgcctcctccacccctgcctctcctccacccctgcctcccctccacccctgcctctcctccacccgcccaggagagccccacctcctccacccctgcctctcctccacccctgcctcccctccacctgccccagtgcccagaccaaccaaggccctgacagccctgccttctgccctctgccctgcatgggcaggcatttgttccctacctgggtggcctgctcccctgcctgggccctgacttcagctccctgtagtgaagtccaggagggtgggacaggcctgtcaggcctctgggaatctcccaaatcccagaactcaccactcaccatgggcctttaaatgcagtaaactccacctaaccagattcaggggcactatgcccactgcctcctcttcagactctttgcatttcagtgaagagcctggaagaaacccaggggcctcctatgcacagatcttgcagcccagaaccaagtcagcctccctgcgactgcccaggcacactgcccaccaccccacccccgaaacaatgccagcccgctgctttttctatcctcccagtcacctttgcagacaaagaccaggggcagctcccgagggcactgtgaaggctcccatgccacacagtgagaactgtagcctctgcgtccaaggcacacagggtactttctggacccactgctggacagacttgaaggtgtcatgcccggtgtgtgcaggaggaaactaacagttcagtaaactctgccttgaccagca

SEQ ID NO: 6290 - protein, 187 aa, Homo sapiens
MAPWGKRLAGVRGVLLDISGVLYDSGAGGGTAIAGSVEAVARLKRSRLKVRFCTNESQKSRAELVGQLQRLGFDISEQEVTAPAPAACQILKEQGLRPYLLIHDGVRSEFDQIDTSNPNCVVIADAGESFSYQNMNNAFQVLMELEKPVLISLGKGPSDEHHPEVKADGYVDNLAEAVDLLLQHADK

SEQ ID NO: 6291 - DNA, 313 bp, Homo sapiens
ggagtccgctcagaatttgatcagatcgacacatccaacccaaactgtgtggtaattgcagacgcaggagaaagcttttcttatcaaaacatgaataacgccttccaggtgctcatggagctggaaaaacctgtgctcatatcactgggaaaaggcatccacgggttcctctttgtggctagaacattcacgtcctaagtggggctgccgttggctgggttaaaccagtaaccagtaacaggagaaatacgtcgcatctctagtgtgtggagattaccgggcctttatattaaaaaaaaattttaagtgctta

SEQ ID NO: 6292 - protein, 35 aa, Homo sapiens
MNNAFQVLMELEKPVLISLGKGIHGFLFVARTFTS

SEQ ID NO: 6293 - DNA, 1084 bp, Homo sapiens
gagaacccagggctcgctgggatgctgtcctccctccctccctccctctgccaagctggtgggaaggcccttgccaaagcgcacaagaccccttcacacagcaggggcacaagctctttgaggcagagtcgcctgcaggtggggtggaaggggtgcgccccagacccaagaatcgcccgcctctccaagaccatccctggctgctggcccagtgacgagcaccatccggaagtgaaggctgatgggtacgtggacaacctcgcagaggcagtggacctgctgctgcagcacgccgacaagtgatggcctcctgggagagccccgcctcctccacccctgcctctcctccacccctgcctcccctccacccctgcctctcctccacccgcccaggagagccccacctcctccacccctgcctctcctccacccctgcctcccctccacctgccccagtgcccagaccaaccaaggccctgacagccctgccttctgccctctgccctgcatgggcaggcatttgttccctacctgggtggcctgctcccctgcctgggccctgacttcagctccctgtagtgaagtccaggagggtgggacaggcctgtcaggcctctgggaatctcccaaatcccagaactcaccactcaccatgggcctttaaatgcagtaaactccacctaaccagattcaggggcactatgcccactgcctcctcttcagactctttgcatttcagtgaagagcctggaagaaacccaggggcctcctatgcacagatcttgcagcccagaaccaagtcagcctccctgcgactgcccaggcacactgcccaccaccccacccccgaaacaatgccagcccgctgctttttctatcctcccagtcacctttgcagacaaagaccaggggcagctcccgagggcactgtgaaggctcccatgccacacagtgagaactgtagcctctgcgtccaaggcacacagggtactttctggacccactgctggacagacttgaaggtgtcatgcccggtgtgtgcaggaggaaactaacagttcagtaaactctgccttgaccagca

SEQ ID NO: 6294 - protein, 93 aa, Homo sapiens
MLSSLPPSLCQAGGKALAKAHKTPSHSRGTSSLRQSRLQVGWKGCAPDPRIARLSKTIPGCWPSDEHHPEVKADGYVDNLAEAVDLLLQHADK

SEQ ID NO: 6295 - DNA, 1586 bp, Homo sapiens
gggctcgctgggatgctgtcctccctccctccctccctctgccaagctggtgggaaggcccttgccaaagcgcacaagaccccttcacacagcaggggcacaagctctttgaggcagagtcgcctgcaggtggggtggaaggggtgcgccccagacccaagaatcgcccgcctctccaagaccatccctggctgctggcccagtgacgagcaccatccggaagtgaaggctgatgggcacttcctggccctgcggggtgccctgtctctggctggagctgatgagccgtggtgtgatgcttgcctgggggtcggtgttgcctagaagtgaggaatgacctccttcacccctggctccttccggcagcctggccacttccagcatgtggagggggcccgggccctggcagagacggtgtggaaccgccggccgcatgcggggctggagttcggggctgccaatgggctaaggccctgtgttcaacacatgtcgcggaactgtcgtgaaaaaaagactcaggaccacaggtccggggtgctcccaggggtctttcccaccgaggctgggagtgagcagcagcctaggcccagccacacctcccaggctcgggagctgccaggccaggcaaccgtgaagggtagcagggtggggggtggaggggaggacagggagagcaggcctctcgggcctcacccacccttgcaccttccagctctagggcccacacagtaccaagccctgggctcaatgtaccacttatgaaaactcaattcaaattggcttagtgcaacaaggtatttggtggtctcacatgacttgaacatccaggcctggctgtcacgggaaccgcatctcttcccattgcagctacttggcaggtggcgggatgtcccccagccaccgacgtccccctgcctgctccgcaaccccagggcctgcagaaaaggcccacgagactcagactggcagagacttaggcggaccaggaacaggggcgcagtctccgtcccacccaaaccctaaccagagagaacacggcacgttgtgccagacggaggacggatgccagcgagggtccatgtcctcactgccgacaaggctgggaactgggccaagtgaagcagaggcctccacgtcagatgtgagcgccaccggcccaggtgactgcagttcttccctccttccgttcggcttgagccctccagaggatcggaaaggctgaggcctgacctggtgccgctgtcctgggtgggtctgtcctgctggtcggttcctgcccctctcggggaggttggctggcagctggcaggtggaaagcctcctgtgttcacctcagggcagaggtggggacacagggcgggacgggcgagtgtggtgcccctctggggtgggtgctcttgggtccgcctcccgtgccagagtgcgtgtcaacagttccagctgcccctcagaactgtcctggtttaggaggtgaacacacggggcagcctacattctacgtggtttttttaacattataaaagcagcatgtgttattacaggaaatttaacagaagtatataaaaagaaaccagaagtcacccggg

SEQ ID NO: 6296 - protein, 103 aa, Homo sapiens
MLSSLPPSLCQAGGKALAKAHKTPSHSRGTSSLRQSRLQVGWKGCAPDPRIARLSKTIPGCWPSDEHHPEVKADGHFLALRGALSLAGADEPWCDACLGVGVA

SEQ ID NO: 6297 - DNA, 2856 bp, Homo sapiens
caaacacgcagccccctcccgctggagtgacaactggccagcatactctaggctgttgtccctttaaaacttgaatccaagggggtaatgatttatcaaacttgtattatcaagaaaatgtcaaaccaagggcaccttgctttgcactgacgcaaacccggcctttcccaaggagatatagaaagcgcctctcctgcctgagccaaacccagtcttgtcaatagcgggtttcaccctccaccagttcagtctgttgcctgtgtcagacatggattgcagtgctcccaaggaaatgaataaactgccagccaacagcccggaggcggcggcggcgcagggccacccggatggcccatgcgctcccaggacgagcccggagcaggagcttcccgcggctgccgccccgccgccgccacgtgtgcccaggtccgcttccaccggcgcccaaactttccagtcagcggacgcgcgagcctgcgaggctgagcggccaggagtggggtcttgcaaactcagtagcccgcgggcgcaggcggcctctgcagctctgcgggacttgagagaggcgcaaggcgcgcaggcctcgccccctcccgggagctccgggcccggcaacgcgctgcactgtaagatcccttttctgcgaggcccggagggggatgcgaacgtgagtgtgggcaagggcaccctggagcggaacaatacccctgttgtgggctgggtgaacatgagccagagcaccgtggtgctggccacggatggaatcacgtccgtgctcccgggcagcgtggccaccgttgccacccaggaggacgagcaaggggatgagaataaggcccgagggaactggtccagcaaactggacttcatcctgtccatggtggggtacgcagtggggctgggcaatgtctggaggtttccctacctggccttccagaacgggggaggtgctttcctcatcccttacctgatgatgctggctctggctggattacccatcttcttcttggaggtgtcgctgggccagtttgccagccagggaccagtgtctgtgtggaaggccatcccagctctacaaggctgtggcatcgcgatgctgatcatctctgtcctaatagccatatactacaatgtgattatttgctatacacttttctacctgtttgcctcctttgtgtctgtactaccctggggctcctgcaacaacccttggaatacgccagaatgcaaagataaaaccaaacttttattagattcctgtgttatcagtgaccatcccaaaatacagatcaagaactcgactttctgcatgaccgcttatcccaacgtgacaatggttaatttcaccagccaggccaataagacatttgtcagtggaagtgaagagtacttcaagtactttgtgctgaagatttctgcagggattgaatatcctggcgagatcaggtggccactagctctctgcctcttcctggcttgggtcattgtgtatgcatcattggctaaaggaatcaagacttcaggaaaagtggtgtacttcacggccacgttcccgtatgtcgtactcgtgatcctcctcatccgaggagtcaccctgcctggagctggagctgggatctggtacttcatcacacccaagtgggagaaactcacggatgccacggtgtggaaagatgctgccactcagattttcttctctttatctgctgcatggggaggcctgatcactctctcttcttacaacaaattccacaacaactgctacagggacactctaattgtcacctgcaccaacagtgccacaagcatctttgccggcttcgtcatcttctccgttatcggcttcatggccaatgaacgcaaagtcaacattgagaatgtggcagaccaagggccaggcattgcatttgtggtttacccggaagccttaaccaggctgcctctctctccgttctgggccatcatctttttcctgatgctcctcactcttggacttgacactatgtttgccaccatcgagaccatagtgacctccatctcagacgagtttcccaagtacctacgcacacacaagccagtgtttactctgggctgctgcatttgtttcttcatcatgggttttccaatgatcactcagggtggaatttacatgtttcagcttgtggacacctatgctgcctcctatgcccttgtcatcattgccatttttgagctcgtggggatctcttatgtgtatggcttgcaaagattctgtgaagatatagagatgatgattggattccagcctaacatcttctggaaagtctgctgggcatttgtaaccccaaccattttaacctttatcctttgcttcagcttttaccagtgggagcccatgacctatggctcttaccgctatcctaactggtccatggtgctcggatggctaatgctcgcctgttccgtcatctggatcccaattatgtttgtgataaaaatgcatctggcccctggaagatttattgagaggctgaagttggtgtgctcgccacagccggactggggcccattcttagctcaacaccgcggggagcgttacaagaacatgatcgaccccttgggaacctcttccttgggactcaaactgccagtgaaggatttggaactgggcactcagtgctagtccagtggtgtgggatggtccagacttgatcctgtttttcctctctgcctcctcctaatgttttccatagctctcctcccatttttcttcatctttcttcctacatcttggttcacatccacgcatgagagtgattatgtagaaaagtaggcatagtgtcgcatgctgcagtaaagagctacatagaccacctg

SEQ ID NO: 6298 - protein, 797 aa, Homo sapiens; identical to SEQ ID NO: 846

SEQ ID NO: 6299 - DNA, 2831 bp, Homo sapiens
aaccctgcgattatggcaagagaaaactggtttgagcttgagaaaatttccccagattgtctccatctctcctgttgaacccctatgactgagtactctctttgtgggtgcaggaagagggcgctgaggtgggggtgcagaaaaggggtcctcgaggcggagcgagctgtggttggggtttgggaagtctatttgcaaaccttctcattctgcagggcagatgctgccacataggggtaattcctaaccatctttttttctttcttgcgtgattttcttaatggtattatcaaaagcccactcttctttcatagtcacattttggccccatgtgcaattcctccgggacctccaccttcttttccctctcccaccacaacattctctggagagaaaagctgggctgggctttgttttctacttgccggcaagaagagaatgggtcctctcccctctatgcgaccctttcaggacctgaccttccctatgaagatcccccaaatttaagacttctgtcccacttcctatttgtcctactaacacctaggaacgttatttataactggatatgtagagtcatgaaatctgaaatgacagcctctgatttataccaaatgaactccacttagcttgctcagtcttcccactctctctgaagcccccgctccccctcaccagcagtactcctttgatattcacaacagggatcccagaggagtccaaggaaacctcagaacagccgtccctcgtttcctggaaaccaattccaacgtttcagaatcctcttcactaataagaacgtgcccttctcacttgcacccactttcacttcctatatccttaacccctacacaactttgaccccaggagccccagtgaagttcaccaaatcagcgcagcttattaagagagaaggctttactagcatgctgttctggtctctgccctatttttctggatatttctgtgtgcaagccactgtcccatttggccctttatgttgtggtcctttggcagatgaaaaagaaagtgaacaagcaggtaaattccagctcaagaagtctactgcacaatccagaagttgagctgaatgattaagaggtaaactgatgtcagctgactccaactcagattcggctaagacccaaaggaaatctgtctgccttgactctgtattttcactaacagagtccacgtgtttttccttccacccggagcgtgttgcatttaaagctaacattaaaatcacacatcttgaagagaataggatttcccaagtcttgttgggccttgtggacaaggacaccatacaccatgttgtattataagagccatttcctgtctctcctctgcagtctttaagtacacctcagcaggaacagccttgagttgctttggactgttgtttccaaggcccttttattgatttcagaaagcccagaatccttaaaagtacagtgaccccagcaaggggaaaaggtggtctgggtaagatcttcagagctctctatctttaaagtctctgtgtaattagctggtcctgtgggatgggacttttagcttgttccattaaaaaataaagcaagacatatgttctgtcatagctttgcagcataacatccattaacagtaacaagagttaatctcaacaaggtcataaatcttttctagataactaagtactgcaatctcctcctataagtgcaacccttgagtggggattttgagtgtgtaggtctgttaagctaaggtgaccttcatagaatgggcccagcaagtttctctagtgacaatgaagggacacatggctatgtatgtacttggtggtggaatgttacagtgagacctgtgttcggtggaagccacactgaaacatcttacctgatgccagatcccaagtccaccctccccttcaggatggcctacctccatgggttcttcaggagccagtagttgtctttgattatccctctgcctcttcttcctgacctctaaatgttggagagccccaggactcactcctcaacccttcccttcccgccacactccctccctattaagctcatcccacctcatggatttaaatatctgtgcagggatgactctcaaatatgcatctctatccccagcctctattttgaaccccaggcctacatctctaactacctattagacatcttgaatataatatggccacatcatcaaaattaaaaacatttgcacttcaaagtacaccatcaatgaagtaaaaaaaacaaccgatggaaaagtatctttgcaagacatatctgattggaacttgtatctactaaaaaactattacaactagataatacaagacaataaaaggtccaatttgcaaataggcaaaagatctgaatagatattactccaaagtatatatacaagcggccaataaagacatgagaagatgttcgacatcattagccatctgggaaatgcaagtcaaaactacagtgagatatcacttcacatccactaggacggctagaataaaatagataataaatgttggtgaggatgtggagaaattggaactcatatactgctagttagaatgtaaagtgttctttaaacagttaaacatagagttgctgtacagcaactctatccctaatatccacacaaggtaaatgaaaacatatgtccatatactaacttgtacataaatgtttagagcattattcaaaatagccaaaaagtaggaacaacctaaatgtccattgacaaataagtggataaataaaatgtggtatgcctatataatggaatattattcagcaataaaaagacatgaagcattgacacat

SEQ ID NO: 6300 - protein, 99 aa, Homo sapiens
MCNSSGTSTFFSLSHHNILWREKLGWALFSTCRQEENGSSPLYATLSGPDLPYEDPPNLRLLSHFLFVLLTPRNVIYNWICRVMKSEMTASDLYQMNST

SEQ ID NO: 6301 - DNA, 3113 bp, Homo sapiens
atatgcgagcgcagcacccggcgctgccgagccacctcccccgccgcccgctagcaagtttggcggctccaagccaggcgcgcctcaggatccaggctcatttgcttccacctagcttcggtgccccctgctaggcggggaccctcgagagcgatgccgatggatttgattttagttgtgtggttctgtgtgtgcactgccaggacagcagaagatatgaagccacccgtgttatcgctgatatggagaactagagttctgaagtctctgcttcagcaatcccttcagggagtggtgggctttgggatggaccctgaccttcagatggatatcgtcaccgagcttgaccttgtgaacaccacccttggagttgctcaggtgtctggaatgcacaatgccagcaaagcatttttatttcaagacatagaaagagagatccatgcagctcctcatgtgagtgagaaattaattcagctgttccggaacaagagtgaattcaccattttggccactgtacagcagaagccatccacttcaggagtgatactgtccattcgagaactggagcacagctattttgaactggagagcagtggcctgagggatgagattcggtatcactacatacacaatgggaagccaaggacagaggcacttccttaccgcatggcagatggacaatggcacaaggttgcactgtcagttagcgcctctcatctcctgctccatgtcgactgtaacaggatttatgagcgtgtgatagaccctccagataccaaccttcccccaggaatcaatttatggcttggccagcgcaaccaaaagcatggcttattcaaagggatcatccaagatgggaagatcatctttatgccgaatggatatataacacagtgtccaaatctaaatcacacttgcccaacctgcagtgatttcttaagcctggtgcaaggaataatggatttacaagagcttttggccaagatgactgcaaaactaaattatgcagagacaagacttagtcaattggaaaactgtcattgtgagaagacttgtcaagtgagtggactgctctatcgagatcaagactcttgggtagatggtgaccattgcaggaactgcacttgcaaaagtggtgccgtggaatgccgaaggatgtcctgtccccctctcaattgctccccagactccctcccagtgcacattgctggccagtgctgtaaggtctgccgaccaaaatgtatctatggaggaaaagttcttgcagaaggccagcggattttaaccaagagctgtcgggaatgccgaggtggagttttagtaaaaattacagaaatgtgtcctcctttgaactgctcagaaaaggatcacattcttcctgagaatcagtgctgccgtgtctgtagaggtcataacttttgtgcagaaggacctaaatgtggtgaaaactcagagtgcaaaaactggaatacaaaagctacttgtgagtgcaagagtggttacatctctgtccagggagactctgcctactgtgaagacagaacacgatgaatgtggcagcggccagcacaactgtgatgagaatgccatctgcaccaacactgtccagggacacagctgcacctgcaaaccgggctacgtggggaacgggaccatctgcagagagatattgatgaatgttcagagggaatcattgagtgccacaaccattcccgctgcgttaacctgccagggtggtaccactgtgagtgcagaagcggtttccatgacgatgggacctattcactgtccggggagtcctgtattgacattgatgaatgtgccttaagaactcacacctgttggaacgattctgcctgcatcaacctggcagggggctttgactgtctctgcccctctgggccctcctgctctggtgactgtcctcatgaaggggggctgaagcacaatggccaggtgtggaccttgaaagaagacaggtgttctgtctgctcctgcaaggatggcaagatattctgccgacggacagcttgtgattgccagaatccaagtgctgacctattctgttgcccagaatgtgacaccagagtcacaagtcaatgtttagaccaaaatggtcacaagctgtatcgaagtggagacaattggacccatagctgtcagcagtgtcggtgtctggaaggagaggtagattgctggccactcacttgccccaacttgagctgtgagtatacagctatcttagaaggggaatgttgtccccgctgtgtcagtgacccctgcctagctgataacatcacctatgacatcagaaaaacttgcctggacagctatggtgtttcacggcttagtggctcagtgtggacgatggctggatctccctgcacaacctgtaaatgcaagaatggaagagtctgttgttctgtggattttgagtgtcttcaaaataattgaagtatttacagtggactcaacgcagaagaatggacgaaatgaccatccaacgtgattaaggataggaatcggtagtttggtttttttgtttgttttgtttttttaaccacagataattgccaaagtttccacctgaggacggtgtttggaggttgccttttggacctaccactttgctcattcttgctaacctagtctaggtgacctacagtgccgtgcatttaagtcaatggttgttaaaagaagtttcccgtgttgtaaatcatgtttcccttatcagatcatttgcaaatacatttaaatgatctcatggtaaatgttgatgtattttttggtttattttgtgtactaacataatagagagagactcagctccttttatttattttgttgatttatggatcaaattctaaaataaagttgcctgttgtgacttttgtcccatctactgcatacttagtgctgagatccctgtaaaatgttttgatgaaaatatgtatgtagagtccagtcgcattatacatacatttcatagtgctgaaccttcttaaatgcctactcattcagcttaaacaggctgaagccaagtatgacaaagaggggaagggccaaaaacataatcaaagaataattttaaagagaattcttgtctctcttgc

SEQ ID NO: 6302 - protein, 465 aa, Homo sapiens
MPMDLILVVWFCVCTARTAEDMKPPVLSLIWRTRVLKSLLQQSLQGVVGFGMDPDLQMDIVTELDLVNTTLGVAQVSGMHNASKAFLFQDIEREIHAAPHVSEKLIQLFRNKSEFTILATVQQKPSTSGVILSIRELEHSYFELESSGLRDEIRYHYIHNGKPRTEALPYRMADGQWHKVALSVSASHLLLHVDCNRIYERVIDPPDTNLPPGINLWLGQRNQKHGLFKGIIQDGKIIFMPNGYITQCPNLNHTCPTCSDFLSLVQGIMDLQELLAKMTAKLNYAETRLSQLENCHCEKTCQVSGLLYRDQDSWVDGDHCRNCTCKSGAVECRRMSCPPLNCSPDSLPVHIAGQCCKVCRPKCIYGGKVLAEGQRILTKSCRECRGGVLVKITEMCPPLNCSEKDHILPENQCCRVCRGHNFCAEGPKCGENSECKNWNTKATCECKSGYISVQGDSAYCEDRTR

SEQ ID NO: 6303 - DNA, 3019 bp, Homo sapiens
ggcgctgccgagccacctcccccgccgcccgctagcaagtttggcggctccaagccaggcgcgcctcaggatccaggctcatttgcttccacctagcttcggtgccccctgctaggcggggaccctcgagagcgatgccgatggatttgattttagttgtgtggttctgtgtgtgcactgccaggacagtggtgggctttgggatggaccctgaccttcagatggatatcgtcaccgagcttgaccttgtgaacaccacccttggagttgctcaggtgtctggaatgcacaatgccagcaaagcatttttatttcaagacatagaaagagagatccatgcagctcctcatgtgagtgagaaattaattcagctgttccggaacaagagtgaattcaccattttggccactgtacagcagaagccatccacttcaggagtgatactgtccattcgagaactggagcacagctattttgaactggagagcagtggcctgagggatgagattcggtatcactacatacacaatgggaagccaaggacagaggcacttccttaccgcatggcagatggacaatggcacaaggttgcactgtcagttagcgcctctcatctcctgctccatgtcgactgtaacaggatttatgagcgtgtgatagaccctccagataccaaccttcccccaggaatcaatttatggcttggccagcgcaaccaaaagcatggcttattcaaagggatcatccaagatgggaagatcatctttatgccgaatggatatataacacagtgtccaaatctaaatcacacttgcccaacctgcagtgatttcttaagcctggtgcaaggaataatggatttacaagagcttttggccaagatgactgcaaaactaaattatgcagagacaagacttagtcaattggaaaactgtcattgtgagaagacttgtcaagtgagtggactgctctatcgagatcaagactcttgggtagatggtgaccattgcaggaactgcacttgcaaaagtggtgccgtggaatgccgaaggatgtcctgtccccctctcaattgctccccagactccctcccagtgcacattgctggccagtgctgtaaggtctgccgaccaaaatgtatctatggaggaaaagttcttgcagaaggccagcggattttaaccaagagctgtcgggaatgccgaggtggagttttagtaaaaattacagaaatgtgtcctcctttgaactgctcagaaaaggatcacattcttcctgagaatcagtgctgccgtgtctgtagaggtcataacttttgtgcagaaggacctaaatgtggtgaaaactcagagtgcaaaaactggaatacaaaagctacttgtgagtgcaagagtggttacatctctgtccagggagactctgcctactgtgaagatattgatgagtgtgcagctaagatgcattactgtcatgccaatactgtgtgtgtcaaccttcctgggttatatcgctgtgactgtgtcccaggatacattcgtgtggatgacttctcttgtacagaacacgatgaatgtggcagcggccagcacaactgtgatgagaatgccatctgcaccaacactgtccagggacacagctgcacctgcaaaccgggctacgtggggaacgggaccatctgcagagctttctgtgaagagggctgcagatacggtggaacgtgtgtggctcccaacaaatgtgtctgtccatctggattcacaggaagccactgcgagaaagatattgatgaatgttcagagggaatcattgagtgccacaaccattcccgctgcgttaacctgccagggtggtaccactgtgagtgcagaagcggtttccatgacgatgggacctattcactgtccggggagtcctgtattgacattgatgaatgtgccttaagaactcacacctgttggaacgattctgcctgcatcaacctggcagggggctttgactgtctctgcccctctgggccctcctgctctggtgactgtcctcatgaaggggggctgaagcacaatggccaggtgtggaccttgaaagaagacaggtgttctgtctgctcctgcaaggatggcaagatattctgccgacggacagcttgtgattgccagaatccaagtgctgacctattctgttgcccagaatgtgacaccagagtcacaagtcaatgtttagaccaaaatggtcacaagctgtatcgaagtggagacaattggacccatagctgtcagcagtgtcggtgtctggaaggagaggtagattgctggccactcacttgccccaacttgagctgtgagtatacagctatcttagaaggggaatgttgtccccgctgtgtcagtgacccctgcctagctgataacatcacctatgacatcagaaaaacttgcctggacagctatggtgtttcacggcttagtggctcagtgtggacgatggctggatctccctgcacaacctgtaaatgcaagaatggaagagtctgttgttctgtggattttgagtgtcttcaaaataattgaagtatttacagtggactcaacgcagaagaatggacgaaatgaccatccaacgtgattaaggataggaatcggtagtttggtttttttgtttgttttgtttttttaaccacagataattgccaaagtttccacctgaggacggtgtttggaggttgccttttggacctaccactttgctcattcttgctaacctagtctaggtgacctacagtgccgtgcatttaagtcaatggttgttaaaagaagtttcccgtgttgtaaatcatgtttcccttatcagatcatttgcaaatacatttaaatgatctcatggtaaatgttgatgtattttttggtttattttgtgtactaacataatagagagagactcagctccttttatttattttgttgatttatggatcaaattctaaaataaagttgcctgttgtgacttttgtcccatctactgc

SEQ ID NO: 6304 - protein, 810 aa, Homo sapiens
MPMDLILVVWFCVCTARTVVGFGMDPDLQMDIVTELDLVNTTLGVAQVSGMHNASKAFLFQDIEREIHAAPHVSEKLIQLFRNKSEFTILATVQQKPSTSGVILSIRELEHSYFELESSGLRDEIRYHYIHNGKPRTEALPYRMADGQWHKVALSVSASHLLLHVDCNRIYERVIDPPDTNLPPGINLWLGQRNQKHGLFKGIIQDGKIIFMPNGYITQCPNLNHTCPTCSDFLSLVQGIMDLQELLAKMTAKLNYAETRLSQLENCHCEKTCQVSGLLYRDQDSWVDGDHCRNCTCKSGAVECRRMSCPPLNCSPDSLPVHIAGQCCKVCRPKCIYGGKVLAEGQRILTKSCRECRGGVLVKITEMCPPLNCSEKDHILPENQCCRVCRGHNFCAEGPKCGENSECKNWNTKATCECKSGYISVQGDSAYCEDIDECAAKMHYCHANTVCVNLPGLYRCDCVPGYIRVDDFSCTEHDECGSGQHNCDENAICTNTVQGHSCTCKPGYVGNGTICRAFCEEGCRYGGTCVAPNKCVCPSGFTGSHCEKDIDECSEGIIECHNHSRCVNLPGWYHCECRSGFHDDGTYSLSGESCIDIDECALRTHTCWNDSACINLAGGFDCLCPSGPSCSGDCPHEGGLKHNGQVWTLKEDRCSVCSCKDGKIFCRRTACDCQNPSADLFCCPECDTRVTSQCLDQNGHKLYRSGDNWTHSCQQCRCLEGEVDCWPLTCPNLSCEYTAILEGECCPRCVSDPCLADNITYDIRKTCLDSYGVSRLSGSVWTMAGSPCTTCKCKNGRVCCSVDFECLQNN

SEQ ID NO: 6305 - DNA, 3226 bp, Homo sapiens
ggcgctgccgagccacctcccccgccgcccgctagcaagtttggcggctccaagccaggcgcgcctcaggatccaggctcatttgcttccacctagcttcggtgccccctgctaggcggggaccctcgagagcgatgccgatggatttgattttagttgtgtggttctgtgtgtgcactgccaggacagtggtgggctttgggatggaccctgaccttcagatggatatcgtcaccgagcttgaccttgtgaacaccacccttggagttgctcaggtgtctggaatgcacaatgccagcaaagcatttttatttcaagacatagaaagagagatccatgcagctcctcatgtgagtgagaaattaattcagctgttccggaacaagagtgaattcaccattttggccactgtacagcagaagccatccacttcaggagtgatactgtccattcgagaactggagcacagctattttgaactggagagcagtggcctgagggatgagattcggtatcactacatacacaatgggaagccaaggacagaggcacttccttaccgcatggcagatggacaatggcacaaggttgcactgtcagttagcgcctctcatctcctgctccatgtcgactgtaacaggatttatgagcgtgtgatagaccctccagataccaaccttcccccaggaatcaatttatggcttggccagcgcaaccaaaagcatggcttattcaaagggatcatccaagatgggaagatcatctttatgccgaatggatatataacacagtgtccaaatctaaatcacacttgcccaacctgcagtgatttcttaagcctggtgcaaggaataatggatttacaagagcttttggccaagatgactgcaaaactaaattatgcagagacaagacttagtcaattggaaaactgtcattgtgagaagacttgtcaagtgagtggactgctctatcgagatcaagactcttgggtagatggtgaccattgcaggaactgcacttgcaaaagtggtgccgtggaatgccgaaggatgtcctgtccccctctcaattgctccccagactccctcccagtgcacattgctggccagtgctgtaaggtctgccgaccaaaatgtatctatggaggaaaagttcttgcagaaggccagcggattttaaccaagagctgtcgggaatgccgaggtggagttttagtaaaaattacagaaatgtgtcctcctttgaactgctcagaaaaggatcacattcttcctgagaatcagtgctgccgtgtctgtagaggtcataacttttgtgcagaaggacctaaatgtggtgaaaactcagagtgcaaaaactggaatacaaaagctacttgtgagtgcaagagtggttacatctctgtccagggagactctgcctactgtgaagatattgatgagtgtgcagctaagatgcattactgtcatgccaatactgtgtgtgtcaaccttcctgggttatatcgctgtgactgtgtcccaggatacattcgtgtggatgacttctcttgtacagaacacgatgaatgtggcagcggccagcacaactgtgatgagaatgccatctgcaccaacactgtccagggacacagctgcacctgcaaaccgggctacgtggggaacgggaccatctgcagagctttctgtgaagagggctgcagatacggtggaacgtgtgtggctcccaacaaatgtgtctgtccatctggattcacaggaagccactgcgagaaagatattgatgaatgttcagagggaatcattgagtgccacaaccattcccgctgcgttaacctgccagggtggtaccactgtgagtgcagaagcggtttccatgacgatgggacctattcactgtccggggagtcctgtattgacattgatgaatgtgccttaagaactcacacctgttggaacgattctgcctgcatcaacctggcagggggctttgactgtctctgcccctctgggccctcctgctctggtgactgtcctcatgaaggggggctgaagcacaatggccaggtgtggaccttgaaagaagacaggtgttctgtctgctcctgcaaggatggcaagatattctgccgacggacagcttgtgattgccagaatccaagtgctgacctattctgttgcccagaatgtgacaccagagtcacaagtcaatgtttagaccaaaatggtcacaagctgtatcgaagtggagacaattggacccatagctgtcagcagtgtcggtgtctggaaggagaggtagattgctggccactcacttgccccaacttgagctgtgagtatacagctatcttagaaggggaatgttgtccccgctgtgtcagtgacccctgcctagctgataacatcacctatgacatcagaaaaacttgcctggacagctatggtgtttcacggcttagtggctcagtgtggacgatggctggatctccctgcacaacctgtaaatgcaagaatggaagagtctgttgttctgtggattttgagtgtcttcaaaataattgaagtatttacagtggactcaacgcagaagaatggacgaaatgaccatccaacgtgattaaggataggaatcggtagtttggtttttttgtttgttttgtttttttaaccacagataattgccaaagtttccacctgaggacggtgtttggaggttgccttttggacctaccactttgctcattcttgctaacctagtctaggtgacctacagtgccgtgcatttaagtcaatggttgttaaaagaagtttcccgtgttgtaaatcatgtttcccttatcagatcatttgcaaatacatttaaatgatctcatggtaaatgttgatgtattttttggtttattttgtgtactaacataatagagagagactcagctccttttatttattttgttgatttatggatcaaattctaaaataaagttgcctgttgtgacttttgtcccatctactgcatacttagtgctgagatccctgtaaaatgttttgatgaaaatatgtatgtagagtccagtcgcattatacatacatttcatagtgctgaaccttcttaaatgcctactcattcagcttaaacaggctgaagccaagtatgacaaagaggggaagggccaaaaacataatcaaagaataattttaaagagaattcttgtctctcttgc

SEQ ID NO: 6306 - protein, 810 aa, Homo sapiens; identical to SEQ ID NO: 6304

SEQ ID NO: 6307 - DNA, 398 bp, Homo sapiens
tctgcactagtcttgcctgtcctgatcttcctggggtgcgcgcactccttcagcgtgtcctggttttaaaagactaacccatccggatgggcctgaactcaagaagcaactattctaagctagactgagccttggcgtctccgcagcctgggaagctcggatagagctctttgaagaaggcggctgcaagccagtctccgaaccccaggggacttttgggcaagggagccggtggaagcagaaggaagaagatgcgctgagagtcctcacaactgcgtctccggaggcagaacgaagtggggacttcagacaatcaagcgtcatccttgctcccccctccccacacggaaccctgcgattatggcaagagaaaactggtttgagcttgagaaaatttc

SEQ ID NO: 6308 - protein, 92 aa, Homo sapiens
ARLSLGVSAAWEARIELFEEGGCKPVSEPQGTFGQGSRWKQKEEDALRVLTTASPEAERSGDFRQSSVILAPPSPHGTLRLWQEKTGLSLRK

SEQ ID NO: 6309 - DNA, 1154 bp, Homo sapiens
tcaccgcaagctccaccattttcccccatttttaaaacaaaaggtagtagccatatatacactattttacaccttgttttatcacttactaatatataccagagagctttccatcattttgtacatatgcacctatatctgtcaattattcccagaagtggaattgctgggtcagcaggaaaaatcatgtataattttgataggtattgcctaattgtcctgcacagggcttgaattgtttgtactcccacctttagtgtatgagaagacctgtttctccatagcctcatcaaacagagtgtgtgagattagatgagaaataggaggtgagcagtcttttaccccatccgtagtttgcagtgggaacactgcacagttgcaagagctggtgcaggtatcagattagttccagtggaaacgctgcctcaccatggccatgggcttgcgccagctctagtgacacacacggaatggacccacgttgccacttgcagaatttcctgtaaaacaggatggctcaatgaaattatctttcttctttgctataatagagtatctccaggtgtgcggacccatgggactctggagagcgtgaatgggcccaaggcaggttcaagaggcttgacatcattggctgacactttcgaacacgtgatagaagagctgttggatgaggaccagaaagttcggcccaatgaagaaaacaataaggacgcagacttgtacacgtccagggtgatgctcagtagtcaagtgcctttggagcctcctcttctctttctggttagatgaatttgtgctgttgtaagattagccacttgaatgacatgtttgtagggagccaacaaacaactggtgagcctggggggctcttctggtttccctccttgggctcatctctacagcttccttaagtgagcctaagatacattgctctagccctaaaagccaactcaacactttttctttacatattcttggacgaagatcagtcacatggctataaccccagttctgcagggctgaggaggcctcaggaaatttacaatcatggcacaaggggaagcaaacacatccttcttcatacaagggcaggaaggagaagtgcctgatggccgcggcgacacactcggccaccttcctgatctcgcgat

SEQ ID NO: 6310 - protein, 33 aa, Homo sapiens
MAQGEANTSFFIQGQEGEVPDGRGDTLGHLPDL

SEQ ID NO: 6311 - DNA, 1649 bp, Homo sapiens
tcaccgcaagctccaccattttcccccatttttaaaacaaaaggtagtagccatatatacactattttacaccttgttttatcacttactaatatataccagagagctttccatcattttgtacatatgcacctatatctgtcaattattcccagaagtggaattgctgggtcagcaggaaaaatcatgtataattttgataggtattgcctaattgtcctgcacagggcttgaattgtttgtactcccacctttagtgtatgagaagacctgtttctccatagcctcatcaaacagagtgtgtgagattagatgagaaataggaggtgagcagtcttttaccccatccgtagtttgcagtgggaacactgcacagttgcaagagctggtgcaggtatcagattagttccagtggaaacgctgcctcaccatggccatgggcttgcgccagctctagtgacacacacggaatggacccacgttgccacttgcagaatttcctgtgaaggctttcataacagacatttccagttttgttctcaggctccttgcagctgctcctctaaaagtgtgctctcttccaagagctgacaatggccagaagcaaggtgttctgtcttttgtgccatcatcatctaacttgccacacacatttgggatgtcagcctaggtataggttttgtatccactcagtatggcttgtgggtctggttgcctttgttattcatgctgagggcctctgggcatcagtttggtgtgagagaacccattccatgaccctccttcctttggctgttttgactcgatggctcttgttggcacagtctgtgagtgtctgatgctctatccatgccggaccatctgttctgctgtctctgtggtctgaagtcgttttctgaactattccttgataataaatttgagatgatcttgttctacctttcttttcaagtcacatcttagccccttagccacattcccgaagaacatgacaaatggatgggtcacaagtcacgtagcatagggtgtcagaccacgaggctttgaagggattctgttgggtgctgtaaaacaggatggctcaatgaaattatctttcttctttgctataatagagtatctccaggtgtgcggacccatgggactctggagagcgtgaatgggcccaaggcaggttcaagaggcttgacatcattggctgacactttcgaacacgtgatagaagagctgttggatgaggaccagaaagttcggcccaatgaagaaaacaataaggacgcagacttgtacacgtccagggtgatgctcagtagtcaagtgcctttggagcctcctcttctctttctggttagatgaatttgtgctgttgtaagattagccacttgaatgacatgtttgtagggagccaacaaacaactggtgagcctggggggctcttctggtttccctccttgggctcatctctacagcttccttaagtgagcctaagatacattgctctagccagttctgcagggctgaggaggcctcaggaaatttacaatcatggcacaaggggaagcaaacacatccttcttcatacaagggcaggaaggagaagtgcctgatggccgcggcgacacactcggccaccttcctgatctcgcgat

SEQ ID NO: 6312 - protein, 33 aa, Homo sapiens; identical to SEQ ID NO: 6310

SEQ ID NO: 6313 - DNA, 1171 bp, Homo sapiens
tcaccgcaagctccaccattttcccccatttttaaaacaaaaggtagtagccatatatacactattttacaccttgttttatcacttactaatatataccagagagctttccatcattttgtacatatgcacctatatctgtcaattattcccagaagtggaattgctgggtcagcaggaaaaatcatgtataattttgataggtattgcctaattgtcctgcacagggcttgaattgtttgtactcccacctttagtgtatgagaagacctgtttctccatagcctcatcaaacagagtgtgtgagattagatgagaaataggaggtgagcagtcttttaccccatccgtagtttgcagtgggaacactgcacagttgcaagagctggtgcaggtatcagattagttccagtggaaacgctgcctcaccatggccatgggcttgcgccagctctagtgacacacacggaatggacccacgttgccacttgcagaatttcctcagttggaaatgcagaaatcacccgtcttctgcatcactcacgctgggggctgtagactggagctgttcatatttggccatcttggaacctccctttccaagttctttattacagagtgggtcactgaaactgtaaaacaggatggctcaatgaaattatctttcttctttgctataatagagtatctccaggtgtgcggacccatgggactctggagagcgtgaatgggcccaaggcaggttcaagaggcttgacatcattggctgacactttcgaacacgtgatagaagagctgttggatgaggaccagaaagttcggcccaatgaagaaaacaataaggacgcagacttgtacacgtccagggtgatgctcagtagtcaagtgcctttggagcctcctcttctctttctggttagatgaatttgtgctgttgtaagattagccacttgaatgacatgtttgtagggagccaacaaacaactggtgagcctggggggctcttctggtttccctccttgggctcatctctacagcttccttaagtgagcctaagatacattgctctagccagttctgcagggctgaggaggcctcaggaaatttacaatcatggcacaaggggaagcaaacacatccttcttcatacaagggcaggaaggagaagtgc

SEQ ID NO: 6314 - protein, 71 aa, Homo sapiens
MQKSPVFCITHAGGCRLELFIFGHLGTSLSKFFITEWVTETVKQDGSMKLSFFFAIIEYLQVCGPMGLWRA

SEQ ID NO: 6315 - DNA, 1007 bp, Homo sapiens
agtagctggaagtttcctttattttaaggtgatattttaaaaccatttaacatgtatagtaggtcaacattggtgcatccagaaaatgaagcatttaggaaatctgtttcagtgtcttttcaatgtgtgtaacttttacttgcaaaccaatggaaccaagaaagtcatcatttgcctaaaatgcagtcatcacctcaaatgattcatttatactatgtgagttaattgccttcatctcattaatggccaaggagggaagggaggtcctggggtatttcttgttcattttgactcaccaggagggaaaatccccatccgtagtttgcagtgggaacactgcacagttgcaagagctggtgcaggtatcagattagttccagtggaaacgctgcctcaccatggccatgggcttgcgccagctctagtgacacacacggaatggacccacgttgccacttgcagaatttcctgtaaaacaggatggctcaatgaaattatctttcttctttgctataatagagtatctccaggtgtgcggacccatgggactctggagagcgtgaatgggcccaaggcaggttcaagaggcttgacatcattggctgacactttcgaacacgtgatagaagagctgttggatgaggaccagaaagttcggcccaatgaagaaaacaataaggacgcagacttgtacacgtccagggtgatgctcagtagtcaagtgcctttggagcctcctcttctctttctggttagatgaatttgtgctgttgtaagattagccacttgaatgacatgtttgtagggagccaacaaacaactggtgagcctggggggctcttctggtttccctccttgggctcatctctacagcttccttaagtgagcctaagatacattgctctagccagttctgcagggctgaggaggcctcaggaaatttacaatcatggcacaaggggaagcaaacacatccttcttcatacaagggcaggaaggagaagtgc

SEQ ID NO: 6316 - protein, 43 aa, Homo sapiens
MAKEGREVLGYFLFILTHQEGKSPSVVCSGNTAQLQELVQVSD

SEQ ID NO: 6317 - DNA, 849 bp, Homo sapiens
agtagctggaagtttcctttattttaaggtgatattttaaaaccatttaacatgtatagtaggtcaacattggtgcatccagaaaatgaagcatttaggaaatctgtttcagtgtcttttcaatgtgtgtaacttttacttgcaaaccaatggaaccaagaaagtcatcatttgcctaaaatgcagtcatcacctcaaatgattcatttatactatgtgagttaattgccttcatctcattaatggccaaggagggaagggaggtcctggggtatttcttgttcattttgactcaccaggagggaaaatcctgtaaaacaggatggctcaatgaaattatctttcttctttgctataatagagtatctccaggtgtgcggacccatgggactctggagagcgtgaatgggcccaaggcaggttcaagaggcttgacatcattggctgacactttcgaacacgtgatagaagagctgttggatgaggaccagaaagttcggcccaatgaagaaaacaataaggacgcagacttgtacacgtccagggtgatgctcagtagtcaagtgcctttggagcctcctcttctctttctggttagatgaatttgtgctgttgtaagattagccacttgaatgacatgtttgtagggagccaacaaacaactggtgagcctggggggctcttctggtttccctccttgggctcatctctacagcttccttaagtgagcctaagatacattgctctagccagttctgcagggctgaggaggcctcaggaaatttacaatcatggcacaaggggaagcaaacacatccttcttcatacaagggcaggaaggagaagtgc

SEQ ID NO: 6318 - protein, 119 aa, Homo sapiens
MAKEGREVLGYFLFILTHQEGKSCKTGWLNEIIFLLCYNRVSPGVRTHGTLESVNGPKAGSRGLTSLADTFEHVIEELLDEDQKVRPNEENNKDADLYTSRVMLSSQVPLEPPLLFLVR

SEQ ID NO: 6319 - DNA, 490 bp, Homo sapiens
cctttttgtccgacatctcagcgaggctgcggtgtctgctgctgctgtccgagcttcacaatgccacccaaggatgacaagaagaaggatgctggaaagtcggccaagaaagacaaagacccagttaacaaatccgggggcaaggccaaaaagaagaagtggtccaaaggcaaagttcgggacaagctcaataacttagtcttgtttgacaaagctacctatgacaaactctgtaaggaagttcccaattataaacttataaccccagctgtggtctctgagagactgaagattcgaggctccctggccagggcagcccttcaggagctccttagtaaaggacttatcaaactggtttcaaagcacagagctaaagtaatttacaccagaaataccaagggcggagatgctgcagctgctggtgaagatgcatgaataggtccaaccaactgtacatttggaaaaataaaactttattaaaaaaaaaaaa

SEQ ID NO: 6320 - protein, 124 aa, Homo sapiens [sequence omitted]

SEQ ID NO: 6321 - DNA, 839 bp, Homo sapiens
gactctcttttcagactcagcccacctgcacccaggtgattaaaagctttattgctcacacaaagcctgtttggtggtctcttcacacggacacacatgaaatttggtgccgtgactcggatcgggggtcctcccttgggagatcaatcccctgtcctcctgttctttgctccgtgagaaagatccacctacgacctcaggtcctcagaccgaccagcccaacgaacatctcaccaattttaaatcaggacctaccagtctgccctgctcatacttgatctggatgagactgataccctgcgagacgcaacagaatcagctcctgggattgtgttagcagaatgacgggagtgtgagatccaccacatggcgaggcaccccaggaacctgttttcttcttgaagagcaaccgagaactatttccaagttatccttcactttgagccaggcaatggtcaggtggagtaaaacataaggaagaacatctttttggttcaaagcatgaaaaaaattgggacagcatggaggtgtctgatttctgcttgggctgaggattcaggagaagatgtgtggaacacagcctggacatgccccaacctggttgatgaattccaccccaagtagtggaagaaacacacctacaacatgagcagagaagatttttcttctgtactttccaggacttgaagctgctttgttttttggtcgctgggtggggaaggaggaacaatagtatagcttccagaagagagaagagagatatctcttgagtgtgaattaagcagtaccaagaggcctcaagctagctctctctcctgctttaaattctactgttaaga

SEQ ID NO: 6322 - protein, 40 aa, Homo sapiens
MKKIGTAWRCLISAWAEDSGEDVWNTAWTCPNLVDEFHPK

SEQ ID NO: 6323 - DNA, 4642 bp, Homo sapiens
agtagctggaagtttcctttattttaaggtgatattttaaaaccatttaacatgtatagtaggtcaacattggtgcatccagaaaatgaagcatttaggaaatctgtttcagtgtcttttcaatgtgtgtaacttttacttgcaaaccaatggaaccaagaaagtcatcatttgcctaaaatgcagtcatcacctcaaatgattcatttatactatgtgagttaattgccttcatctcattaatggccaaggagggaagggaggtcctggggtatttcttgttcattttgactcaccaggagggaaaatcctgtaaaacaggatggctcaatgaaattatctttcttctttgctataatagagtatctctgtgggaagaggaaaaaaaaagtcaatttaaaggctccttatagttccccaactgctgttttattgtgctattcatgcctagacatcacatagctagaaaggcccatcagacccctcaggccactgctgttcctgtcacacattcctgcaaaggaccatgttgctaacttgaaaaaaattactattaattacacttgcagttgttgcttagtaacatttatgattttgtgtttctcgtgacagcatgagcagagatcattaaaaattaaacttacaaagctgctaaagtgggaagaaggagaacttgaagccacaatttttgcacttgcttagaagccatctaatctcaggtttatatgctagatcttgggggaaacactgcatgtctctggtttatattaaaccacatacagcacactactgacactgatttgtgtctggtgcagctggagtttatcaccaagacataaaaaaaccttgaccctgcagaatggcctggaattacaatcagatgggccacatggcatcccggtgaaagaaagccctaaccagttttctgtcttgtttctgctttctccctacagttccaccaggtgagaagagtgatgaccatccttttccttactatggttatttcatactttggttgcatgaaggctgcccccatgaaagaagcaaacatccgaggacaaggtggcttggcctacccaggtgtgcggacccatgggactctggagagcgtgaatgggcccaaggcaggttcaagaggcttgacatcattggctgacactttcgaacacgtgatagaagagctgttggatgaggaccagaaagttcggcccaatgaagaaaacaataaggacgcagacttgtacacgtccagggtgatgctcagtagtcaagtgcctttggagcctcctcttctctttctgctggaggaatacaaaaattacctagatgctgcaaacatgtccatgagggtccggcgccactctgaccctgcccgccgaggggagctgagcgtgtgtgacagtattagtgagtgggtaacggcagcagacaaaaagactgcagtggacatgtcgggcgggacggtcacagtccttgaaaaggtccctgtatcaaaaggccaactgaagcaatacttctacgagaccaagtgcaatcccatgggttacacaaaagaaggctgcaggggcatagacaaaaggcattggaactcccagtgccgaactacccagtcgtacgtgcgggcccttaccatggatagcaaaaagagaattggctggcgattcataaggatagacacttcttgtgtatgtacattgaccattaaaaggggaagatagtggatttatgttgtatagattagattatattgagacaaaaattatctatttgtatatatacataacagggtaaattattcagttaagaaaaaaataattttatgaactgcatgtataaatgaagtttatacagtacagtggttctacaatctatttattggacatgtccatgaccagaagggaaacagtcatttgcgcacaacttaaaaagtctgcattacattccttgataatgttgtggtttgttgccgttgccaagaactgaaaacataaaaagttaaaaaaaataataaattgcatgctgctttaattgtgaattgataataaactgtcctctttcagaaaacagaaaaaaaacacacacacacacaacaaaaatttgaaccaaaacattccgtttacattttagacagtaagtatcttcgttcttgttagtactatatctgttttactgcttttaacttctgatagcgttggaattaaaacaatgtcaaggtgctgttgtcattgctttactggcttaggggatgggggatggggggtatatttttgtttgttttgtgtttttttttcgtttgtttgttttgttttttagttcccacagggagtagagatggggaaagaattcctacaatatatattctggctgataaaagatacatttgtatgttgtgaagatgtttgcaatatcgatcagatgactagaaagtgaataaaaattaaggcaactgaacaaaaaaatgctcacactccacatcccgtgatgcacctcccaggccccgctcattctttgggcgttggtcagagtaagctgcttttgacggaaggacctatgtttgctcagaacacattctttccccccctccccctctggtctcctctttgttttgttttaaggaagaaaaatcagttgcgcgttctgaaatattttaccactgctgtgaacaagtgaacacattgtgtcacatcatgacactcgtataagcatggagaacagtgatttttttttagaacagaaaacaacaaaaaataaccccaaaatgaagattattttttatgaggagtgaacatttgggtaaatcatggctaagcttaaaaaaaactcatggtgaggcttaacaatgtcttgtaagcaaaaggtagagccctgtatcaacccagaaacacctagatcagaacaggaatccacattgccagtgacatgagactgaacagccaaatggaggctatgtggagttggcattgcatttaccggcagtgcgggaggaatttctgagtggccatcccaaggtctaggtggaggtggggcatggtatttgagacattccaaaacgaaggcctctgaaggacccttcagaggtggctctggaatgacatgtgtcaagctgcttggacctcgtgctttaagtgcctacattatctaactgtgctcaagaggttctcgactggaggaccacactcaagccgacttatgcccaccatcccacctctggataattttgcataaaattggattagcctggagcaggttgggagccaaatgtggcatttgtgatcatgagattgatgcaatgagatagaagatgtttgctacctgaacacttattgctttgaaactagacttgaggaaaccagggtttatcttttgagaacttttggtaagggaaaagggaacaggaaaagaaaccccaaactcaggccgaatgatcaaggggacccataggaaatcttgtccagagacaagacttcgggaaggtgtctggacattcagaacaccaagacttgaaggtgccttgctcaatggaagaggccaggacagagctgacaaaattttgctccccagtgaaggccacagcaaccttctgcccatcctgtctgttcatggagagggtccctgcctcacctctgccattttgggttaggagaagtcaagttgggagcctgaaatagtggttcttggaaaaatggatccccagtgaaaactagagctctaagcccattcagcccatttcacacctgaaaatgttagtgatcaccacttggaccagcatccttaagtatcagaaagccccaagcaattgctgcatcttagtagggtgagggataagcaaaagaggatgttcaccataacccaggaatgaagataccatcagcaaagaatttcaatttgttcagtctttcatttagagctagtctttcacagtaccatctgaatacctctttgaaagaaggaagactttacgtagtgtagatttgttttgtgttgtttgaaaatattatctttgtaattatttttaatatgtaaggaatgcttggaatatctgctgtatgtcaactttatgcagcttccttttgagggacaaatttaaaacaaacaaccccccatcacaaacttaaaggattgcaagggccagatctgttaagtggtttcataggagacacatccagcaattgtgtggtcagtggctcttttacccaataagatacatcacagtcacatgcttgatggtttatgttgacctaagatttattttgttaaaatctctctctgttgtgttcgttcttgttctgttttgttttgttttttaaagtcttgctgtggtctctttgtggcagaagtgtttcatgcatggcagcaggcctgttgcttttttatggcgattcccattgaaaatgtaagtaaatgtctgtggccttgttctctctatggtaaagatattattcaccatgtaaaacaaaaaacaatatttattgtattttagtatatttatataattatgttattgaaaaaaattggcattaaaacttaaccgcatcagaagcctattgtaaatacaagttctatttaagtgtactaattaacatataatatatgttttaaatatagaatttttaatgtttttaaatatattttcaaagtacat

SEQ ID NO: 6324 - protein, 56 aa, Homo sapiens
MAKEGREVLGYFLFILTHQEGKSCKTGWLNEIIFLLCYNRVSLWEEEKKSQFKGSL

SEQ ID NO: 6325 - DNA, 3840 bp, Homo sapiens
agtggacttacaagtccgaagccaatgtagcttggaaaacttgggaggcggaattcctaccgctgggaactgaaagggtctgcgacactctcgggcaggccgaacccacatctctacccatcctgcgcccctcttctgaagcgccctccagttccaccaggtgagaagagtgatgaccatccttttccttactatggttatttcatactttggttgcatgaaggctgcccccatgaaagaagcaaacatccgaggacaaggtggcttggcctacccaggtgtgcggacccatgggactctggagagcgtgaatgggcccaaggcaggttcaagaggcttgacatcattggctgacactttcgaacacgtgatagaagagctgttggatgaggaccagaaagttcggcccaatgaagaaaacaataaggacgcagacttgtacacgtccagggtgatgctcagtagtcaagtgcctttggagcctcctcttctctttctgctggaggaatacaaaaattacctagatgctgcaaacatgtccatgagggtccggcgccactctgaccctgcccgccgaggggagctgagcgtgtgtgacagtattagtgagtgggtaacggcagcagacaaaaagactgcagtggacatgtcgggcgggacggtcacagtccttgaaaaggtccctgtatcaaaaggccaactgaagcaatacttctacgagaccaagtgcaatcccatgggttacacaaaagaaggctgcaggggcatagacaaaaggcattggaactcccagtgccgaactacccagtcgtacgtgcgggcccttaccatggatagcaaaaagagaattggctggcgattcataaggatagacacttcttgtgtatgtacattgaccattaaaaggggaagatagtggatttatgttgtatagattagattatattgagacaaaaattatctatttgtatatatacataacagggtaaattattcagttaagaaaaaaataattttatgaactgcatgtataaatgaagtttatacagtacagtggttctacaatctatttattggacatgtccatgaccagaagggaaacagtcatttgcgcacaacttaaaaagtctgcattacattccttgataatgttgtggtttgttgccgttgccaagaactgaaaacataaaaagttaaaaaaaataataaattgcatgctgctttaattgtgaattgataataaactgtcctctttcagaaaacagaaaaaaaacacacacacacacaacaaaaatttgaaccaaaacattccgtttacattttagacagtaagtatcttcgttcttgttagtactatatctgttttactgcttttaacttctgatagcgttggaattaaaacaatgtcaaggtgctgttgtcattgctttactggcttaggggatgggggatggggggtatatttttgtttgttttgtgtttttttttcgtttgtttgttttgttttttagttcccacagggagtagagatggggaaagaattcctacaatatatattctggctgataaaagatacatttgtatgttgtgaagatgtttgcaatatcgatcagatgactagaaagtgaataaaaattaaggcaactgaacaaaaaaatgctcacactccacatcccgtgatgcacctcccaggccccgctcattctttgggcgttggtcagagtaagctgcttttgacggaaggacctatgtttgctcagaacacattctttccccccctccccctctggtctcctctttgttttgttttaaggaagaaaaatcagttgcgcgttctgaaatattttaccactgctgtgaacaagtgaacacattgtgtcacatcatgacactcgtataagcatggagaacagtgatttttttttagaacagaaaacaacaaaaaataaccccaaaatgaagattattttttatgaggagtgaacatttgggtaaatcatggctaagcttaaaaaaaactcatggtgaggcttaacaatgtcttgtaagcaaaaggtagagccctgtatcaacccagaaacacctagatcagaacaggaatccacattgccagtgacatgagactgaacagccaaatggaggctatgtggagttggcattgcatttaccggcagtgcgggaggaatttctgagtggccatcccaaggtctaggtggaggtggggcatggtatttgagacattccaaaacgaaggcctctgaaggacccttcagaggtggctctggaatgacatgtgtcaagctgcttggacctcgtgctttaagtgcctacattatctaactgtgctcaagaggttctcgactggaggaccacactcaagccgacttatgcccaccatcccacctctggataattttgcataaaattggattagcctggagcaggttgggagccaaatgtggcatttgtgatcatgagattgatgcaatgagatagaagatgtttgctacctgaacacttattgctttgaaactagacttgaggaaaccagggtttatcttttgagaacttttggtaagggaaaagggaacaggaaaagaaaccccaaactcaggccgaatgatcaaggggacccataggaaatcttgtccagagacaagacttcgggaaggtgtctggacattcagaacaccaagacttgaaggtgccttgctcaatggaagaggccaggacagagctgacaaaattttgctccccagtgaaggccacagcaaccttctgcccatcctgtctgttcatggagagggtccctgcctcacctctgccattttgggttaggagaagtcaagttgggagcctgaaatagtggttcttggaaaaatggatccccagtgaaaactagagctctaagcccattcagcccatttcacacctgaaaatgttagtgatcaccacttggaccagcatccttaagtatcagaaagccccaagcaattgctgcatcttagtagggtgagggataagcaaaagaggatgttcaccataacccaggaatgaagataccatcagcaaagaatttcaatttgttcagtctttcatttagagctagtctttcacagtaccatctgaatacctctttgaaagaaggaagactttacgtagtgtagatttgttttgtgttgtttgaaaatattatctttgtaattatttttaatatgtaaggaatgcttggaatatctgctgtatgtcaactttatgcagcttccttttgagggacaaatttaaaacaaacaaccccccatcacaaacttaaaggattgcaagggccagatctgttaagtggtttcataggagacacatccagcaattgtgtggtcagtggctcttttacccaataagatacatcacagtcacatgcttgatggtttatgttgacctaagatttattttgttaaaatctctctctgttgtgttcgttcttgttctgttttgttttgttttttaaagtcttgctgtggtctctttgtggcagaagtgtttcatgcatggcagcaggcctgttgcttttttatggcgattcccattgaaaatgtaagtaaatgtctgtggccttgttctctctatggtaaagatattattcaccatgtaaaacaaaaaacaatatttattgtattttagtatatttatataattatgttattgaaaaaaattggcattaaaacttaaccgcatcagaagcctattgtaaatacaagttctatttaagtgtactaattaacatataatatatgttttaaatatagaatttttaatgtttttaaatatattttcaaagtacat

SEQ ID NO: 6326 - protein, 247 aa, Homo sapiens; identical to SEQ ID NO: 850

SEQ ID NO: 6327 - DNA, 3941 bp, Homo sapiens
agtggacttacaagtccgaagccaatgtagcttggaaaacttgggaggcggaattcctaccgctgggaactgaaagggtctgcgacactctcgggcaggccgaacccacatctctacccatcctgcgcccctcttctgaagcgccctccagggaagttaagagttttgactttcggggagtggttgggatgtacgtgggggattcttgactcgggttagtctctggggatgcagagccgggaagaggaatggttccaccaggtgagaagagtgatgaccatccttttccttactatggttatttcatactttggttgcatgaaggctgcccccatgaaagaagcaaacatccgaggacaaggtggcttggcctacccaggtgtgcggacccatgggactctggagagcgtgaatgggcccaaggcaggttcaagaggcttgacatcattggctgacactttcgaacacgtgatagaagagctgttggatgaggaccagaaagttcggcccaatgaagaaaacaataaggacgcagacttgtacacgtccagggtgatgctcagtagtcaagtgcctttggagcctcctcttctctttctgctggaggaatacaaaaattacctagatgctgcaaacatgtccatgagggtccggcgccactctgaccctgcccgccgaggggagctgagcgtgtgtgacagtattagtgagtgggtaacggcagcagacaaaaagactgcagtggacatgtcgggcgggacggtcacagtccttgaaaaggtccctgtatcaaaaggccaactgaagcaatacttctacgagaccaagtgcaatcccatgggttacacaaaagaaggctgcaggggcatagacaaaaggcattggaactcccagtgccgaactacccagtcgtacgtgcgggcccttaccatggatagcaaaaagagaattggctggcgattcataaggatagacacttcttgtgtatgtacattgaccattaaaaggggaagatagtggatttatgttgtatagattagattatattgagacaaaaattatctatttgtatatatacataacagggtaaattattcagttaagaaaaaaataattttatgaactgcatgtataaatgaagtttatacagtacagtggttctacaatctatttattggacatgtccatgaccagaagggaaacagtcatttgcgcacaacttaaaaagtctgcattacattccttgataatgttgtggtttgttgccgttgccaagaactgaaaacataaaaagttaaaaaaaataataaattgcatgctgctttaattgtgaattgataataaactgtcctctttcagaaaacagaaaaaaaacacacacacacacaacaaaaatttgaaccaaaacattccgtttacattttagacagtaagtatcttcgttcttgttagtactatatctgttttactgcttttaacttctgatagcgttggaattaaaacaatgtcaaggtgctgttgtcattgctttactggcttaggggatgggggatggggggtatatttttgtttgttttgtgtttttttttcgtttgtttgttttgttttttagttcccacagggagtagagatggggaaagaattcctacaatatatattctggctgataaaagatacatttgtatgttgtgaagatgtttgcaatatcgatcagatgactagaaagtgaataaaaattaaggcaactgaacaaaaaaatgctcacactccacatcccgtgatgcacctcccaggccccgctcattctttgggcgttggtcagagtaagctgcttttgacggaaggacctatgtttgctcagaacacattctttccccccctccccctctggtctcctctttgttttgttttaaggaagaaaaatcagttgcgcgttctgaaatattttaccactgctgtgaacaagtgaacacattgtgtcacatcatgacactcgtataagcatggagaacagtgatttttttttagaacagaaaacaacaaaaaataaccccaaaatgaagattattttttatgaggagtgaacatttgggtaaatcatggctaagcttaaaaaaaactcatggtgaggcttaacaatgtcttgtaagcaaaaggtagagccctgtatcaacccagaaacacctagatcagaacaggaatccacattgccagtgacatgagactgaacagccaaatggaggctatgtggagttggcattgcatttaccggcagtgcgggaggaatttctgagtggccatcccaaggtctaggtggaggtggggcatggtatttgagacattccaaaacgaaggcctctgaaggacccttcagaggtggctctggaatgacatgtgtcaagctgcttggacctcgtgctttaagtgcctacattatctaactgtgctcaagaggttctcgactggaggaccacactcaagccgacttatgcccaccatcccacctctggataattttgcataaaattggattagcctggagcaggttgggagccaaatgtggcatttgtgatcatgagattgatgcaatgagatagaagatgtttgctacctgaacacttattgctttgaaactagacttgaggaaaccagggtttatcttttgagaacttttggtaagggaaaagggaacaggaaaagaaaccccaaactcaggccgaatgatcaaggggacccataggaaatcttgtccagagacaagacttcgggaaggtgtctggacattcagaacaccaagacttgaaggtgccttgctcaatggaagaggccaggacagagctgacaaaattttgctccccagtgaaggccacagcaaccttctgcccatcctgtctgttcatggagagggtccctgcctcacctctgccattttgggttaggagaagtcaagttgggagcctgaaatagtggttcttggaaaaatggatccccagtgaaaactagagctctaagcccattcagcccatttcacacctgaaaatgttagtgatcaccacttggaccagcatccttaagtatcagaaagccccaagcaattgctgcatcttagtagggtgagggataagcaaaagaggatgttcaccataacccaggaatgaagataccatcagcaaagaatttcaatttgttcagtctttcatttagagctagtctttcacagtaccatctgaatacctctttgaaagaaggaagactttacgtagtgtagatttgttttgtgttgtttgaaaatattatctttgtaattatttttaatatgtaaggaatgcttggaatatctgctgtatgtcaactttatgcagcttccttttgagggacaaatttaaaacaaacaaccccccatcacaaacttaaaggattgcaagggccagatctgttaagtggtttcataggagacacatccagcaattgtgtggtcagtggctcttttacccaataagatacatcacagtcacatgcttgatggtttatgttgacctaagatttattttgttaaaatctctctctgttgtgttcgttcttgttctgttttgttttgttttttaaagtcttgctgtggtctctttgtggcagaagtgtttcatgcatggcagcaggcctgttgcttttttatggcgattcccattgaaaatgtaagtaaatgtctgtggccttgttctctctatggtaaagatattattcaccatgtaaaacaaaaaacaatatttattgtattttagtatatttatataattatgttattgaaaaaaattggcattaaaacttaaccgcatcagaagcctattgtaaatacaagttctatttaagtgtactaattaacatataatatatgttttaaatatagaatttttaatgtttttaaatatattttcaaagtacat

SEQ ID NO: 6328 - protein, 262 aa, Homo sapiens; identical to SEQ ID NO: 858

SEQ ID NO: 6329 - DNA, 3969 bp, Homo sapiens
tccgggtccccgacgctgccgccgccgcgcccgggcgcacccgcccgctcgctgtcccgcgcaccccgtagcgcctcgggctcccgggccggacagaggagccagcccggtgcgcccctccacctcctgctcggggggctttaatgagacacccaccgctgctgtggggccggcggggagcagcaccgcgacggggaccggggctgggcgctggagccagaatcggaaccacgatgtgactccgccgccggggacccgtgaggtttgtgtggaccccgagttccaccaggtgagaagagtgatgaccatccttttccttactatggttatttcatactttggttgcatgaaggctgcccccatgaaagaagcaaacatccgaggacaaggtggcttggcctacccaggtgtgcggacccatgggactctggagagcgtgaatgggcccaaggcaggttcaagaggcttgacatcattggctgacactttcgaacacgtgatagaagagctgttggatgaggaccagaaagttcggcccaatgaagaaaacaataaggacgcagacttgtacacgtccagggtgatgctcagtagtcaagtgcctttggagcctcctcttctctttctgctggaggaatacaaaaattacctagatgctgcaaacatgtccatgagggtccggcgccactctgaccctgcccgccgaggggagctgagcgtgtgtgacagtattagtgagtgggtaacggcagcagacaaaaagactgcagtggacatgtcgggcgggacggtcacagtccttgaaaaggtccctgtatcaaaaggccaactgaagcaatacttctacgagaccaagtgcaatcccatgggttacacaaaagaaggctgcaggggcatagacaaaaggcattggaactcccagtgccgaactacccagtcgtacgtgcgggcccttaccatggatagcaaaaagagaattggctggcgattcataaggatagacacttcttgtgtatgtacattgaccattaaaaggggaagatagtggatttatgttgtatagattagattatattgagacaaaaattatctatttgtatatatacataacagggtaaattattcagttaagaaaaaaataattttatgaactgcatgtataaatgaagtttatacagtacagtggttctacaatctatttattggacatgtccatgaccagaagggaaacagtcatttgcgcacaacttaaaaagtctgcattacattccttgataatgttgtggtttgttgccgttgccaagaactgaaaacataaaaagttaaaaaaaataataaattgcatgctgctttaattgtgaattgataataaactgtcctctttcagaaaacagaaaaaaaacacacacacacacaacaaaaatttgaaccaaaacattccgtttacattttagacagtaagtatcttcgttcttgttagtactatatctgttttactgcttttaacttctgatagcgttggaattaaaacaatgtcaaggtgctgttgtcattgctttactggcttaggggatgggggatggggggtatatttttgtttgttttgtgtttttttttcgtttgtttgttttgttttttagttcccacagggagtagagatggggaaagaattcctacaatatatattctggctgataaaagatacatttgtatgttgtgaagatgtttgcaatatcgatcagatgactagaaagtgaataaaaattaaggcaactgaacaaaaaaatgctcacactccacatcccgtgatgcacctcccaggccccgctcattctttgggcgttggtcagagtaagctgcttttgacggaaggacctatgtttgctcagaacacattctttccccccctccccctctggtctcctctttgttttgttttaaggaagaaaaatcagttgcgcgttctgaaatattttaccactgctgtgaacaagtgaacacattgtgtcacatcatgacactcgtataagcatggagaacagtgatttttttttagaacagaaaacaacaaaaaataaccccaaaatgaagattattttttatgaggagtgaacatttgggtaaatcatggctaagcttaaaaaaaactcatggtgaggcttaacaatgtcttgtaagcaaaaggtagagccctgtatcaacccagaaacacctagatcagaacaggaatccacattgccagtgacatgagactgaacagccaaatggaggctatgtggagttggcattgcatttaccggcagtgcgggaggaatttctgagtggccatcccaaggtctaggtggaggtggggcatggtatttgagacattccaaaacgaaggcctctgaaggacccttcagaggtggctctggaatgacatgtgtcaagctgcttggacctcgtgctttaagtgcctacattatctaactgtgctcaagaggttctcgactggaggaccacactcaagccgacttatgcccaccatcccacctctggataattttgcataaaattggattagcctggagcaggttgggagccaaatgtggcatttgtgatcatgagattgatgcaatgagatagaagatgtttgctacctgaacacttattgctttgaaactagacttgaggaaaccagggtttatcttttgagaacttttggtaagggaaaagggaacaggaaaagaaaccccaaactcaggccgaatgatcaaggggacccataggaaatcttgtccagagacaagacttcgggaaggtgtctggacattcagaacaccaagacttgaaggtgccttgctcaatggaagaggccaggacagagctgacaaaattttgctccccagtgaaggccacagcaaccttctgcccatcctgtctgttcatggagagggtccctgcctcacctctgccattttgggttaggagaagtcaagttgggagcctgaaatagtggttcttggaaaaatggatccccagtgaaaactagagctctaagcccattcagcccatttcacacctgaaaatgttagtgatcaccacttggaccagcatccttaagtatcagaaagccccaagcaattgctgcatcttagtagggtgagggataagcaaaagaggatgttcaccataacccaggaatgaagataccatcagcaaagaatttcaatttgttcagtctttcatttagagctagtctttcacagtaccatctgaatacctctttgaaagaaggaagactttacgtagtgtagatttgttttgtgttgtttgaaaatattatctttgtaattatttttaatatgtaaggaatgcttggaatatctgctgtatgtcaactttatgcagcttccttttgagggacaaatttaaaacaaacaaccccccatcacaaacttaaaggattgcaagggccagatctgttaagtggtttcataggagacacatccagcaattgtgtggtcagtggctcttttacccaataagatacatcacagtcacatgcttgatggtttatgttgacctaagatttattttgttaaaatctctctctgttgtgttcgttcttgttctgttttgttttgttttttaaagtcttgctgtggtctctttgtggcagaagtgtttcatgcatggcagcaggcctgttgcttttttatggcgattcccattgaaaatgtaagtaaatgtctgtggccttgttctctctatggtaaagatattattcaccatgtaaaacaaaaaacaatatttattgtattttagtatatttatataattatgttattgaaaaaaattggcattaaaacttaaccgcatcagaagcctattgtaaatacaagttctatttaagtgtactaattaacatataatatatgttttaaatatagaatttttaatgtttttaaatatattttcaaagtacat

SEQ ID NO: 6330 - protein, 247 aa, Homo sapiens; identical to SEQ ID NO: 850

SEQ ID NO: 6331 - DNA, 4021 bp, Homo sapiens
ctttcccattcaccgcggagagggctgctctcgctgccgctccccccggcgaactagcatgaaatctccctgcctctgccgagatcaaatggagcttctcgctgatggggtgcgagtattacctccgccatgcaatttccactatcaataatttaacttctttgctgcagaacagaaggagtacataccgggcaccaaagactcgcgccccctcccccctttaattaagcgaagggaacgtgaaaaaataatagagtgtgggagttttggggccgaagtctttcccggagcagctgccttgatggttactttgacaagtagtgactgaaaagttccaccaggtgagaagagtgatgaccatccttttccttactatggttatttcatactttggttgcatgaaggctgcccccatgaaagaagcaaacatccgaggacaaggtggcttggcctacccaggtgtgcggacccatgggactctggagagcgtgaatgggcccaaggcaggttcaagaggcttgacatcattggctgacactttcgaacacgtgatagaagagctgttggatgaggaccagaaagttcggcccaatgaagaaaacaataaggacgcagacttgtacacgtccagggtgatgctcagtagtcaagtgcctttggagcctcctcttctctttctgctggaggaatacaaaaattacctagatgctgcaaacatgtccatgagggtccggcgccactctgaccctgcccgccgaggggagctgagcgtgtgtgacagtattagtgagtgggtaacggcagcagacaaaaagactgcagtggacatgtcgggcgggacggtcacagtccttgaaaaggtccctgtatcaaaaggccaactgaagcaatacttctacgagaccaagtgcaatcccatgggttacacaaaagaaggctgcaggggcatagacaaaaggcattggaactcccagtgccgaactacccagtcgtacgtgcgggcccttaccatggatagcaaaaagagaattggctggcgattcataaggatagacacttcttgtgtatgtacattgaccattaaaaggggaagatagtggatttatgttgtatagattagattatattgagacaaaaattatctatttgtatatatacataacagggtaaattattcagttaagaaaaaaataattttatgaactgcatgtataaatgaagtttatacagtacagtggttctacaatctatttattggacatgtccatgaccagaagggaaacagtcatttgcgcacaacttaaaaagtctgcattacattccttgataatgttgtggtttgttgccgttgccaagaactgaaaacataaaaagttaaaaaaaataataaattgcatgctgctttaattgtgaattgataataaactgtcctctttcagaaaacagaaaaaaaacacacacacacacaacaaaaatttgaaccaaaacattccgtttacattttagacagtaagtatcttcgttcttgttagtactatatctgttttactgcttttaacttctgatagcgttggaattaaaacaatgtcaaggtgctgttgtcattgctttactggcttaggggatgggggatggggggtatatttttgtttgttttgtgtttttttttcgtttgtttgttttgttttttagttcccacagggagtagagatggggaaagaattcctacaatatatattctggctgataaaagatacatttgtatgttgtgaagatgtttgcaatatcgatcagatgactagaaagtgaataaaaattaaggcaactgaacaaaaaaatgctcacactccacatcccgtgatgcacctcccaggccccgctcattctttgggcgttggtcagagtaagctgcttttgacggaaggacctatgtttgctcagaacacattctttccccccctccccctctggtctcctctttgttttgttttaaggaagaaaaatcagttgcgcgttctgaaatattttaccactgctgtgaacaagtgaacacattgtgtcacatcatgacactcgtataagcatggagaacagtgatttttttttagaacagaaaacaacaaaaaataaccccaaaatgaagattattttttatgaggagtgaacatttgggtaaatcatggctaagcttaaaaaaaactcatggtgaggcttaacaatgtcttgtaagcaaaaggtagagccctgtatcaacccagaaacacctagatcagaacaggaatccacattgccagtgacatgagactgaacagccaaatggaggctatgtggagttggcattgcatttaccggcagtgcgggaggaatttctgagtggccatcccaaggtctaggtggaggtggggcatggtatttgagacattccaaaacgaaggcctctgaaggacccttcagaggtggctctggaatgacatgtgtcaagctgcttggacctcgtgctttaagtgcctacattatctaactgtgctcaagaggttctcgactggaggaccacactcaagccgacttatgcccaccatcccacctctggataattttgcataaaattggattagcctggagcaggttgggagccaaatgtggcatttgtgatcatgagattgatgcaatgagatagaagatgtttgctacctgaacacttattgctttgaaactagacttgaggaaaccagggtttatcttttgagaacttttggtaagggaaaagggaacaggaaaagaaaccccaaactcaggccgaatgatcaaggggacccataggaaatcttgtccagagacaagacttcgggaaggtgtctggacattcagaacaccaagacttgaaggtgccttgctcaatggaagaggccaggacagagctgacaaaattttgctccccagtgaaggccacagcaaccttctgcccatcctgtctgttcatggagagggtccctgcctcacctctgccattttgggttaggagaagtcaagttgggagcctgaaatagtggttcttggaaaaatggatccccagtgaaaactagagctctaagcccattcagcccatttcacacctgaaaatgttagtgatcaccacttggaccagcatccttaagtatcagaaagccccaagcaattgctgcatcttagtagggtgagggataagcaaaagaggatgttcaccataacccaggaatgaagataccatcagcaaagaatttcaatttgttcagtctttcatttagagctagtctttcacagtaccatctgaatacctctttgaaagaaggaagactttacgtagtgtagatttgttttgtgttgtttgaaaatattatctttgtaattatttttaatatgtaaggaatgcttggaatatctgctgtatgtcaactttatgcagcttccttttgagggacaaatttaaaacaaacaaccccccatcacaaacttaaaggattgcaagggccagatctgttaagtggtttcataggagacacatccagcaattgtgtggtcagtggctcttttacccaataagatacatcacagtcacatgcttgatggtttatgttgacctaagatttattttgttaaaatctctctctgttgtgttcgttcttgttctgttttgttttgttttttaaagtcttgctgtggtctctttgtggcagaagtgtttcatgcatggcagcaggcctgttgcttttttatggcgattcccattgaaaatgtaagtaaatgtctgtggccttgttctctctatggtaaagatattattcaccatgtaaaacaaaaaacaatatttattgtattttagtatatttatataattatgttattgaaaaaaattggcattaaaacttaaccgcatcagaagcctattgtaaatacaagttctatttaagtgtactaattaacatataatatatgttttaaatatagaatttttaatgtttttaaatatattttcaaagtacat

SEQ ID NO: 6332 - protein, 247 aa, Homo sapiens; identical to SEQ ID NO: 850

SEQ ID NO: 6333 - DNA, 3825 bp, Homo sapiens
tttttttttcccttctgtcctccctccccgcgagtttcgggcgctggcttagagggttcccgctttctcaagggaaggggagctgccgagaccgcgctccgctccccagccgggccggatgcctcactgagcccagttccaccaggtgagaagagtgatgaccatccttttccttactatggttatttcatactttggttgcatgaaggctgcccccatgaaagaagcaaacatccgaggacaaggtggcttggcctacccaggtgtgcggacccatgggactctggagagcgtgaatgggcccaaggcaggttcaagaggcttgacatcattggctgacactttcgaacacgtgatagaagagctgttggatgaggaccagaaagttcggcccaatgaagaaaacaataaggacgcagacttgtacacgtccagggtgatgctcagtagtcaagtgcctttggagcctcctcttctctttctgctggaggaatacaaaaattacctagatgctgcaaacatgtccatgagggtccggcgccactctgaccctgcccgccgaggggagctgagcgtgtgtgacagtattagtgagtgggtaacggcagcagacaaaaagactgcagtggacatgtcgggcgggacggtcacagtccttgaaaaggtccctgtatcaaaaggccaactgaagcaatacttctacgagaccaagtgcaatcccatgggttacacaaaagaaggctgcaggggcatagacaaaaggcattggaactcccagtgccgaactacccagtcgtacgtgcgggcccttaccatggatagcaaaaagagaattggctggcgattcataaggatagacacttcttgtgtatgtacattgaccattaaaaggggaagatagtggatttatgttgtatagattagattatattgagacaaaaattatctatttgtatatatacataacagggtaaattattcagttaagaaaaaaataattttatgaactgcatgtataaatgaagtttatacagtacagtggttctacaatctatttattggacatgtccatgaccagaagggaaacagtcatttgcgcacaacttaaaaagtctgcattacattccttgataatgttgtggtttgttgccgttgccaagaactgaaaacataaaaagttaaaaaaaataataaattgcatgctgctttaattgtgaattgataataaactgtcctctttcagaaaacagaaaaaaaacacacacacacacaacaaaaatttgaaccaaaacattccgtttacattttagacagtaagtatcttcgttcttgttagtactatatctgttttactgcttttaacttctgatagcgttggaattaaaacaatgtcaaggtgctgttgtcattgctttactggcttaggggatgggggatggggggtatatttttgtttgttttgtgtttttttttcgtttgtttgttttgttttttagttcccacagggagtagagatggggaaagaattcctacaatatatattctggctgataaaagatacatttgtatgttgtgaagatgtttgcaatatcgatcagatgactagaaagtgaataaaaattaaggcaactgaacaaaaaaatgctcacactccacatcccgtgatgcacctcccaggccccgctcattctttgggcgttggtcagagtaagctgcttttgacggaaggacctatgtttgctcagaacacattctttccccccctccccctctggtctcctctttgttttgttttaaggaagaaaaatcagttgcgcgttctgaaatattttaccactgctgtgaacaagtgaacacattgtgtcacatcatgacactcgtataagcatggagaacagtgatttttttttagaacagaaaacaacaaaaaataaccccaaaatgaagattattttttatgaggagtgaacatttgggtaaatcatggctaagcttaaaaaaaactcatggtgaggcttaacaatgtcttgtaagcaaaaggtagagccctgtatcaacccagaaacacctagatcagaacaggaatccacattgccagtgacatgagactgaacagccaaatggaggctatgtggagttggcattgcatttaccggcagtgcgggaggaatttctgagtggccatcccaaggtctaggtggaggtggggcatggtatttgagacattccaaaacgaaggcctctgaaggacccttcagaggtggctctggaatgacatgtgtcaagctgcttggacctcgtgctttaagtgcctacattatctaactgtgctcaagaggttctcgactggaggaccacactcaagccgacttatgcccaccatcccacctctggataattttgcataaaattggattagcctggagcaggttgggagccaaatgtggcatttgtgatcatgagattgatgcaatgagatagaagatgtttgctacctgaacacttattgctttgaaactagacttgaggaaaccagggtttatcttttgagaacttttggtaagggaaaagggaacaggaaaagaaaccccaaactcaggccgaatgatcaaggggacccataggaaatcttgtccagagacaagacttcgggaaggtgtctggacattcagaacaccaagacttgaaggtgccttgctcaatggaagaggccaggacagagctgacaaaattttgctccccagtgaaggccacagcaaccttctgcccatcctgtctgttcatggagagggtccctgcctcacctctgccattttgggttaggagaagtcaagttgggagcctgaaatagtggttcttggaaaaatggatccccagtgaaaactagagctctaagcccattcagcccatttcacacctgaaaatgttagtgatcaccacttggaccagcatccttaagtatcagaaagccccaagcaattgctgcatcttagtagggtgagggataagcaaaagaggatgttcaccataacccaggaatgaagataccatcagcaaagaatttcaatttgttcagtctttcatttagagctagtctttcacagtaccatctgaatacctctttgaaagaaggaagactttacgtagtgtagatttgttttgtgttgtttgaaaatattatctttgtaattatttttaatatgtaaggaatgcttggaatatctgctgtatgtcaactttatgcagcttccttttgagggacaaatttaaaacaaacaaccccccatcacaaacttaaaggattgcaagggccagatctgttaagtggtttcataggagacacatccagcaattgtgtggtcagtggctcttttacccaataagatacatcacagtcacatgcttgatggtttatgttgacctaagatttattttgttaaaatctctctctgttgtgttcgttcttgttctgttttgttttgttttttaaagtcttgctgtggtctctttgtggcagaagtgtttcatgcatggcagcaggcctgttgcttttttatggcgattcccattgaaaatgtaagtaaatgtctgtggccttgttctctctatggtaaagatattattcaccatgtaaaacaaaaaacaatatttattgtattttagtatatttatataattatgttattgaaaaaaattggcattaaaacttaaccgcatcagaagcctattgtaaatacaagttctatttaagtgtactaattaacatataatatatgttttaaatatagaatttttaatgtttttaaatatattttcaaagtacat

SEQ ID NO: 6334 - protein, 247 aa, Homo sapiens; identical to SEQ ID NO: 850

SEQ ID NO: 6335 - DNA, 3769 bp, Homo sapiens
gtgtgtaatccgggcgataggagtccattcagcaccttggacagagccaacggatttgtccgaggtggcggtacccccagttccaccaggtgagaagagtgatgaccatccttttccttactatggttatttcatactttggttgcatgaaggctgcccccatgaaagaagcaaacatccgaggacaaggtggcttggcctacccaggtgtgcggacccatgggactctggagagcgtgaatgggcccaaggcaggttcaagaggcttgacatcattggctgacactttcgaacacgtgatagaagagctgttggatgaggaccagaaagttcggcccaatgaagaaaacaataaggacgcagacttgtacacgtccagggtgatgctcagtagtcaagtgcctttggagcctcctcttctctttctgctggaggaatacaaaaattacctagatgctgcaaacatgtccatgagggtccggcgccactctgaccctgcccgccgaggggagctgagcgtgtgtgacagtattagtgagtgggtaacggcagcagacaaaaagactgcagtggacatgtcgggcgggacggtcacagtccttgaaaaggtccctgtatcaaaaggccaactgaagcaatacttctacgagaccaagtgcaatcccatgggttacacaaaagaaggctgcaggggcatagacaaaaggcattggaactcccagtgccgaactacccagtcgtacgtgcgggcccttaccatggatagcaaaaagagaattggctggcgattcataaggatagacacttcttgtgtatgtacattgaccattaaaaggggaagatagtggatttatgttgtatagattagattatattgagacaaaaattatctatttgtatatatacataacagggtaaattattcagttaagaaaaaaataattttatgaactgcatgtataaatgaagtttatacagtacagtggttctacaatctatttattggacatgtccatgaccagaagggaaacagtcatttgcgcacaacttaaaaagtctgcattacattccttgataatgttgtggtttgttgccgttgccaagaactgaaaacataaaaagttaaaaaaaataataaattgcatgctgctttaattgtgaattgataataaactgtcctctttcagaaaacagaaaaaaaacacacacacacacaacaaaaatttgaaccaaaacattccgtttacattttagacagtaagtatcttcgttcttgttagtactatatctgttttactgcttttaacttctgatagcgttggaattaaaacaatgtcaaggtgctgttgtcattgctttactggcttaggggatgggggatggggggtatatttttgtttgttttgtgtttttttttcgtttgtttgttttgttttttagttcccacagggagtagagatggggaaagaattcctacaatatatattctggctgataaaagatacatttgtatgttgtgaagatgtttgcaatatcgatcagatgactagaaagtgaataaaaattaaggcaactgaacaaaaaaatgctcacactccacatcccgtgatgcacctcccaggccccgctcattctttgggcgttggtcagagtaagctgcttttgacggaaggacctatgtttgctcagaacacattctttccccccctccccctctggtctcctctttgttttgttttaaggaagaaaaatcagttgcgcgttctgaaatattttaccactgctgtgaacaagtgaacacattgtgtcacatcatgacactcgtataagcatggagaacagtgatttttttttagaacagaaaacaacaaaaaataaccccaaaatgaagattattttttatgaggagtgaacatttgggtaaatcatggctaagcttaaaaaaaactcatggtgaggcttaacaatgtcttgtaagcaaaaggtagagccctgtatcaacccagaaacacctagatcagaacaggaatccacattgccagtgacatgagactgaacagccaaatggaggctatgtggagttggcattgcatttaccggcagtgcgggaggaatttctgagtggccatcccaaggtctaggtggaggtggggcatggtatttgagacattccaaaacgaaggcctctgaaggacccttcagaggtggctctggaatgacatgtgtcaagctgcttggacctcgtgctttaagtgcctacattatctaactgtgctcaagaggttctcgactggaggaccacactcaagccgacttatgcccaccatcccacctctggataattttgcataaaattggattagcctggagcaggttgggagccaaatgtggcatttgtgatcatgagattgatgcaatgagatagaagatgtttgctacctgaacacttattgctttgaaactagacttgaggaaaccagggtttatcttttgagaacttttggtaagggaaaagggaacaggaaaagaaaccccaaactcaggccgaatgatcaaggggacccataggaaatcttgtccagagacaagacttcgggaaggtgtctggacattcagaacaccaagacttgaaggtgccttgctcaatggaagaggccaggacagagctgacaaaattttgctccccagtgaaggccacagcaaccttctgcccatcctgtctgttcatggagagggtccctgcctcacctctgccattttgggttaggagaagtcaagttgggagcctgaaatagtggttcttggaaaaatggatccccagtgaaaactagagctctaagcccattcagcccatttcacacctgaaaatgttagtgatcaccacttggaccagcatccttaagtatcagaaagccccaagcaattgctgcatcttagtagggtgagggataagcaaaagaggatgttcaccataacccaggaatgaagataccatcagcaaagaatttcaatttgttcagtctttcatttagagctagtctttcacagtaccatctgaatacctctttgaaagaaggaagactttacgtagtgtagatttgttttgtgttgtttgaaaatattatctttgtaattatttttaatatgtaaggaatgcttggaatatctgctgtatgtcaactttatgcagcttccttttgagggacaaatttaaaacaaacaaccccccatcacaaacttaaaggattgcaagggccagatctgttaagtggtttcataggagacacatccagcaattgtgtggtcagtggctcttttacccaataagatacatcacagtcacatgcttgatggtttatgttgacctaagatttattttgttaaaatctctctctgttgtgttcgttcttgttctgttttgttttgttttttaaagtcttgctgtggtctctttgtggcagaagtgtttcatgcatggcagcaggcctgttgcttttttatggcgattcccattgaaaatgtaagtaaatgtctgtggccttgttctctctatggtaaagatattattcaccatgtaaaacaaaaaacaatatttattgtattttagtatatttatataattatgttattgaaaaaaattggcattaaaacttaaccgcatcagaagcctattgtaaatacaagttctatttaagtgtactaattaacatataatatatgttttaaatatagaatttttaatgtttttaaatatattttcaaagtacat

SEQ ID NO: 6336 - protein, 247 aa, Homo sapiens; identical to SEQ ID NO: 850

SEQ ID NO: 6337 - DNA, 4067 bp, Homo sapiens
gtgtgtaatccgggcgataggagtccattcagcaccttggacagagccaacggatttgtccgaggtggcggtacccccaggtagtcttcttggccccgctgtaaagccaaccctgtgtcgcccttaaaaagcgtcttttctgaggttcggctcacactgagatcggggctggagagagagtcagattttggagcggagcgtttggaaagcgagccccagtttggtcccctcattgagctcgctgaagttggcttcctagcggtgtaggctggaatagactcttggcaagctccgggttggtatactgggttaactttgggaaatgcaagtgtttatctccaggatctagccaccggggtggtgtaagccgcaaagaagttccaccaggtgagaagagtgatgaccatccttttccttactatggttatttcatactttggttgcatgaaggctgcccccatgaaagaagcaaacatccgaggacaaggtggcttggcctacccaggtgtgcggacccatgggactctggagagcgtgaatgggcccaaggcaggttcaagaggcttgacatcattggctgacactttcgaacacgtgatagaagagctgttggatgaggaccagaaagttcggcccaatgaagaaaacaataaggacgcagacttgtacacgtccagggtgatgctcagtagtcaagtgcctttggagcctcctcttctctttctgctggaggaatacaaaaattacctagatgctgcaaacatgtccatgagggtccggcgccactctgaccctgcccgccgaggggagctgagcgtgtgtgacagtattagtgagtgggtaacggcagcagacaaaaagactgcagtggacatgtcgggcgggacggtcacagtccttgaaaaggtccctgtatcaaaaggccaactgaagcaatacttctacgagaccaagtgcaatcccatgggttacacaaaagaaggctgcaggggcatagacaaaaggcattggaactcccagtgccgaactacccagtcgtacgtgcgggcccttaccatggatagcaaaaagagaattggctggcgattcataaggatagacacttcttgtgtatgtacattgaccattaaaaggggaagatagtggatttatgttgtatagattagattatattgagacaaaaattatctatttgtatatatacataacagggtaaattattcagttaagaaaaaaataattttatgaactgcatgtataaatgaagtttatacagtacagtggttctacaatctatttattggacatgtccatgaccagaagggaaacagtcatttgcgcacaacttaaaaagtctgcattacattccttgataatgttgtggtttgttgccgttgccaagaactgaaaacataaaaagttaaaaaaaataataaattgcatgctgctttaattgtgaattgataataaactgtcctctttcagaaaacagaaaaaaaacacacacacacacaacaaaaatttgaaccaaaacattccgtttacattttagacagtaagtatcttcgttcttgttagtactatatctgttttactgcttttaacttctgatagcgttggaattaaaacaatgtcaaggtgctgttgtcattgctttactggcttaggggatgggggatggggggtatatttttgtttgttttgtgtttttttttcgtttgtttgttttgttttttagttcccacagggagtagagatggggaaagaattcctacaatatatattctggctgataaaagatacatttgtatgttgtgaagatgtttgcaatatcgatcagatgactagaaagtgaataaaaattaaggcaactgaacaaaaaaatgctcacactccacatcccgtgatgcacctcccaggccccgctcattctttgggcgttggtcagagtaagctgcttttgacggaaggacctatgtttgctcagaacacattctttccccccctccccctctggtctcctctttgttttgttttaaggaagaaaaatcagttgcgcgttctgaaatattttaccactgctgtgaacaagtgaacacattgtgtcacatcatgacactcgtataagcatggagaacagtgatttttttttagaacagaaaacaacaaaaaataaccccaaaatgaagattattttttatgaggagtgaacatttgggtaaatcatggctaagcttaaaaaaaactcatggtgaggcttaacaatgtcttgtaagcaaaaggtagagccctgtatcaacccagaaacacctagatcagaacaggaatccacattgccagtgacatgagactgaacagccaaatggaggctatgtggagttggcattgcatttaccggcagtgcgggaggaatttctgagtggccatcccaaggtctaggtggaggtggggcatggtatttgagacattccaaaacgaaggcctctgaaggacccttcagaggtggctctggaatgacatgtgtcaagctgcttggacctcgtgctttaagtgcctacattatctaactgtgctcaagaggttctcgactggaggaccacactcaagccgacttatgcccaccatcccacctctggataattttgcataaaattggattagcctggagcaggttgggagccaaatgtggcatttgtgatcatgagattgatgcaatgagatagaagatgtttgctacctgaacacttattgctttgaaactagacttgaggaaaccagggtttatcttttgagaacttttggtaagggaaaagggaacaggaaaagaaaccccaaactcaggccgaatgatcaaggggacccataggaaatcttgtccagagacaagacttcgggaaggtgtctggacattcagaacaccaagacttgaaggtgccttgctcaatggaagaggccaggacagagctgacaaaattttgctccccagtgaaggccacagcaaccttctgcccatcctgtctgttcatggagagggtccctgcctcacctctgccattttgggttaggagaagtcaagttgggagcctgaaatagtggttcttggaaaaatggatccccagtgaaaactagagctctaagcccattcagcccatttcacacctgaaaatgttagtgatcaccacttggaccagcatccttaagtatcagaaagccccaagcaattgctgcatcttagtagggtgagggataagcaaaagaggatgttcaccataacccaggaatgaagataccatcagcaaagaatttcaatttgttcagtctttcatttagagctagtctttcacagtaccatctgaatacctctttgaaagaaggaagactttacgtagtgtagatttgttttgtgttgtttgaaaatattatctttgtaattatttttaatatgtaaggaatgcttggaatatctgctgtatgtcaactttatgcagcttccttttgagggacaaatttaaaacaaacaaccccccatcacaaacttaaaggattgcaagggccagatctgttaagtggtttcataggagacacatccagcaattgtgtggtcagtggctcttttacccaataagatacatcacagtcacatgcttgatggtttatgttgacctaagatttattttgttaaaatctctctctgttgtgttcgttcttgttctgttttgttttgttttttaaagtcttgctgtggtctctttgtggcagaagtgtttcatgcatggcagcaggcctgttgcttttttatggcgattcccattgaaaatgtaagtaaatgtctgtggccttgttctctctatggtaaagatattattcaccatgtaaaacaaaaaacaatatttattgtattttagtatatttatataattatgttattgaaaaaaattggcattaaaacttaaccgcatcagaagcctattgtaaatacaagttctatttaagtgtactaattaacatataatatatgttttaaatatagaatttttaatgtttttaaatatattttcaaagtacat

SEQ ID NO: 6338 - protein, 247 aa, Homo sapiens; identical to SEQ ID NO: 850

SEQ ID NO: 6339 - DNA, 3984 bp, Homo sapiens
gtgtgtaatccgggcgataggagtccattcagcaccttggacagagccaacggatttgtccgaggtggcggtacccccaggtagtcttcttggccccgctgtaaagccaaccctgtgtcgcccttaaaaagcgtcttttctgaggttcggctcacactgagatcggggctggagagagagtcagattttggagcggagcgtttggaaagcgagccccagtttggtcccctcattgagctcgctgaagttggcttcctagcggtgtaggctggaatagactcttggcaagctccggttccaccaggtgagaagagtgatgaccatccttttccttactatggttatttcatactttggttgcatgaaggctgcccccatgaaagaagcaaacatccgaggacaaggtggcttggcctacccaggtgtgcggacccatgggactctggagagcgtgaatgggcccaaggcaggttcaagaggcttgacatcattggctgacactttcgaacacgtgatagaagagctgttggatgaggaccagaaagttcggcccaatgaagaaaacaataaggacgcagacttgtacacgtccagggtgatgctcagtagtcaagtgcctttggagcctcctcttctctttctgctggaggaatacaaaaattacctagatgctgcaaacatgtccatgagggtccggcgccactctgaccctgcccgccgaggggagctgagcgtgtgtgacagtattagtgagtgggtaacggcagcagacaaaaagactgcagtggacatgtcgggcgggacggtcacagtccttgaaaaggtccctgtatcaaaaggccaactgaagcaatacttctacgagaccaagtgcaatcccatgggttacacaaaagaaggctgcaggggcatagacaaaaggcattggaactcccagtgccgaactacccagtcgtacgtgcgggcccttaccatggatagcaaaaagagaattggctggcgattcataaggatagacacttcttgtgtatgtacattgaccattaaaaggggaagatagtggatttatgttgtatagattagattatattgagacaaaaattatctatttgtatatatacataacagggtaaattattcagttaagaaaaaaataattttatgaactgcatgtataaatgaagtttatacagtacagtggttctacaatctatttattggacatgtccatgaccagaagggaaacagtcatttgcgcacaacttaaaaagtctgcattacattccttgataatgttgtggtttgttgccgttgccaagaactgaaaacataaaaagttaaaaaaaataataaattgcatgctgctttaattgtgaattgataataaactgtcctctttcagaaaacagaaaaaaaacacacacacacacaacaaaaatttgaaccaaaacattccgtttacattttagacagtaagtatcttcgttcttgttagtactatatctgttttactgcttttaacttctgatagcgttggaattaaaacaatgtcaaggtgctgttgtcattgctttactggcttaggggatgggggatggggggtatatttttgtttgttttgtgtttttttttcgtttgtttgttttgttttttagttcccacagggagtagagatggggaaagaattcctacaatatatattctggctgataaaagatacatttgtatgttgtgaagatgtttgcaatatcgatcagatgactagaaagtgaataaaaattaaggcaactgaacaaaaaaatgctcacactccacatcccgtgatgcacctcccaggccccgctcattctttgggcgttggtcagagtaagctgcttttgacggaaggacctatgtttgctcagaacacattctttccccccctccccctctggtctcctctttgttttgttttaaggaagaaaaatcagttgcgcgttctgaaatattttaccactgctgtgaacaagtgaacacattgtgtcacatcatgacactcgtataagcatggagaacagtgatttttttttagaacagaaaacaacaaaaaataaccccaaaatgaagattattttttatgaggagtgaacatttgggtaaatcatggctaagcttaaaaaaaactcatggtgaggcttaacaatgtcttgtaagcaaaaggtagagccctgtatcaacccagaaacacctagatcagaacaggaatccacattgccagtgacatgagactgaacagccaaatggaggctatgtggagttggcattgcatttaccggcagtgcgggaggaatttctgagtggccatcccaaggtctaggtggaggtggggcatggtatttgagacattccaaaacgaaggcctctgaaggacccttcagaggtggctctggaatgacatgtgtcaagctgcttggacctcgtgctttaagtgcctacattatctaactgtgctcaagaggttctcgactggaggaccacactcaagccgacttatgcccaccatcccacctctggataattttgcataaaattggattagcctggagcaggttgggagccaaatgtggcatttgtgatcatgagattgatgcaatgagatagaagatgtttgctacctgaacacttattgctttgaaactagacttgaggaaaccagggtttatcttttgagaacttttggtaagggaaaagggaacaggaaaagaaaccccaaactcaggccgaatgatcaaggggacccataggaaatcttgtccagagacaagacttcgggaaggtgtctggacattcagaacaccaagacttgaaggtgccttgctcaatggaagaggccaggacagagctgacaaaattttgctccccagtgaaggccacagcaaccttctgcccatcctgtctgttcatggagagggtccctgcctcacctctgccattttgggttaggagaagtcaagttgggagcctgaaatagtggttcttggaaaaatggatccccagtgaaaactagagctctaagcccattcagcccatttcacacctgaaaatgttagtgatcaccacttggaccagcatccttaagtatcagaaagccccaagcaattgctgcatcttagtagggtgagggataagcaaaagaggatgttcaccataacccaggaatgaagataccatcagcaaagaatttcaatttgttcagtctttcatttagagctagtctttcacagtaccatctgaatacctctttgaaagaaggaagactttacgtagtgtagatttgttttgtgttgtttgaaaatattatctttgtaattatttttaatatgtaaggaatgcttggaatatctgctgtatgtcaactttatgcagcttccttttgagggacaaatttaaaacaaacaaccccccatcacaaacttaaaggattgcaagggccagatctgttaagtggtttcataggagacacatccagcaattgtgtggtcagtggctcttttacccaataagatacatcacagtcacatgcttgatggtttatgttgacctaagatttattttgttaaaatctctctctgttgtgttcgttcttgttctgttttgttttgttttttaaagtcttgctgtggtctctttgtggcagaagtgtttcatgcatggcagcaggcctgttgcttttttatggcgattcccattgaaaatgtaagtaaatgtctgtggccttgttctctctatggtaaagatattattcaccatgtaaaacaaaaaacaatatttattgtattttagtatatttatataattatgttattgaaaaaaattggcattaaaacttaaccgcatcagaagcctattgtaaatacaagttctatttaagtgtactaattaacatataatatatgttttaaatatagaatttttaatgtttttaaatatattttcaaagtacat

SEQ ID NO: 6340 - protein, 247 aa, Homo sapiens; identical to SEQ ID NO: 850

SEQ ID NO: 6341 - DNA, 4027 bp, Homo sapiens
ggcaatcattggtaacctcgctcattcattagaatcacgtaagaactcaaaaggaaacgtgtctctcggagtgagggcgtttgcgtaaatctataggtttttcgacatcgatgccagttgctttgtcttctgtagtcgccaaggtggttgagagtttaagcttgcggatattgcaaagggttattagattcataagtcacaccaagtggtgggcgatccactgagcaaagccgaacttctcacatgatgacttcaaacaagacacattaccttccagcatctgttggggagacgagattttaagacacttgagtctccaggacagcaaaggcacaatgttccaccaggtgagaagagtgatgaccatccttttccttactatggttatttcatactttggttgcatgaaggctgcccccatgaaagaagcaaacatccgaggacaaggtggcttggcctacccaggtgtgcggacccatgggactctggagagcgtgaatgggcccaaggcaggttcaagaggcttgacatcattggctgacactttcgaacacgtgatagaagagctgttggatgaggaccagaaagttcggcccaatgaagaaaacaataaggacgcagacttgtacacgtccagggtgatgctcagtagtcaagtgcctttggagcctcctcttctctttctgctggaggaatacaaaaattacctagatgctgcaaacatgtccatgagggtccggcgccactctgaccctgcccgccgaggggagctgagcgtgtgtgacagtattagtgagtgggtaacggcagcagacaaaaagactgcagtggacatgtcgggcgggacggtcacagtccttgaaaaggtccctgtatcaaaaggccaactgaagcaatacttctacgagaccaagtgcaatcccatgggttacacaaaagaaggctgcaggggcatagacaaaaggcattggaactcccagtgccgaactacccagtcgtacgtgcgggcccttaccatggatagcaaaaagagaattggctggcgattcataaggatagacacttcttgtgtatgtacattgaccattaaaaggggaagatagtggatttatgttgtatagattagattatattgagacaaaaattatctatttgtatatatacataacagggtaaattattcagttaagaaaaaaataattttatgaactgcatgtataaatgaagtttatacagtacagtggttctacaatctatttattggacatgtccatgaccagaagggaaacagtcatttgcgcacaacttaaaaagtctgcattacattccttgataatgttgtggtttgttgccgttgccaagaactgaaaacataaaaagttaaaaaaaataataaattgcatgctgctttaattgtgaattgataataaactgtcctctttcagaaaacagaaaaaaaacacacacacacacaacaaaaatttgaaccaaaacattccgtttacattttagacagtaagtatcttcgttcttgttagtactatatctgttttactgcttttaacttctgatagcgttggaattaaaacaatgtcaaggtgctgttgtcattgctttactggcttaggggatgggggatggggggtatatttttgtttgttttgtgtttttttttcgtttgtttgttttgttttttagttcccacagggagtagagatggggaaagaattcctacaatatatattctggctgataaaagatacatttgtatgttgtgaagatgtttgcaatatcgatcagatgactagaaagtgaataaaaattaaggcaactgaacaaaaaaatgctcacactccacatcccgtgatgcacctcccaggccccgctcattctttgggcgttggtcagagtaagctgcttttgacggaaggacctatgtttgctcagaacacattctttccccccctccccctctggtctcctctttgttttgttttaaggaagaaaaatcagttgcgcgttctgaaatattttaccactgctgtgaacaagtgaacacattgtgtcacatcatgacactcgtataagcatggagaacagtgatttttttttagaacagaaaacaacaaaaaataaccccaaaatgaagattattttttatgaggagtgaacatttgggtaaatcatggctaagcttaaaaaaaactcatggtgaggcttaacaatgtcttgtaagcaaaaggtagagccctgtatcaacccagaaacacctagatcagaacaggaatccacattgccagtgacatgagactgaacagccaaatggaggctatgtggagttggcattgcatttaccggcagtgcgggaggaatttctgagtggccatcccaaggtctaggtggaggtggggcatggtatttgagacattccaaaacgaaggcctctgaaggacccttcagaggtggctctggaatgacatgtgtcaagctgcttggacctcgtgctttaagtgcctacattatctaactgtgctcaagaggttctcgactggaggaccacactcaagccgacttatgcccaccatcccacctctggataattttgcataaaattggattagcctggagcaggttgggagccaaatgtggcatttgtgatcatgagattgatgcaatgagatagaagatgtttgctacctgaacacttattgctttgaaactagacttgaggaaaccagggtttatcttttgagaacttttggtaagggaaaagggaacaggaaaagaaaccccaaactcaggccgaatgatcaaggggacccataggaaatcttgtccagagacaagacttcgggaaggtgtctggacattcagaacaccaagacttgaaggtgccttgctcaatggaagaggccaggacagagctgacaaaattttgctccccagtgaaggccacagcaaccttctgcccatcctgtctgttcatggagagggtccctgcctcacctctgccattttgggttaggagaagtcaagttgggagcctgaaatagtggttcttggaaaaatggatccccagtgaaaactagagctctaagcccattcagcccatttcacacctgaaaatgttagtgatcaccacttggaccagcatccttaagtatcagaaagccccaagcaattgctgcatcttagtagggtgagggataagcaaaagaggatgttcaccataacccaggaatgaagataccatcagcaaagaatttcaatttgttcagtctttcatttagagctagtctttcacagtaccatctgaatacctctttgaaagaaggaagactttacgtagtgtagatttgttttgtgttgtttgaaaatattatctttgtaattatttttaatatgtaaggaatgcttggaatatctgctgtatgtcaactttatgcagcttccttttgagggacaaatttaaaacaaacaaccccccatcacaaacttaaaggattgcaagggccagatctgttaagtggtttcataggagacacatccagcaattgtgtggtcagtggctcttttacccaataagatacatcacagtcacatgcttgatggtttatgttgacctaagatttattttgttaaaatctctctctgttgtgttcgttcttgttctgttttgttttgttttttaaagtcttgctgtggtctctttgtggcagaagtgtttcatgcatggcagcaggcctgttgcttttttatggcgattcccattgaaaatgtaagtaaatgtctgtggccttgttctctctatggtaaagatattattcaccatgtaaaacaaaaaacaatatttattgtattttagtatatttatataattatgttattgaaaaaaattggcattaaaacttaaccgcatcagaagcctattgtaaatacaagttctatttaagtgtactaattaacatataatatatgttttaaatatagaatttttaatgtttttaaatatattttcaaagtacat

SEQ ID NO: 6342 - protein, 255 aa, Homo sapiens; identical to SEQ ID NO: 852

SEQ ID NO: 6343 - DNA, 1516 bp, Homo sapiens
agtggacttacaagtccgaagccaatgtagcttggaaaacttgggaggcggaattcctaccgctgggaactgaaagggtctgcgacactctcgggcaggccgaacccacatctctacccatcctgcgcccctcttctgaagcgccctccagggaagttaagagttttgactttcggggagtggttgggatgtacgtgggggattcttgactcgggttagtctctggggatgcagagccgggaagaggaatggttccaccaggtgagaagagtgatgaccatccttttccttactatggttatttcatactttggttgcatgaaggctgcccccatgaaagaagcaaacatccgaggacaaggtggcttggcctacccaggtgtgcggacccatgggactctggagagcgtgaatgggcccaaggcaggttcaagaggcttgacatcattggctgacactttcgaacacgtgatagaagagctgttggatgaggaccagaaagttcggcccaatgaagaaaacaataaggacgcagacttgtacacgtccagggtgatgctcagtagtcaagtgcctttggagcctcctcttctctttctgctggaggaatacaaaaattacctagatgctgcaaacatgtccatgagggtccggcgccactctgaccctgcccgccgaggggagctgagcgtgtgtgacagtattagtgagtgggtaacggcagcagacaaaaagactgcagtggacatgtcgggcgggacggtcacagtccttgaaaaggtccctgtatcaaaaggccaactgaagcaatacttctacgagaccaagtgcaatcccatgggttacacaaaagaaggctgcaggggcatagacaaaaggcattggaactcccagtgccgaactacccagtcgtacgtgcgggcccttaccatggatagcaaaaagagaattggctggcgattcataaggatagacacttcttgtgtatgtacattgaccattaaaaggggaagatagtggatttatgttgtatagattagattatattgagacaaaaattatctatttgtatatatacataacagggtaaattattcagttaagaaaaaaataattttatgaactgcatgtataaatgaagtttatacagtacagtggttctacaatctatttattggacatgtccatgaccagaagggaaacagtcatttgcgcacaacttaaaaagtctgcattacattccttgataatgttgtggtttgttgccgttgccaagaactgaaaacataaaaagttaaaaaaaataataaattgcatgctgctttaattgtgaattgataataaactgtcctctttcagaaaacagaaaaaaaacacacacacacacaacaaaaatttgaaccaaaacattccgtttacattttagacagtaagtatcttcgttcttgttagtactatatctgttttactgcttttaacttctgatagcgttggaattaaaacaatgtcaaggtgc

SEQ ID NO: 6344 - protein, 262 aa, Homo sapiens; identical to SEQ ID NO: 858

SEQ ID NO: 6345 - DNA, 1544 bp, Homo sapiens
tccgggtccccgacgctgccgccgccgcgcccgggcgcacccgcccgctcgctgtcccgcgcaccccgtagcgcctcgggctcccgggccggacagaggagccagcccggtgcgcccctccacctcctgctcggggggctttaatgagacacccaccgctgctgtggggccggcggggagcagcaccgcgacggggaccggggctgggcgctggagccagaatcggaaccacgatgtgactccgccgccggggacccgtgaggtttgtgtggaccccgagttccaccaggtgagaagagtgatgaccatccttttccttactatggttatttcatactttggttgcatgaaggctgcccccatgaaagaagcaaacatccgaggacaaggtggcttggcctacccaggtgtgcggacccatgggactctggagagcgtgaatgggcccaaggcaggttcaagaggcttgacatcattggctgacactttcgaacacgtgatagaagagctgttggatgaggaccagaaagttcggcccaatgaagaaaacaataaggacgcagacttgtacacgtccagggtgatgctcagtagtcaagtgcctttggagcctcctcttctctttctgctggaggaatacaaaaattacctagatgctgcaaacatgtccatgagggtccggcgccactctgaccctgcccgccgaggggagctgagcgtgtgtgacagtattagtgagtgggtaacggcagcagacaaaaagactgcagtggacatgtcgggcgggacggtcacagtccttgaaaaggtccctgtatcaaaaggccaactgaagcaatacttctacgagaccaagtgcaatcccatgggttacacaaaagaaggctgcaggggcatagacaaaaggcattggaactcccagtgccgaactacccagtcgtacgtgcgggcccttaccatggatagcaaaaagagaattggctggcgattcataaggatagacacttcttgtgtatgtacattgaccattaaaaggggaagatagtggatttatgttgtatagattagattatattgagacaaaaattatctatttgtatatatacataacagggtaaattattcagttaagaaaaaaataattttatgaactgcatgtataaatgaagtttatacagtacagtggttctacaatctatttattggacatgtccatgaccagaagggaaacagtcatttgcgcacaacttaaaaagtctgcattacattccttgataatgttgtggtttgttgccgttgccaagaactgaaaacataaaaagttaaaaaaaataataaattgcatgctgctttaattgtgaattgataataaactgtcctctttcagaaaacagaaaaaaaacacacacacacacaacaaaaatttgaaccaaaacattccgtttacattttagacagtaagtatcttcgttcttgttagtactatatctgttttactgcttttaacttctgatagcgttggaattaaaacaatgtcaaggtgc

SEQ ID NO: 6346 - protein, 247 aa, Homo sapiens; identical to SEQ ID NO: 850

SEQ ID NO: 6347 - DNA, 1596 bp, Homo sapiens
ctttcccattcaccgcggagagggctgctctcgctgccgctccccccggcgaactagcatgaaatctccctgcctctgccgagatcaaatggagcttctcgctgatggggtgcgagtattacctccgccatgcaatttccactatcaataatttaacttctttgctgcagaacagaaggagtacataccgggcaccaaagactcgcgccccctcccccctttaattaagcgaagggaacgtgaaaaaataatagagtgtgggagttttggggccgaagtctttcccggagcagctgccttgatggttactttgacaagtagtgactgaaaagttccaccaggtgagaagagtgatgaccatccttttccttactatggttatttcatactttggttgcatgaaggctgcccccatgaaagaagcaaacatccgaggacaaggtggcttggcctacccaggtgtgcggacccatgggactctggagagcgtgaatgggcccaaggcaggttcaagaggcttgacatcattggctgacactttcgaacacgtgatagaagagctgttggatgaggaccagaaagttcggcccaatgaagaaaacaataaggacgcagacttgtacacgtccagggtgatgctcagtagtcaagtgcctttggagcctcctcttctctttctgctggaggaatacaaaaattacctagatgctgcaaacatgtccatgagggtccggcgccactctgaccctgcccgccgaggggagctgagcgtgtgtgacagtattagtgagtgggtaacggcagcagacaaaaagactgcagtggacatgtcgggcgggacggtcacagtccttgaaaaggtccctgtatcaaaaggccaactgaagcaatacttctacgagaccaagtgcaatcccatgggttacacaaaagaaggctgcaggggcatagacaaaaggcattggaactcccagtgccgaactacccagtcgtacgtgcgggcccttaccatggatagcaaaaagagaattggctggcgattcataaggatagacacttcttgtgtatgtacattgaccattaaaaggggaagatagtggatttatgttgtatagattagattatattgagacaaaaattatctatttgtatatatacataacagggtaaattattcagttaagaaaaaaataattttatgaactgcatgtataaatgaagtttatacagtacagtggttctacaatctatttattggacatgtccatgaccagaagggaaacagtcatttgcgcacaacttaaaaagtctgcattacattccttgataatgttgtggtttgttgccgttgccaagaactgaaaacataaaaagttaaaaaaaataataaattgcatgctgctttaattgtgaattgataataaactgtcctctttcagaaaacagaaaaaaaacacacacacacacaacaaaaatttgaaccaaaacattccgtttacattttagacagtaagtatcttcgttcttgttagtactatatctgttttactgcttttaacttctgatagcgttggaattaaaacaatgtcaaggtgc

SEQ ID NO: 6348 - protein, 247 aa, Homo sapiens; identical to SEQ ID NO: 850

SEQ ID NO: 6349 - DNA, 1597 bp, Homo sapiens
gccaacggatttgtccgaggtggcggtacccccaggtagtcttcttggccccgctgtaaagccaaccctgtgtcgcccttaaaaagcgtcttttctgaggttcggctcacactgagatcggggctggagagagagtcagattttggagcggagcgtttggaaagcgagccccagtttggtcccctcattgagctcgctgaagttggcttcctagcggtgtaggctggaatagactcttggcaagctccgggttggtatactgggttaactttgggaaatgcaagtgtttatctccaggatctagccaccggggtggtgtaagccgcaaagaagttccaccaggtgagaagagtgatgaccatccttttccttactatggttatttcatactttggttgcatgaaggctgcccccatgaaagaagcaaacatccgaggacaaggtggcttggcctacccaggtgtgcggacccatgggactctggagagcgtgaatgggcccaaggcaggttcaagaggcttgacatcattggctgacactttcgaacacgtgatagaagagctgttggatgaggaccagaaagttcggcccaatgaagaaaacaataaggacgcagacttgtacacgtccagggtgatgctcagtagtcaagtgcctttggagcctcctcttctctttctgctggaggaatacaaaaattacctagatgctgcaaacatgtccatgagggtccggcgccactctgaccctgcccgccgaggggagctgagcgtgtgtgacagtattagtgagtgggtaacggcagcagacaaaaagactgcagtggacatgtcgggcgggacggtcacagtccttgaaaaggtccctgtatcaaaaggccaactgaagcaatacttctacgagaccaagtgcaatcccatgggttacacaaaagaaggctgcaggggcatagacaaaaggcattggaactcccagtgccgaactacccagtcgtacgtgcgggcccttaccatggatagcaaaaagagaattggctggcgattcataaggatagacacttcttgtgtatgtacattgaccattaaaaggggaagatagtggatttatgttgtatagattagattatattgagacaaaaattatctatttgtatatatacataacagggtaaattattcagttaagaaaaaaataattttatgaactgcatgtataaatgaagtttatacagtacagtggttctacaatctatttattggacatgtccatgaccagaagggaaacagtcatttgcgcacaacttaaaaagtctgcattacattccttgataatgttgtggtttgttgccgttgccaagaactgaaaacataaaaagttaaaaaaaataataaattgcatgctgctttaattgtgaattgataataaactgtcctctttcagaaaacagaaaaaaaacacacacacacacaacaaaaatttgaaccaaaacattccgtttacattttagacagtaagtatcttcgttcttgttagtactatatctgttttactgcttttaacttctgatagcgttggaattaaaacaatgtcaaggtgc

SEQ ID NO: 6350 - protein, 247 aa, Homo sapiens; identical to SEQ ID NO: 850

SEQ ID NO: 6351 - DNA, 1581 bp, Homo sapiens
tcattcattagaatcacgtaagaactcaaaaggaaacgtgtctctcggagtgagggcgtttgcgtaaatctataggtttttcgacatcgatgccagttgctttgtcttctgtagtcgccaaggtggttgagagtttaagcttgcggatattgcaaagggttattagattcataagtcacaccaagtggtgggcgatccactgagcaaagccgaacttctcacatgatgacttcaaacaagacacattaccttccagcatctgttggggagacgagattttaagacacttgagtctccaggacagcaaaggcacaatgttccaccaggtgagaagagtgatgaccatccttttccttactatggttatttcatactttggttgcatgaaggctgcccccatgaaagaagcaaacatccgaggacaaggtggcttggcctacccaggtgtgcggacccatgggactctggagagcgtgaatgggcccaaggcaggttcaagaggcttgacatcattggctgacactttcgaacacgtgatagaagagctgttggatgaggaccagaaagttcggcccaatgaagaaaacaataaggacgcagacttgtacacgtccagggtgatgctcagtagtcaagtgcctttggagcctcctcttctctttctgctggaggaatacaaaaattacctagatgctgcaaacatgtccatgagggtccggcgccactctgaccctgcccgccgaggggagctgagcgtgtgtgacagtattagtgagtgggtaacggcagcagacaaaaagactgcagtggacatgtcgggcgggacggtcacagtccttgaaaaggtccctgtatcaaaaggccaactgaagcaatacttctacgagaccaagtgcaatcccatgggttacacaaaagaaggctgcaggggcatagacaaaaggcattggaactcccagtgccgaactacccagtcgtacgtgcgggcccttaccatggatagcaaaaagagaattggctggcgattcataaggatagacacttcttgtgtatgtacattgaccattaaaaggggaagatagtggatttatgttgtatagattagattatattgagacaaaaattatctatttgtatatatacataacagggtaaattattcagttaagaaaaaaataattttatgaactgcatgtataaatgaagtttatacagtacagtggttctacaatctatttattggacatgtccatgaccagaagggaaacagtcatttgcgcacaacttaaaaagtctgcattacattccttgataatgttgtggtttgttgccgttgccaagaactgaaaacataaaaagttaaaaaaaataataaattgcatgctgctttaattgtgaattgataataaactgtcctctttcagaaaacagaaaaaaaacacacacacacacaacaaaaatttgaaccaaaacattccgtttacattttagacagtaagtatcttcgttcttgttagtactatatctgttttactgcttttaacttctgatagcgttggaattaaaacaatgtcaaggtgc

SEQ ID NO: 6352 - protein, 255 aa, Homo sapiens; identical to SEQ ID NO: 852

SEQ ID NO: 6353 - DNA, 1040 bp, Homo sapiens
cagttccaccaggtgagaagagtgatgaccatccttttccttactatggttatttcatactttggttgcatgaaggctgcccccatgaaagaagcaaacatccgaggacaaggtggcttggcctacccaggtgtgcggacccatgggactctggagagcgtgaatgggcccaaggcaggttcaagaggcttgacatcattggctgacactttcgaacacgtgatagaagagctgttggatgaggaccagaaagttcggcccaatgaagaaaacaataaggacgcagacttgtacacgtccagggtgatgctcagtagtcaagtgcctttggagcctcctcttctctttctgctggaggaatacaaaaattacctagatgctgcaaacatgtccatgagggtccggcgccactctgaccctgcccgccgaggggagctgagcgtgtgtgacagtattagtgagtgggtaacggcagcagacaaaaagactgcagatagacacttcttgtgtatgtacattgaccattaaaaggggaagatagtggatttatgttgtatagattagattatattgagacaaaaattatctatttgtatatatacataacagggtaaattattcagttaagaaaaaaataattttatgaactgcatgtataaatgaagtttatacagtacagtggttctacaatctatttattggacatgtccatgaccagaagggaaacagtcatttgcgcacaacttaaaaagtctgcattacattccttgataatgttgtggtttgttgccgttgccaagaactgaaaacataaaaagttaaaaaaaataataaattgcatgctgctttaattgtgaattgataataaactgtcctctttcagaaaacagaaaaaaaacacacacacacacaacaaaaatttgaaccaaaacattccgtttacattttagacagtaagtatcttcgttcttgttagtactatatctgttttactgcttttaacttctgatagcgttggaattaaaacaatgtcaaggtgc

SEQ ID NO: 6354 - protein, 167 aa, Homo sapiens
MTILFLTMVISYFGCMKAAPMKEANIRGQGGLAYPGVRTHGTLESVNGPKAGSRGLTSLADTFEHVIEELLDEDQKVRPNEENNKDADLYTSRVMLSSQVPLEPPLLFLLEEYKNYLDAANMSMRVRRHSDPARRGELSVCDSISEWVTAADKKTADRHFLCMYIDH

SEQ ID NO: 6355 - DNA, 1049 bp, Homo sapiens
tttctcgtgacagcatgagcagagatcattaaaaattaaacttacaaagctgctaaagtgggaagaaggagaacttgaagccacaatttttgcacttgcttagaagccatctaatctcagttccaccaggtgagaagagtgatgaccatccttttccttactatggttatttcatactttggttgcatgaaggctgcccccatgaaagaagcaaacatccgaggacaaggtggcttggcctacccaggtgtgcggacccatgggactctggagagcgtgaatgggcccaaggcaggttcaagaggcttgacatcattggctgacactttcgaacacgtgatagaagagctgttggatgaggaccagaaagttcggcccaatgaagaaaacaataaggacgcagacttgtacacgtccagggtgatgctcagtagtcaagtgcctttggagcctcctcttctctttctgctggaggaatacaaaaattacctagatgctgcaaacatgtccatgagggtccggcgccactctgaccctgcccgccgaggggagctgagcgtgtgtgacagtattagtgagtgggtaacggcagcagacaaaaagcattggaactcccagtgccgaactacccagtcgtacgtgcgggcccttaccatggatagcaaaaagagaattggctggcgattcataaggatagacacttcttgtgtatgtacattgaccattaaaaggggaagatagtggatttatgttgtatagattagattatattgagacaaaaattatctatttgtatatatacataacagggtaaattattcagttaagaaaaaaataattttatgaactgcatgtataaatgaagtttatacagtacagtggttctacaatctatttattggacatgtccatgaccagaagggaaacagtcatttgcgcacaacttaaaaagtctgcattacattccttgataatgttgtggtttgttgccgttgccaagaactgaaaacataaaaagttaaaaaaaataataaattgcatgctgcttt

SEQ ID NO: 6356 - protein, 199 aa, Homo sapiens
MTILFLTMVISYFGCMKAAPMKEANIRGQGGLAYPGVRTHGTLESVNGPKAGSRGLTSLADTFEHVIEELLDEDQKVRPNEENNKDADLYTSRVMLSSQVPLEPPLLFLLEEYKNYLDAANMSMRVRRHSDPARRGELSVCDSISEWVTAADKKHWNSQCRTTQSYVRALTMDSKKRIGWRFIRIDTSCVCTLTIKRGR

SEQ ID NO: 6357 - DNA, 1325 bp, Homo sapiens
agtggacttacaagtccgaagccaatgtagcttggaaaacttgggaggcggaattcctaccgctgggaactgaaagggtctgcgacactctcgggcaggccgaacccacatctctacccatcctgcgcccctcttctgaagcgccctccagggaagttaagagttttgactttcggggagtggttgggatgtacgtgggggattcttgactcgggttagtctctggggatgcagagccgggaagaggaatggttccaccaggtgagaagagtgatgaccatccttttccttactatggttatttcatactttggttgcatgaaggctgcccccatgaaagaagcaaacatccgaggacaaggtggcttggcctacccaggtgtgcggacccatgggactctggagagcgtgaatgggcccaaggcaggttcaagaggcttgacatcattggctgacactttcgaacacgtgatagaagagctgttggatgaggaccagaaagttcggcccaatgaagaaaacaataaggacgcagacttgtacacgtccagggtgatgctcagtagtcaagtgcctttggagcctcctcttctctttctgctggaggaatacaaaaattacctagatgctgcaaacatgtccatgagggtccggcgccactctgaccctgcccgccgaggggagctgagcgtgtgtgacagtattagtgagtgggtaacggcagcagacaaaaagactgcagtggacatgtcgggcgggacggtcacagtccttgaaaaggtccctgtatcaaaaggccaactgaagcaatacttctacgagaccaagtgcaatcccatgggttacacaaaagaaggctgcaggggcatagacaaaaggcattggaactcccagtgccgaactacccagtcgtacgtgcgggcccttaccatggatagcaaaaagagaattggctggcgattcataaggatagacacttcttgtgtatgtacattgaccattaaaaggggaagatagtggatttatgttgtatagattagattatattgagacaaaaattatctatttgtatatatacataacagggtaaattattcagttaagaaaaaaataattttatgaactgcatgtataaatgaagtttatacagtacagtggttctacaatctatttattggacatgtccatgaccagaagggaaacagtcatttgcgcacaacttaaaaagtctgcattacattccttgataatgttgtggtttgttgccgttgccaagaactgaaaacataaaaagttaaaaaaaataataaattgcatgctgcttt

SEQ ID NO: 6358 - protein, 262 aa, Homo sapiens; identical to SEQ ID NO: 858

SEQ ID NO: 6359 - DNA, 1353 bp, Homo sapiens
tccgggtccccgacgctgccgccgccgcgcccgggcgcacccgcccgctcgctgtcccgcgcaccccgtagcgcctcgggctcccgggccggacagaggagccagcccggtgcgcccctccacctcctgctcggggggctttaatgagacacccaccgctgctgtggggccggcggggagcagcaccgcgacggggaccggggctgggcgctggagccagaatcggaaccacgatgtgactccgccgccggggacccgtgaggtttgtgtggaccccgagttccaccaggtgagaagagtgatgaccatccttttccttactatggttatttcatactttggttgcatgaaggctgcccccatgaaagaagcaaacatccgaggacaaggtggcttggcctacccaggtgtgcggacccatgggactctggagagcgtgaatgggcccaaggcaggttcaagaggcttgacatcattggctgacactttcgaacacgtgatagaagagctgttggatgaggaccagaaagttcggcccaatgaagaaaacaataaggacgcagacttgtacacgtccagggtgatgctcagtagtcaagtgcctttggagcctcctcttctctttctgctggaggaatacaaaaattacctagatgctgcaaacatgtccatgagggtccggcgccactctgaccctgcccgccgaggggagctgagcgtgtgtgacagtattagtgagtgggtaacggcagcagacaaaaagactgcagtggacatgtcgggcgggacggtcacagtccttgaaaaggtccctgtatcaaaaggccaactgaagcaatacttctacgagaccaagtgcaatcccatgggttacacaaaagaaggctgcaggggcatagacaaaaggcattggaactcccagtgccgaactacccagtcgtacgtgcgggcccttaccatggatagcaaaaagagaattggctggcgattcataaggatagacacttcttgtgtatgtacattgaccattaaaaggggaagatagtggatttatgttgtatagattagattatattgagacaaaaattatctatttgtatatatacataacagggtaaattattcagttaagaaaaaaataattttatgaactgcatgtataaatgaagtttatacagtacagtggttctacaatctatttattggacatgtccatgaccagaagggaaacagtcatttgcgcacaacttaaaaagtctgcattacattccttgataatgttgtggtttgttgccgttgccaagaactgaaaacataaaaagttaaaaaaaataataaattgcatgctgcttt

SEQ ID NO: 6360 - protein, 247 aa, Homo sapiens; identical to SEQ ID NO: 850

SEQ ID NO: 6361 - DNA, 1405 bp, Homo sapiens
ctttcccattcaccgcggagagggctgctctcgctgccgctccccccggcgaactagcatgaaatctccctgcctctgccgagatcaaatggagcttctcgctgatggggtgcgagtattacctccgccatgcaatttccactatcaataatttaacttctttgctgcagaacagaaggagtacataccgggcaccaaagactcgcgccccctcccccctttaattaagcgaagggaacgtgaaaaaataatagagtgtgggagttttggggccgaagtctttcccggagcagctgccttgatggttactttgacaagtagtgactgaaaagttccaccaggtgagaagagtgatgaccatccttttccttactatggttatttcatactttggttgcatgaaggctgcccccatgaaagaagcaaacatccgaggacaaggtggcttggcctacccaggtgtgcggacccatgggactctggagagcgtgaatgggcccaaggcaggttcaagaggcttgacatcattggctgacactttcgaacacgtgatagaagagctgttggatgaggaccagaaagttcggcccaatgaagaaaacaataaggacgcagacttgtacacgtccagggtgatgctcagtagtcaagtgcctttggagcctcctcttctctttctgctggaggaatacaaaaattacctagatgctgcaaacatgtccatgagggtccggcgccactctgaccctgcccgccgaggggagctgagcgtgtgtgacagtattagtgagtgggtaacggcagcagacaaaaagactgcagtggacatgtcgggcgggacggtcacagtccttgaaaaggtccctgtatcaaaaggccaactgaagcaatacttctacgagaccaagtgcaatcccatgggttacacaaaagaaggctgcaggggcatagacaaaaggcattggaactcccagtgccgaactacccagtcgtacgtgcgggcccttaccatggatagcaaaaagagaattggctggcgattcataaggatagacacttcttgtgtatgtacattgaccattaaaaggggaagatagtggatttatgttgtatagattagattatattgagacaaaaattatctatttgtatatatacataacagggtaaattattcagttaagaaaaaaataattttatgaactgcatgtataaatgaagtttatacagtacagtggttctacaatctatttattggacatgtccatgaccagaagggaaacagtcatttgcgcacaacttaaaaagtctgcattacattccttgataatgttgtggtttgttgccgttgccaagaactgaaaacataaaaagttaaaaaaaataataaattgcatgctgcttt

SEQ ID NO: 6362 - protein, 247 aa, Homo sapiens; identical to SEQ ID NO: 850

SEQ ID NO: 6363 - DNA, 1406 bp, Homo sapiens
gccaacggatttgtccgaggtggcggtacccccaggtagtcttcttggccccgctgtaaagccaaccctgtgtcgcccttaaaaagcgtcttttctgaggttcggctcacactgagatcggggctggagagagagtcagattttggagcggagcgtttggaaagcgagccccagtttggtcccctcattgagctcgctgaagttggcttcctagcggtgtaggctggaatagactcttggcaagctccgggttggtatactgggttaactttgggaaatgcaagtgtttatctccaggatctagccaccggggtggtgtaagccgcaaagaagttccaccaggtgagaagagtgatgaccatccttttccttactatggttatttcatactttggttgcatgaaggctgcccccatgaaagaagcaaacatccgaggacaaggtggcttggcctacccaggtgtgcggacccatgggactctggagagcgtgaatgggcccaaggcaggttcaagaggcttgacatcattggctgacactttcgaacacgtgatagaagagctgttggatgaggaccagaaagttcggcccaatgaagaaaacaataaggacgcagacttgtacacgtccagggtgatgctcagtagtcaagtgcctttggagcctcctcttctctttctgctggaggaatacaaaaattacctagatgctgcaaacatgtccatgagggtccggcgccactctgaccctgcccgccgaggggagctgagcgtgtgtgacagtattagtgagtgggtaacggcagcagacaaaaagactgcagtggacatgtcgggcgggacggtcacagtccttgaaaaggtccctgtatcaaaaggccaactgaagcaatacttctacgagaccaagtgcaatcccatgggttacacaaaagaaggctgcaggggcatagacaaaaggcattggaactcccagtgccgaactacccagtcgtacgtgcgggcccttaccatggatagcaaaaagagaattggctggcgattcataaggatagacacttcttgtgtatgtacattgaccattaaaaggggaagatagtggatttatgttgtatagattagattatattgagacaaaaattatctatttgtatatatacataacagggtaaattattcagttaagaaaaaaataattttatgaactgcatgtataaatgaagtttatacagtacagtggttctacaatctatttattggacatgtccatgaccagaagggaaacagtcatttgcgcacaacttaaaaagtctgcattacattccttgataatgttgtggtttgttgccgttgccaagaactgaaaacataaaaagttaaaaaaaataataaattgcatgctgcttt

SEQ ID NO: 6364 - protein, 247 aa, Homo sapiens; identical to SEQ ID NO: 850

SEQ ID NO: 6365 - DNA, 1390 bp, Homo sapiens
tcattcattagaatcacgtaagaactcaaaaggaaacgtgtctctcggagtgagggcgtttgcgtaaatctataggtttttcgacatcgatgccagttgctttgtcttctgtagtcgccaaggtggttgagagtttaagcttgcggatattgcaaagggttattagattcataagtcacaccaagtggtgggcgatccactgagcaaagccgaacttctcacatgatgacttcaaacaagacacattaccttccagcatctgttggggagacgagattttaagacacttgagtctccaggacagcaaaggcacaatgttccaccaggtgagaagagtgatgaccatccttttccttactatggttatttcatactttggttgcatgaaggctgcccccatgaaagaagcaaacatccgaggacaaggtggcttggcctacccaggtgtgcggacccatgggactctggagagcgtgaatgggcccaaggcaggttcaagaggcttgacatcattggctgacactttcgaacacgtgatagaagagctgttggatgaggaccagaaagttcggcccaatgaagaaaacaataaggacgcagacttgtacacgtccagggtgatgctcagtagtcaagtgcctttggagcctcctcttctctttctgctggaggaatacaaaaattacctagatgctgcaaacatgtccatgagggtccggcgccactctgaccctgcccgccgaggggagctgagcgtgtgtgacagtattagtgagtgggtaacggcagcagacaaaaagactgcagtggacatgtcgggcgggacggtcacagtccttgaaaaggtccctgtatcaaaaggccaactgaagcaatacttctacgagaccaagtgcaatcccatgggttacacaaaagaaggctgcaggggcatagacaaaaggcattggaactcccagtgccgaactacccagtcgtacgtgcgggcccttaccatggatagcaaaaagagaattggctggcgattcataaggatagacacttcttgtgtatgtacattgaccattaaaaggggaagatagtggatttatgttgtatagattagattatattgagacaaaaattatctatttgtatatatacataacagggtaaattattcagttaagaaaaaaataattttatgaactgcatgtataaatgaagtttatacagtacagtggttctacaatctatttattggacatgtccatgaccagaagggaaacagtcatttgcgcacaacttaaaaagtctgcattacattccttgataatgttgtggtttgttgccgttgccaagaactgaaaacataaaaagttaaaaaaaataataaattgcatgctgcttt

SEQ ID NO: 6366 - protein, 255 aa, Homo sapiens; identical to SEQ ID NO: 852

SEQ ID NO: 6367 - DNA, 794 bp, Homo sapiens
acagtgtggcgattcctctaggatctagaactagaaataccatttgagccagccatcccattactgggtatatacccagaggattataaatcatgctactataaagacacatgcacacgtatgtttattgcggcactatttacaatagcaaatacttggagccaaccaaatgtccatcagtgagcaaggacatcattctgagcaaactatcgcaaggacagaaaaccaaacaccgcatgttctcactcataggtgggaactgaacaatgagaacactaccccacccactcaatcagatcctgcatttcaataagatttatttagtgcaataacttttttacttatcaaagttgagaagcacaggactaaatgataaagagaaaagaggctgcttaggataaggaaataaaaggttgaagttaacttaagtattatgatactttcttagcgtgtcatacggttacctgtcatctttcctctttggttcaacttgttttatggggacatttatgtgggaaaatatctttgcttttgtaatttatgtgggaaaatatctttgcttttgtgtttttacttaagtaaaatctgggctccttttatgtcaactagcttttccactattgttattatgatagaaagtacaggctacttataaacatgattagttcaatgagaacttttagaatattgctgacctaaatctggacatctacacaatcattaattcttaccaaaatgctacaaggcaatataagcataattagcctccctgatccctgaacatagcctaatat

SEQ ID NO: 6368 - protein, 47 aa, Homo sapiens
MSISEQGHHSEQTIARTENQTPHVLTHRWELNNENTTPPTQSDPAFQ

SEQ ID NO: 6369 - DNA, 3980 bp, Homo sapiens
gtttctggccgagctgatgtggccgtggcacagctcagaagcgacgctccgcccaccccgacgcggtctctatggtaaccggtcaccgcttctatggagtggcgtttactaccaattgcaaataagaaaattccagattccattccaagatggccaaataggaacagctccagcctgcagctcccagcgtgattaatgtagaagatgggtgatttctgcatttccaactaagctgaaaatggcaaaaacaggagcagaagatcacagagaagcactatctcagtcttccttatccctcttgactgaagcaatggaagtattacagcaaagtagccctgaaggcactttggatgggaatactgtaaacccaatttacaaatatattttgaatgatttaccaagagagtttatgtcatcccaggcaaaagcagttattaaaactactgatgattatttgcagtctcagtttggccccaacagactcgtgcattcagcagcagtatcagaagggtcaggacttcaagattgctccacacatcaaacagcatcagatcacagccatgatgaaatatcagacctagatagctacaaatcaaacagtaaaaacaattcttgttctatatcagcatccaagagaaacagacctgtcagtgctccagtgggtcaactgagggttgcagagttctcttctttaaaatttcagtcagcccggaattggcagaaattgtctcaaagacacaaacttcaaccaagagtgattaaagtaacagcttacaaaaatggatctagaacagtctttgccagagttactgtaccaaccatcaccttgctgctggaggagtgcacagaaaagctgaatctgaacatggccgcaagacgagtgttcttggcagacggcaaggaagccctcgaacctgaagatataccccatgaagccgatgtttatgtttcaacgggagagccctttttaaatccattcaaaaaaattaaaggttttagatacttgtacaataagaatgaatctaaatttaccagccagatatttttatgatttgtatggcagaaaaattgaagatatttcaaaagttcctctgcttgaaaaatgcctgcaaaattccatcacacctttgcgaggactactttgggtctctaagggagaaggtttcagcccctcaggagctaagatgtacatccaaggagttcttttggccctgtaccaacgattaaagtctgcaaaaaaatattataaacagagaactgggtctcactatgttgcccaggcaagcctcaatctcctgtgctcaagggatcctcctgcctcagccttccgagttgctgagactacagttgaacctggtcatgaatgaacagaaggagaaaattacagaaaaagtcattctttcaatgacggcaaaggaacaccataaggaacaggaagaagtgagcaggctgattgatgaattgcagacagctatcaaaagtaacataggtcatctctgtaaacttggcccccaattacaggctgagcaggagcaattctcctcttatgtctaccaacacattaaaagccttccagcaaacacgcttgtcccaggaggcctgcagcttaaggtatttgaaaatggtaaaaacactggagagatctctgttggtatcagtaaaaaagatttgggatcggatagcccaattcaaactgaccatatgatggaaagattacttctcaagattcatcaaaggcttcaaggttcttccatcaacccaccaggcctcaattattcttcaatgcggctttttgatgagaatggccaagaaattaagaatccactttcgctgaagaatgagcaaaaaatttgggtctcttatggtagagcatacagatctccactaaatcttgctttgggtttgacctttgaccgagtgagtgcatttgccagaggtgatatcatggttgcatataagacctttttggatcctaatgctgttctgctacctggatgtggcaattgggaagtttgtgagggatttccaattaatttcaactgtaccagtcaacagatacctgaccagtttgaaaaggtggacttggagaaccattttctacagaacaaggtagatcccaatattgtccttcatgcctctgtttccattggaaagtggagtttctcaggcagtgaagcaagcagcaggagtcaaatagcgccatcgatcctgtggcctgtagccagtgtgtggctgatcaccaagactggaatgatcctgagccgagcgataactcagggctgcctggctattggtcatcctatcagagtcaaggctgctgagggaacatcactagaaggatataaattaatcttacagaaaagacatagtggagatgactctcagaagtgggtgtttggaactgatggttgcatttattcaaaggcttatcctcagtttgttctgacctacctagaggagctaaatgcacaagtagatgtgacccagacagagtatcacattcaccatggtgcctggaccacagctcatcaggaacatggcagaaacttagcagaagaggttctgcaagaaagtgccagcaaccttggtctgaagcaactgccagaaccctcagacacccatttaatgccagaaggttctcttgaggagacgggggagctgacagtagcactggtgaggaaactggaagagaaacatcctaaggcttctgctcagaggtgggccataaaacatgaaggaaccagtaagccaggccagtggaaacattctagagttgaaaatcctctatggaacaagcttacctacatgtggcctgtccttcccagtggccaacttaatgaggcaatgcagacagagcaaggaaggagatagacttggttcctaagttcatgaagcttacagattaagaagtataagctatgagtcaacaaggaagaaacaagaaaaggaaggagacagagttgatgaataaaggagaaggaagggagagagaagaaactcacagaaaaagtttggtgttccagaaatcaaggctatgcattgagccagtttatttagtcatatagtcactgtgaagaaagatcagctgggctgattgtccaaatgggcctgaaaattaagtaaaaatactaaatctaggaaaaccatctaacaaacaacaccctgagtgagactccaattctcctgttagttccttgacaagaaactttcaaaatagaatgatgactaaggaagtatgaacaatatagaaatatggaattatcttggtaatgtctcagactgcattaatactaaaaactatgtacctctcagtggtgacagctgctttgagaactgatttcatgctgtcctcacttttaaatattattcatactaaaaggcaattgataatatttttatgaacaaacagcatttaatatatctagggatatcagtattttttaaatatggtaaagccttattgaaaaccaacattaataaattcttttggtttcttttgtgactaagttcactggaaaaaattagaggaactcaagttattttctcactctatgggggaaaagttgtgaattgaaaaattgtgcttctaaacacttaaaggtaaggagcaatggattttcatattcaaggaaggaattgtggtaaaaagtaagattaaaaagatgtacgattttggaatgagctgttggatagttattttaaagtatctaaattaaaatatatccatttggacgggccatgccagacagaacaaagctaaaagtttattactctattgagagatgataataagtagctaccagaataaagaggggggaaaaggagacgtgggaaggctcaggagagaacattgaagaatatattatattgttaatagcaaatagataaaagaggactaatatagctatgaaacttagattgctggttaagagctggactcccaaaacgaacacatgctctctctcttatgagagagagat

SEQ ID NO: 6370 - protein, 533 aa, Homo sapiens
MLPRQASISCAQGILLPQPSELLRLQLNLVMNEQKEKITEKVILSMTAKEHHKEQEEVSRLIDELQTAIKSNIGHLCKLGPQLQAEQEQFSSYVYQHIKSLPANTLVPGGLQLKVFENGKNTGEISVGISKKDLGSDSPIQTDHMMERLLLKIHQRLQGSSINPPGLNYSSMRLFDENGQEIKNPLSLKNEQKIWVSYGRAYRSPLNLALGLTFDRVSAFARGDIMVAYKTFLDPNAVLLPGCGNWEVCEGFPINFNCTSQQIPDQFEKVDLENHFLQNKVDPNIVLHASVSIGKWSFSGSEASSRSQIAPSILWPVASVWLITKTGMILSRAITQGCLAIGHPIRVKAAEGTSLEGYKLILQKRHSGDDSQKWVFGTDGCIYSKAYPQFVLTYLEELNAQVDVTQTEYHIHHGAWTTAHQEHGRNLAEEVLQESASNLGLKQLPEPSDTHLMPEGSLEETGELTVALVRKLEEKHPKASAQRWAIKHEGTSKPGQWKHSRVENPLWNKLTYMWPVLPSGQLNEAMQTEQGRR

SEQ ID NO: 6371 - DNA, 1705 bp, Homo sapiens
agaagcgacgctccgcccaccccgacgcggtctctatggtaaccggtcaccgcttctatggagtggcgtttactaccaattgcaaataagaaaattccagattccattccaagatggccaaataggaacagctccagcctgcagctcccagcgtgattaatgtagaagatgggtgatttctgcatttccaactaagctgaaaatggcaaaaacaggagcagaagatcacagagaagcactatctcagtcttccttatccctcttgactgaagcaatggaagtattacagcaaagtagccctgaaggcactttggatgggaatactgtaaacccaatttacaaatatattttgaatgatttaccaagagagtttatgtcatcccaggcaaaagcagttattaaaactactgatgattatttgcagtctcagtttggccccaacagactcgtgcattcagcagcagtatcagaagggtcaggacttcaagattgctccacacatcaaacagcatcagatcacagccatgatgaaatatcagacctagatagctacaaatcaaacagtaaaaacaattcttgttctatatcagcatccaagagaaacagacctgtcagtgctccagtgggtcaactgagggttgcagagttctcttctttaaaatttcagtcagcccggaattggcagaaattgtctcaaagacacaaacttcaaccaagagtgattaaagtaacagcttacaaaaatggatctagaacagtctttgccagagttactgtaccaaccatcaccttgctgctggaggagtgcacagaaaagctgaatctgaacatggccgcaagacgagtgttcttggcagacggcaaggaagccctcgaacctgaagatataccccatgaagccgatgtttatgtttcaacgggagagccctttttaaatccattcaaaaaaattaaagaccatctgttgttaattaagaaagtaacttggacaatgaatgggttgatgcttcctactgatatcaaaagacggaaaaccaagcctgttctttctattagaatgaagaaacttactgagaggacctcagtccgaattctgttctttaagaatggcatggggcaggatgggcatgagattacagtgggaaaagaaacaatgaaaaaggttttagatacttgtacaataagaatgaatctaaatttaccagccagatatttttatgatttgtatggcagaaaaattgaagatatttcaaaaggaaagcactgactctgagacgtgatacttcatggatgccagaggcattcggattcatgactcgtgcttcacgtatcccagaagtgtgctattatcacattttaatgcatgccttgccctctgtttttgcatccttataaaagcttatgccagctgaaattagcctgtgcaaccactaacatgtggaagcattacaagttcactggacttaaaatatttaaagaagctaatcctgttggaggaacttccagtctgtagcaccctagtcacttaacattaggtttttgaacttcttttttctttgtttctatgatgttgtgcatcaaatgattgagatccctaaacttttgtgttggatggttttctgaacttcaacttgggaaaggtcaagttttatgtgaaagttatcttttaatttaaacaaataaatgctgatactcttttgattcg

SEQ ID NO: 6372 - protein, 354 aa, Homo sapiens
MAKTGAEDHREALSQSSLSLLTEAMEVLQQSSPEGTLDGNTVNPIYKYILNDLPREFMSSQAKAVIKTTDDYLQSQFGPNRLVHSAAVSEGSGLQDCSTHQTASDHSHDEISDLDSYKSNSKNNSCSISASKRNRPVSAPVGQLRVAEFSSLKFQSARNWQKLSQRHKLQPRVIKVTAYKNGSRTVFARVTVPTITLLLEECTEKLNLNMAARRVFLADGKEALEPEDIPHEADVYVSTGEPFLNPFKKIKDHLLLIKKVTWTMNGLMLPTDIKRRKTKPVLSIRMKKLTERTSVRILFFKNGMGQDGHEITVGKETMKKVLDTCTIRMNLNLPARYFYDLYGRKIEDISKGKH

SEQ ID NO: 6373 - DNA, 472 bp, Homo sapiens
aacaattcttgttctatatcagcatccaagagaaacagacctgtcagtgctccagtgggtcaactgagggttgcagagttctcttctttaaaatttcagtcagcccggaattggcagaaattgtctcaaagacacaaacttcaaccaagagtgattaaagtaacagcttacaaaaatggatctagaacagtctttgccagagttactgtaccaaccatcaccttgctgctggaggagtgcacagaaaagctgaatctgaacatggccgcaagacgagtgttcttggcagacggcaaggaagccctcgaacctgaagatataccccatgaagccgatgtttatgtttcaacgggagagccctttttaaatccattcaaaaaaattaaaggtaaaaaagatctaaaaaataccctacccccacacatactgaattgcttaaggggtgcaattaaaaaatgattttcatcctgtc

SEQ ID NO: 6374 - protein, 65 aa, Homo sapiens [sequence omitted]

SEQ ID NO: 6375 - DNA, 2391 bp, Homo sapiens
gacttccggcggaagaagaagccggtccggagttctggccgacagcaggcgaggagtgggtagcagcgcctatgtgaagttagctaatctgagaaggcccacttctggttccatggatgatggcggttgagcagatgccaaaaaaggattggtacagcatcctgggagcagacccatctgcaaatatatcagacctaaaacaaaaatatcaaaaactcatattaatgtatcatccagataaacaaagtacagatgtaccagcaggaacagtggaggaatgtgtacagaagttcatcgaaattgatcaagcatggaaaattctaggaaatgaagagacaaaaagagagtatgacctgcagcggtgtgaagatgatctaagaaatgtaggaccagtagatgctcaagtatatcttgaagaaatgtcttggaatgaaggtgatcactctttttatctgagttgcagatgtggtggaaaatacagtgtttccaaggatgaagcggaagaagttagcctgatttcttgtgatacatgttcactaattatagaactccttcattataactaaaattgttcacaacttgaaatgctttaactgtggtattgagacatgatgagaagccgttgagctttgtccattcaaggaaatggattatttgtcagcccgattatttgcaaagaaaatatacaattatcaagcagagaccacctcagattaatagagaatgaatataattatttatttgtatttataatttatatttacaagttgtcacaaaaatagatttgattatatttggtgaattcccatctgagaactttattatgtcatttttttccatgacacaaaataagaattttcttaatatgagcatgtctcctcttttcagtgggtaacagtatcatcatattcctttatagttactaagtttctggtctaaccgataacgtttctagttgctaaagttatggggctgttgtacacctagaatctttgtgaataatgtgaggccagttcttccataaggaaggctggttatggatattcataaggttatttcaaagttaataaagacaaagtggcaactgtagaaagtgttgcctccaatcttggtccgtatttccaaagcttgtaaacactgccatcttcaaatttaaatgtaatttaggaaatggaagcttttaattttaatttcttttttctaagacagagtctcactctgtcgcgccagctggagtgcagtgccatgatctcaggtcgctgtaacctccgtctcctgggcacaagaatcacttgaacccaggaggcagagtgagccgaggttgtgccactgcactgcagcctgggctacagagagcaagactctgtctcaaaaaaaataaaataaaataaataaaaaaagatatagtattaatgcctgtatttatgaagacagggccattgcactgctgctatgctgaaatgaacttttataaagtattattgactatagccaactacagatggcatatgccttaaagatgcatttttctatgtatttaatattttgtgtacagtaaaagtcagaactcatttaaagaactttaagggatcctttagaaacatttttacttaatttcaaatgagtgggctgagcatgtagactagcagctttttatcaaacctggcattgtcaggttgaacttataaatacgaatagttactactctgacttgtaaatgtagctgctaaagtatgaggtatatttaagaagaatagattagtttcattatacctataagaacaagaattcaaaagtgaggtagtcatccaggttccccctcccacaatatttttgtatcataaaatttagatgacttttttgggttacatttttatccatatattttgaactaacagaacttggcagaatgtgtgttgaatattctttacatttaacaattaaaaacaactaaaactgaatagcaaatagtttattggtaagtacacggtttcaacgggagtaataaattcacatgaaaaggagacaataatcaagtcaaaagaataaatgcttactaatcatcagaaaatctgtggccattagggctggcacgtaaaaatccaaaatcactcagaggccaaatctgtaaaatcaaaatgaggttgaagacaattagtgaaagtaatgttatagtatcatcatattcccttttgctatctgtcccttttctctatgccagataaacactttctccttactcatcaatcaagaataaaattttctacatcaaagtaagacttgagaaaataaacttatgtgtatatatgtttaaactccaaagtttgggacattcaaacaatgtacatgaaattatatgtgtgtggtgtgtgaataaatatgtatgaatat

SEQ ID NO: 6376 - protein, 149 aa, Homo sapiens; identical to SEQ ID NO: 864

SEQ ID NO: 6377 - DNA, 2418 bp, Homo sapiens
tccggcggaagaagaagccggtccggagttctggccgacagcaggcgaggagtgggtagcagcgcctatgtgaagttagctaatctgagaaggcccacttctggttccatggatgatggcggttgagcagatgccaaaaaaggattggtacagcatcctgggagcagacccatctgcaaatatatcagacctaaaacaaaaatatcaaaaactcatattaatgtatcatccagataaacaaagtacagatgtaccagcaggaacagtggaggaatgtgtacagaagttcatcgaaattgatcaagcatggaaaattctaggaaatgaagagacaaaaagagagtatgacctgcagcggtgtggctcataaacctctctgatgagtcctgccagtgttttcttagatcccactgttgagacaatggagccacagaattctttcacctcttgttgtcagacaaatccaatagaacacaaggtcagaagggcctatacttctaaaggttgaaagattctttttcaaaagatgatctaagaaatgtaggaccagtagatgctcaagtatatcttgaagaaatgtcttggaatgaaggttggattttttttttctcttgacaacatttaaaaaaaaaaggaattttctataagaaaaaaaaactcattggatatttggaaatcttaaaaagaaataatagtgtggctttctatatatatgtggtaagtgtttctgtctggagtatttctgcttaattctaaactttatttattgactgatgtccccctatatgactcatttccagttatttttatattctaattagatgttaggaacataaagtttcataagagtttttttgttgtgtttttttactttagtttttgcattactgtctatgtagtattgtagtatggtaaataatgtcaaacaagatagttttttttttccgttccttttaatgttgacaagatgaattcctattagaatttttattttccctttatataaaatcataaactgtcaggacagggcttttaagaggcttgatttttttttttttttttttaacgctcacatactgattgtcttataagaagaaaagaatatctgccatttcccttgatgcaacatgaagtcatgtcttttttgcttttctgttattaaaattttagaacttaaattcaatgtcgtttccctattcttctgatggttccttgaattgttctggttagacatcattacattgggaaacacactttactaaacagaagccatgagtaccatacttacttgtttctctgggcaaatgaagaaaatcttactatttcctagaatctttatatatgcttaaccttttaaccttattgttcagcatgagtacaaattccctccaggtttataaaaatctactaatgagtgtggataggtagaagacaaaaacagagccatctgaaaccaaatttactttttaaatggcaaattcttaacttagtgcccctaagacgtgggtcacaagcctaacttagaaagggaatcatgtctttgcctctggggccattctgtccccaacccctcaagtgaaatcctagagtagaaattcagtgaataattggaaaagttgaggttttgtgtaactggggctcttggtggtgacagtctcatcagagtaaacacgaagaaatactgtgaaaacaatacactagtgatacagattttcactgctggtgtgtggaagggacactctagaatatgtcatttatcaggaagacttgcccagttaaaaaaaatatatgcacatatgtatatatacacacatatactttttattttttgccaaatacacaaacttcaaggagactaaatatgttttgaaaatatagtttgtctccttatctattggtatgtatatgtatgtttgtatgtgtttaatgtcttaataaattagttcttgctatagtcgatatgggtaatatattttgtttatgactgtgaaaatagtgaaaactggtttttataaatttttttttaccttttaaatatataacaatataatgttaagatcttaattttaaatgagaatacgggctggaagcctggaatcccagcactttgggaggctgagtttggagaatcgcagaggtcaggagtttgagaccagcctgggcaacataggaagactgtgagaacagattgtgagaataggaaaaaaaaaaaaaatttaaaaaaaaaacaagcatagcaagaccacatctctacaagaaagattagaagtatattatatatatatttttaaaaagaaaaggaagaaacaatatggcttaagcatctgtccagtcaataaatacatggactttctgatacaaatgaaaatgctaacatatggaaggaaatatacaacaaaaaatcatcaagcgttatca

SEQ ID NO: 6378 - protein, 85 aa, Homo sapiens
MMAVEQMPKKDWYSILGADPSANISDLKQKYQKLILMYHPDKQSTDVPAGTVEECVQKFIEIDQAWKILGNEETKREYDLQRCGS

SEQ ID NO: 6379 - DNA, 512 bp, Homo sapiens
ggaagaagaagccggtccggagttctggccgacagcaggcgaggagtgggtagcagcgcctatgtgaagttagctaatctgagaaggcccacttctggttccatggatgatggcggttgagcagatgccaaaaaaggattggtacagcatcctgggagcagacccatctgcaaatatatcagacctaaaacaaaaatatcaaaaactcatattaatggttcattgatgatgttacatagcccttgacccatgtgaactgatgacagaatagagccacacagcatgtgaagtgatttgacctgtagcaatctttgaaccagtgttttgtctacacctatcctcagaggctatccagctgttagatttcatttttaataattcagccaagagtgtggaacatttttctcttgagattttcaatagctagtctgaagatatgtttttgagagcttcaaatagtgttccagaagagaatgttagaatcgggaagaataagcatattagatacttaa

SEQ ID NO: 6380 - protein, 39 aa, Homo sapiens
MMAVEQMPKKDWYSILGADPSANISDLKQKYQKLILMVH

SEQ ID NO: 6381 - DNA, 2745 bp, Homo sapiens
ggaagaagaagccggtccggagttctggccgacagcaggcgaggagtgggtagcagcgcctatgtgaagttagctaatctgagaaggcccacttctggttccatggatgatggcggttgagcagatgccaaaaaaggattggtacagcatcctgggagcagacccatctgcaaatatatcagacctaaaacaaaaatatcaaaaactcatattaatgtatcatccagataaacaaagtacagatgtaccagcaggaacagtggaggaatgtgtacagaagttcatcgaaattgatcaagcatggaaaattctaggaaatgaagagacaaaaagagagtatgacctgcagcggtgtggtaggtgcttgtgttgaggagccacagcacatcggcaactcttagaagcacactctgcagccattcctggggagcattttccagcatttgcaccaagtgttattgttgcctttattcctcccctccatcactgtttttaattatgccctattcttagcagtgactattgtgtatccattgagaagttaacaaaactactaggatgtggcttcttgtgaagccttgaaagctactttttataacatttgaaaaatgtttaattacacattactaactaatatgctttatatgtttaaaaactttttattaaaataaatatggattaacattttaattgtacttttaagactatacagtataaatgacaatccaaatgaagatactatatatcagatgacatcataaagcactctgctgtctttgagctcattttaggctgggtttcatgattatcttcatgataaactattccttgtgattggtataaatgatattttaggaatgcacattacctaagcaattttaaaagtcatttcttttatgctttttagaaaatagctttttaaaacagtgacaagctgttatgagaaagaaagagggaaatgtaggtcaggtttgtcacacatggactgcagttacacgaagtgataggctgtctttcagcactggcctagggacaggagtccctcagccttgtgtttgaaccttcaatatgcaccccacatgctaatgggaggagtcaataatcagttacagcctgtggggaaaacactcagtcgctctctccaatagcatatcaggctcagcattgactgggatgtgttgataaaagctgtctcgtagtcgcttattgaatcccctcccatgccctacaatggcacaccatcagacctcacaaaatgattctgaggctttgttagtactaaggttatgaaaatttgatttgagaagcaagcctttatttttaaaacacagcattataagatgaagccagtgacatttgcaagacatccctatttattttcagagggatttctaccaagaaaattaaggtttcttataggctgtgtgatacttctgtgtggaaagacttgaactgtttatgtactggagtatttgtttataagagtgacttatttatagtactaatcagctcaaaggctttactactttttaaaagactgatgagcttatttttttcttaaatattaagaacctgatgggtgtacctttgcttttcaaagcaaaggttaattttcaaaaatggcttgaatattgggttctgcttttgctgggtgcataatgagcatctgtctaatgtatttattttttaaacatgtttgtactttttgcaaaagaatgtagaagtggcttcgtttgatgataagttctacccgttggtgtatctttttaaccttggttcacatgatttctatgaaagaattgaaactaatgcacatgaatgtgttgtgtgttagaagaaatctacattcctaaagccactacgctctactgaagatgatgattctttcaggtgtttttgcacatctttactagtctctactatataggatgccagtttgcttgagataaaaataattcacacgacattgtaccctaaagagtatagggtatatactttcaatgttgctctacatttttgccactccacagcctgtgtactattaagaacatattagtgaagttgactagaagcctgctctctaaagaggtagggagggatcaggaatcataaaaatattttctcaagaagctacagggtggggtaggccagaaaccaaaagaaataggaaaccaggttaaaagttagcagagaattgcatgaagaaagatttgagagatgtcagaagacaaataatcatcatattcatgcctttttcattgtcttcgaaaggtccttggaactgcggatttcttttgagctttgagtcctacttttaagatcttaatggaagcacctgtggcctactgtgtcacagggtactcctgtaggtcatagatgaagtcacaatgaagtttagacaaagtaaatactgtgagagttggacctgattcatgattcagataaatagtttggaatttatacaatatcagtttgctctgcaagtttttcaggcagcatattactgaatttagctgttctagaaggacagcttttcatgacactttagtacctcagatttaagtactaagtattgcctcttttaccagaggctccaaatactgacactactttgtttcaattttaaatggagattgacatactgtttaggtaagaagagtatccaaatataacttgctatttttaagcctttcataccagagctatttttcaaaactcttacaataaacctactttcatattgtt

SEQ ID NO: 6382 - protein, 88 aa, Homo sapiens
MMAVEQMPKKDWYSILGADPSANISDLKQKYQKLILMYHPDKQSTDVPAGTVEECVQKFIEIDQAWKILGNEETKREYDLQRCGRCLC

SEQ ID NO: 6383 - DNA, 2989 bp, Homo sapiens
ggaagaagaagccggtccggagttctggccgacagcaggcgaggagtgggtagcagcgcctatgtgaagttagctaatctgagaaggcccacttctggttccatggatgatggcggttgagcagatgccaaaaaaggattggtacagcatcctgggagcagacccatctgcaaatatatcagacctaaaacaaaaatatcaaaaactcatattaatgtatcatccagataaacaaagtacagatgtaccagcaggaacagtggaggaatgtgtacagaagttcatcgaaattgatcaagcatggaaaattctaggaaatgaagagacaaaaagagagtatgacctgcagcggtgtgaagatgatctaagaaatgtaggaccagtagatgctcaagtatatcttgaagaaatgtcttggaatgaaggtgatcactctttttatctgagttgcagatgtggtggaaaatacagtgtttccaaggatgaagcggaagaagttagcctgatttcttgtgatacatgttcactaattatagaactccttcattataactaaaattgttcacaacttgaaatgctttaactgtggtattgagacatgatgagaagccgttgagctttgtccattcaaggaaatggattatttgtcagcccgattatttgcaaagaaaatatacaattatcaagcagagaccacctcagattaatagagaatgaatataattatttatttgtatttataatttatatttacaagttgtcacaaaaatagatttgattatatttggtgaattcccatctgagaactttattatgtcatttttttccatgacacaaaataagaattttcttaatatgagcatgtctcctcttttcagtgggtaacagtatcatcatattcctttatagttactaagtttctggtctaaccgataacgtttctagttgctaaagttatggggctgttgtacacctagaatctttgtgaataatgtgaggccagttcttccataaggaaggctggttatggatattcataaggttatttcaaagttaataaagacaaagtggcaactgtagaaagtgttgcctccaatcttggtccgtatttccaaagcttgtaaacactgccatcttcaaatttaaatgtaatttaggaaatggaagcttttaattttaatttcttttttctaagacagagtctcactctgtcgcgccagctggagtgcagtgccatgatctcaggtcgctgtaacctccgtctcctgggttcaagtgattctccagcctcagcctcccgaatagctgggattacacgtgcccaccaccatgcccagctaatttttgtatttttagtagagatggggttccaccatgttggccaggctggtctcaaactcctgacctcaggtgatccacctgcctcgacctcccaaagtgctaggattacaggtttgagccaccgtgcctggcctaagttttgttaatagagatgggatttcatcatgttggctaggctggtcttgaactcctggcctcaaatgatccgcccacctcaacctcccaaagtgctgggattgcaggcgtgagccaccatgcctggccagaagcttttttaaaaataatgacttggaagttggtgcattatttccccttttattttggagtgttgatataatattggggccaggcatggtggctcacatctgtaatcccagcactttgggagactaaggcaggcggatcacctttggtcaggagttcaagaccaccctggccaacatggtgaaaccccatatctactaaaaataatttttttaaaaattagccagtcacgttggtgtctgcctgtggtcccagctactcgggaggctgaggcacaagaatcacttgaacccaggaggcagagtgagccgaggttgtgccactgcactgcagcctgggctacagagagcaagactctgtctcaaaaaaaataaaataaaataaataaaaaaagatatagtattaatgcctgtatttatgaagacagggccattgcactgctgctatgctgaaatgaacttttataaagtattattgactatagccaactacagatggcatatgccttaaagatgcatttttctatgtatttaatattttgtgtacagtaaaagtcagaactcatttaaagaactttaagggatcctttagaaacatttttacttaatttcaaatgagtgggctgagcatgtagactagcagctttttatcaaacctggcattgtcaggttgaacttataaatacgaatagttactactctgacttgtaaatgtagctgctaaagtatgaggtatatttaagaagaatagattagtttcattatacctataagaacaagaattcaaaagtgaggtagtcatccaggttccccctcccacaatatttttgtatcataaaatttagatgacttttttgggttacatttttatccatatattttgaactaacagaacttggcagaatgtgtgttgaatattctttacatttaacaattaaaaacaactaaaactgaatagcaaatagtttattggtaagtacacggtttcaacgggagtaataaattcacatgaaaaggagacaataatcaagtcaaaagaataaatgcttactaatcatcagaaaatctgtggccattagggctggcacgtaaaaatccaaaatcactcagaggccaaatctgtaaaatcaaaatgaggttgaagacaattagtgaaagtaatgttatagtatcatcatattcccttttgctatctgtcccttttctctatgccagataaacactttctccttactcatcaatcaagaataaaattttctacatcaaagtaagacttgagaaaataaacttatgtgtatatatgtttaaactccaaagtttgggacattcaaacaatgtacatgaaattatatgtgtgtggtgtgtgaataaatatgtatgaatat

SEQ ID NO: 6384 - protein, 149 aa, Homo sapiens; identical to SEQ ID NO: 864

SEQ ID NO: 6385 - DNA, 2531 bp, Homo sapiens
ggtccggagttctggccgacagcaggcgaggagtgggtagcagcgcctatgtgaagttagctaatctgagaaggcccacttctggttccatggatgatggcggttgagcagatgccaaaaaaggattggtacagcatcctgggagcagacccatctgcaaatatatcagacctaaaacaaaaatatcaaaaactcatattaatgtatcatccagataaacaaagtacagatgtaccagcaggaacagtggaggaatgtgtacagaagttcatcgaaattgatcaagcatggaaaattctaggaaatgaagagacaaaaagagagtatgacctgcagcggtgtgaagatgatctaagaaatgtaggaccagtagatgctcaagtatatcttgaagaaatgtcttggaatgaaggtgatcactctttttatctgagttgcagatgtggtggaaaatacagtgtttccaaggatgaagcggaagaagttagcctgatttcttgtgatacatgttcactaattatagaactccttcattataactaaaattgttcacaacttgaaatgctttaactgtggtattgagacatgatgagaagccgttgagctttgtccattcaaggaaatggattatttgtcagcccgattatttgcaaagaaaatatacaattatcaagcagagaccacctcagattaatagagaatgaatataattatttatttgtatttataatttatatttacaagttgtcacaaaaatagatttgattatatttggtgaattcccatctgagaactttattatgtcatttttttccatgacacaaaataagaattttcttaatatgagcatgtctcctcttttcagtgggtaacagtatcatcatattcctttatagttactaagtttctggtctaaccgataacgtttctagttgctaaagttatggggctgttgtacacctagaatctttgtgaataatgtgaggccagttcttccataaggaaggctggttatggatattcataaggttatttcaaagttaataaagacaaagtggcaactgtagaaagtgttgcctccaatcttggtccgtatttccaaagcttgtaaacactgccatcttcaaatttaaatgtaatttaggaaatggaagcttttaattttaatttcttttttctaagacagagtctcactctgtcgcgccagctggagtgcagtgccatgatctcaggtcgctgtaacctccgtctcctgggttcaagtgattctccagcctcagcctcccgaatagctgggattacacgtgcccaccaccatgccaacatggtgaaaccccatatctactaaaaataatttttttaaaaattagccagtcacgttggtgtctgcctgtggtcccagctactcgggaggctgaggcacaagaatcacttgaacccaggaggcagagtgagccgaggttgtgccactgcactgcagcctgggctacagagagcaagactctgtctcaaaaaaaataaaataaaataaataaaaaaagatatagtattaatgcctgtatttatgaagacagggccattgcactgctgctatgctgaaatgaacttttataaagtattattgactatagccaactacagatggcatatgccttaaagatgcatttttctatgtatttaatattttgtgtacagtaaaagtcagaactcatttaaagaactttaagggatcctttagaaacatttttacttaatttcaaatgagtgggctgagcatgtagactagcagctttttatcaaacctggcattgtcaggttgaacttataaatacgaatagttactactctgacttgtaaatgtagctgctaaagtatgaggtatatttaagaagaatagattagtttcattatacctataagaacaagaattcaaaagtgaggtagtcatccaggttccccctcccacaatatttttgtatcataaaatttagatgacttttttgggttacatttttatccatatattttgaactaacagaacttggcagaatgtgtgttgaatattctttacatttaacaattaaaaacaactaaaactgaatagcaaatagtttattggtaagtacacggtttcaacgggagtaataaattcacatgaaaaggagacaataatcaagtcaaaagaataaatgcttactaatcatcagaaaatctgtggccattagggctggcacgtaaaaatccaaaatcactcagaggccaaatctgtaaaatcaaaatgaggttgaagacaattagtgaaagtaatgttatagtatcatcatattcccttttgctatctgtcccttttctctatgccagataaacactttctccttactcatcaatcaagaataaaattttctacatcaaagtaagacttgagaaaataaacttatgtgtatatatgtttaaactccaaagtttgggacattcaaacaatgtacatgaaattatatgtgtgtggtgtgtgaataaatatgtatgaatat

SEQ ID NO: 6386 - protein, 149 aa, Homo sapiens; identical to SEQ ID NO: 864

SEQ ID NO: 6387 - DNA, 356 bp, Homo sapiens
agctaatctgagaaggcccacttctggttccatggatgatggcggttgagcagatgccaaaaaaggattggtacagcatcctgggagcagacccatctgcaaatatatcagacctaaaacaaaaatatcaaaaactcatattaatgtatcatccagataaacaaagtacagatgtaccagcaggaacagtggaggaatgtgtacagaagttcatcgaaattgatcaagcatggaaaattctaggaaatgaagagacaaaaagagagtatgacctgcagcggtgtgaagatgatctaagaaatgtaggaccagtagatgctcaagtatatcttgaagaaatgtcttggaatgaaggt

SEQ ID NO: 6388 - protein, 106 aa, Homo sapiens
MMAVEQMPKKDWYSILGADPSANISDLKQKYQKLILMYHPDKQSTDVPAGTVEECVQKFIEIDQAWKILGNEETKREYDLQRCEDDLRNVGPVDAQVYLEEMSWNE

SEQ ID NO: 6389 - DNA, 512 bp, Homo sapiens
catctgcaaatatatcagacctaaaacaaaaatatcaaaaactcatattaatggttattggattttttccccctctttttggtgtacatacttggaaggacgcatctgtcacaggaaaatttttgtgaagcactcatcttctgacttgcccatgaattccttgttttaagcagtcaaggcaaacagtgtgcttctcaaattttagcacgcgtaacagttgcttggagagcttggtgaaacagagattctggagtcctccctctgaagatttgagtatcatccagataaacaaagtacagatgtaccagcaggaacagtggaggaatgtgtacagaagttcatcgaaattgatcaagcatggaaaattctaggaaatgaagagacaaaaagagagtatgacctgcagcggtgtgaagatgatctaagaaatgtaggaccagtagatgctcaagtatatcttgaagaaatgtcttggaatgaaggttggattttttttttctcttgacaacatt

SEQ ID NO: 6390 - protein, 30 aa, Homo sapiens
WLLDFFPLFLVYILGRTHLSQENFCEALIF

SEQ ID NO: 6391 - DNA, 1147 bp, Homo sapiens
gtatcatcatattcctttatagttactaagtttctggtctaaccgataacgtttctagttgctaaagttatggggctgttgtacacctagaatctttgtgaataatgtgaggccagttcttccataaggaaggctggttatggatattcataaggttatttcaaagttaataaagacaaagtggcaactgtagaaagtgttgcctccaatcttggtccgtatttccaaagcttgtaaacactgccatcttcaaatttaaatgtaatttaggaaatggaagcttttaattttaatttcttttttctaagacagagtctcactctgtcgcgccagctggagtgcagtgccatgatctcaggtcgctgtaacctccgtctcctgggcacaagaatcacttgaacccaggaggcagagtgagccgaggttgtgccactgcactgcagcctgggctacagagagcaagactctgtctcaaaaaaaataaaataaaataaataaaaaaagatatagtattaatgcctgtatttatgaagacagggccattgcactgctgctatgctgaaatgaacttttataaagtattattgactatagccaactacagatggcatatgccttaaagatgcatttttctatgtatttaatattttgtgtacagtaaaagtcagaactcatttaaagaactttaagggatcctttagaaacatttttacttaatttcaaatgagtgggctgagcatgtagactagcagctttttatcaaacctggcattgtcaggttgaacttataaatacgaataaataaatgcttactaatcatcagaaaatctgtggccattagggctggcacgtaaaaatccaaaatcactcagaggccaaatctgtaaaatcaaaatgaggttgaagacaattagtgaaagtaatgttatagtatcatcatattcccttttgctatctgtcccttttctctatgccagataaacactttctccttactcatcaatcaagaataaaattttctacatcaaagtaagacttgagaaaataaacttatgtgtatatatgtttaaactccaaagtttgggacattcaaacaatgtacatgaaattatatgtgtgtggtgtgtgaataaatatgtatgaatat

SEQ ID NO: 6392 - protein, 41 aa, Homo sapiens [sequence omitted]

SEQ ID NO: 6393 - DNA, 1093 bp, Homo sapiens
taaaaattagccagtcacgttggtgtctgcctgtggtcccagctactcgggaggctgaggcacaagaatcacttgaacccaggaggcagagtgagccgaggttgtgccactgcactgcagcctgggctacagagagcaagactctgtctcaaaaaaaataaaataaaataaataaaaaaagatatagtattaatgcctgtatttatgaagacagggccattgcactgctgctatggtatttaatattttgtgtacagtaaaagtcagaactcatttaaagaactttaagggatcctttagaaacatttttacttaatttcaaatgagtgggctgagcatgtagactagcagctttttatcaaacctggcattgtcaggttgaacttataaatacgaatagttactactctgacttgtaaatgtagctgctaaagtatgaggtatatttaagaagaatagattagtttcattatacctataagaacaagaattcaaaagtgaggtagtcatccaggttccccctcccacaatatttttgtatcataaaatttagatgacttttttgggttacatttttatccatatattttgaactaacagaacttggcagaatgtgtgttgaatattctttacatttaacaattaaaaacaactaaaactgaatagcaaatagtttattggtaagtacacggtttcaacgggagtaataaattcacatgaaaaggagacaataatcaagtcaaaagaataaatgcttactaatcatcagaaaatctgtggccattagggctggcacgtaaaaatccaaaatcactcagaggccaaatctgtaaaatcaaaatgaggttgaagacaattagtgaaagtaatgttatagtatcatcatattcccttttgctatctgtcccttttctctatgccagataaacactttctccttactcatcaatcaagaataaaattttctacatcaaagtaagacttgagaaaataaacttatgtgtatatatgtttaaactccaaagtttgggacattcaaacaatgtacatgaaattatatgtgtgtggtgtgtgaataaatatgtatgaatat

SEQ ID NO: 6394 - protein, 32 aa, Homo sapiens
NKINKKRYSINACIYEDRAIALLLWYLIFCVQ

SEQ ID NO: 6395 - DNA, 1025 bp, Homo sapiens
ctttgatatttagtaaaagttattgtgcaagaaataaaagcaaaaatgcaatattaggatttgtatctattctataaaagagagccttaggacatttctccctacctctgaatgacatgctttttaattatagtacccaaattaggttttatctttaagaggctgcatttcttctctaattctaggtgccaatgggtcatgtttggttagaaggtgacaatctacagaattctacagattccaggtgctatggacctattccatatggactaataagaggacgaatcttctttaagatttggcctctgagtgattttggatttttacgtgccagccctaatggccacagattttctgatgattagtaagcatttattcttttgacttgattattgtctccttttcatgtgaatttattactcccgttgaaaccgtgtacttaccaataaactatttgctattcagttttagttgtttttaattgttaaatgtaaagaatattcaacacacattctgccaagttctgttagttcaaaatatatggataaaaatgtaacccaaaaaagtcatctaaattttatgatacaaaaatattgtgggagggggaacctggatgactacctcacttttgaattcttgttcttataggtataatgaaactaatctattcttcttaaatatacctcatactttagcagctacatttacaagtcagagtagtaactattcgtatttataagttcaacctgacaatgccaggtttgataaaaagctgctagtctacatgctcagcccactcatttgaaattaagtaaaaatgtttctaaaggatcccttaaagttctttaaatgagttctgacttttactgtacacaaaatattaaatacatagaaaaatgcatctttaaggcatatgccatctgtagttggctatagtcaataatactttataaaagttcatttcagcatagcagcagtgcaatggccctgtcttcataaatacaggcattaatactatatctttt

SEQ ID NO: 6396 - protein, 57 aa, Homo sapiens
MGHVWLEGDNLQNSTDSRCYGPIPYGLIRGRIFFKIWPLSDFGFLRASPNGHRFSDD

SEQ ID NO: 6397 - DNA, 1042 bp, Homo sapiens
tctcaagaaaagaaaagaaaaaaaaagatgctgtttgctttccttattttgaagactatagtgataaaaacctgtgctacacatccatttctcagcaacggctcctaggataatcaatcatggcatactgctaatgccttgattgcagctgatatggaggaaatatgtttactcttttgctaaagtgaagttcactgcggaggtgccaatgggtcatgtttggttagaaggtgacaatctacagaattctacagattccaggtgctatggacctattccatatggactaataagaggacgaatcttctttaagatttggcctctgagtgattttggatttttacgtgccagccctaatggccacagattttctgatgattagtaagcatttattcttttgacttgattattgtctccttttcatgtgaatttattactcccgttgaaaccgtgtacttaccaataaactatttgctattcagttttagttgtttttaattgttaaatgtaaagaatattcaacacacattctgccaagttctgttagttcaaaatatatggataaaaatgtaacccaaaaaagtcatctaaattttatgatacaaaaatattgtgggagggggaacctggatgactacctcacttttgaattcttgttcttataggtataatgaaactaatctattcttcttaaatatacctcatactttagcagctacatttacaagtcagagtagtaactattcgtatttataagttcaacctgacaatgccaggtttgataaaaagctgctagtctacatgctcagcccactcatttgaaattaagtaaaaatgtttctaaaggatcccttaaagttctttaaatgagttctgacttttactgtacacaaaatattaaatacatagaaaaatgcatctttaaggcatatgccatctgtagttggctatagtcaataatactttataaaagttcatttcagcatagcagcagtgcaatggccctgtcttcataaatacaggcattaatactatatctttt

SEQ ID NO: 6398 - protein, 57 aa, Homo sapiens; identical to SEQ ID NO: 6396

SEQ ID NO: 6399 - DNA, 1017 bp, Homo sapiens
ggcccacctgtgtcctggttgagggtctccagggttctttggggcccgagaggtgacattgtgattgcaaaaagcccaagtgatccaaaatcaaatatttgtaaaagagtaattggtttggaaggagacaaaatcctcaccactagtccatcagatttctttaaaagccatagttatgtgccaatgggtcatgtttggttagaaggtgacaatctacagaattctacagattccaggtgctatggacctattccatatggactaataagaggacgaatcttctttaagatttggcctctgagtgattttggatttttacgtgccagccctaatggccacagattttctgatgattagtaagcatttattcttttgacttgattattgtctccttttcatgtgaatttattactcccgttgaaaccgtgtacttaccaataaactatttgctattcagttttagttgtttttaattgttaaatgtaaagaatattcaacacacattctgccaagttctgttagttcaaaatatatggataaaaatgtaacccaaaaaagtcatctaaattttatgatacaaaaatattgtgggagggggaacctggatgactacctcacttttgaattcttgttcttataggtataatgaaactaatctattcttcttaaatatacctcatactttagcagctacatttacaagtcagagtagtaactattcgtatttataagttcaacctgacaatgccaggtttgataaaaagctgctagtctacatgctcagcccactcatttgaaattaagtaaaaatgtttctaaaggatcccttaaagttctttaaatgagttctgacttttactgtacacaaaatattaaatacatagaaaaatgcatctttaaggcatatgccatctgtagttggctatagtcaataatactttataaaagttcatttcagcatagcagcagtgcaatggccctgtcttcataaatacaggcattaatactatatctttt

SEQ ID NO: 6400 - protein, 57 aa, Homo sapiens; identical to SEQ ID NO: 6396

SEQ ID NO: 6401 - DNA, 1173 bp, Homo sapiens
cttcggcggggcccaggtgagaaaggcccacctgtgtcctggttgagggtctccagggttctttggggcccgaggtgaagcgacttccagtcatttggaaaggatgggatgaaaaggaaccttggtgataattttgatgtctgcaagatttagtaccagtgtaatgggattatcggtaacaccttcactgcagaaaaagccacctggcgctataactggcagcaactgagaactaatcctttcccatctcttggatgtcattcatgaagctcaaagctatttctgccctgctaactgtgattaattttataaacaacaacaacaaaaaatcaggtgccaatgggtcatgtttggttagaaggtgacaatctacagaattctacagattccaggtgctatggacctattccatatggactaataagaggacgaatcttctttaagatttggcctctgagtgattttggatttttacgtgccagccctaatggccacagattttctgatgattagtaagcatttattcttttgacttgattattgtctccttttcatgtgaatttattactcccgttgaaaccgtgtacttaccaataaactatttgctattcagttttagttgtttttaattgttaaatgtaaagaatattcaacacacattctgccaagttctgttagttcaaaatatatggataaaaatgtaacccaaaaaagtcatctaaattttatgatacaaaaatattgtgggagggggaacctggatgactacctcacttttgaattcttgttcttataggtataatgaaactaatctattcttcttaaatatacctcatactttagcagctacatttacaagtcagagtagtaactattcgtatttataagttcaacctgacaatgccaggtttgataaaaagctgctagtctacatgctcagcccactcatttgaaattaagtaaaaatgtttctaaaggatcccttaaagttctttaaatgagttctgacttttactgtacacaaaatattaaatacatagaaaaatgcatctttaaggcatatgccatctgtagttggctatagtcaataatactttataaaagttcatttcagcatagcagcagtgcaatggccctgtcttcataaatacaggcattaatactatatctttt

SEQ ID NO: 6402 - protein, 57 aa, Homo sapiens; identical to SEQ ID NO: 6396

SEQ ID NO: 6403 - DNA, 923 bp, Homo sapiens
gacggtcgacttcggcggggcccaggtgagaaaggcccacctgtgtcctggttgagggtctccagggttctttggggcccgaggtgccaatgggtcatgtttggttagaaggtgacaatctacagaattctacagattccaggtgctatggacctattccatatggactaataagaggacgaatcttctttaagatttggcctctgagtgattttggatttttacgtgccagccctaatggccacagattttctgatgattagtaagcatttattcttttgacttgattattgtctccttttcatgtgaatttattactcccgttgaaaccgtgtacttaccaataaactatttgctattcagttttagttgtttttaattgttaaatgtaaagaatattcaacacacattctgccaagttctgttagttcaaaatatatggataaaaatgtaacccaaaaaagtcatctaaattttatgatacaaaaatattgtgggagggggaacctggatgactacctcacttttgaattcttgttcttataggtataatgaaactaatctattcttcttaaatatacctcatactttagcagctacatttacaagtcagagtagtaactattcgtatttataagttcaacctgacaatgccaggtttgataaaaagctgctagtctacatgctcagcccactcatttgaaattaagtaaaaatgtttctaaaggatcccttaaagttctttaaatgagttctgacttttactgtacacaaaatattaaatacatagaaaaatgcatctttaaggcatatgccatctgtagttggctatagtcaataatactttataaaagttcatttcagcatagcagcagtgcaatggccctgtcttcataaatacaggcattaatactatatctttt

SEQ ID NO: 6404 - protein, 57 aa, Homo sapiens; identical to SEQ ID NO: 6396

SEQ ID NO: 6405 - DNA, 1294 bp, Homo sapiens
gaaaagtgcgccctacgaaaggacggtcgacttcggcggggcccaggtgagaaaggcccacctgtgtcctggttgagggtctccagggttctttggggcccgaggccaatggtggcagagtctacatagaactatgcttcgtggtgttctggggaaaacctttcgacttgttggctatactattcaatatggctgtatagctcattgtgcttttgaatacgttggtggtgttgtcatgtgttctggaccatcaatggagcctacaattcaaaattcagatattgtctttgcagaaaatcttagtcgacatttttatggtatccaaagaggtgacattgtgattgcaaaaagcccaagtgatccaaaatcaaatatttgtaaaagagtaattggtttggaaggagacaaaatcctcaccactagtccatcagatttctttaaaagccatagttatgtgccaatgggtcatgtttggttagaaggtgacaatctacagaattctacagattccaggtgctatggacctattccatatggactaataagaggacgaatcttctttaagatttggcctctgagtgattttggatttttacgtgccagccctaatggccacagattttctgatgattagtaagcatttattcttttgacttgattattgtctccttttcatgtgaatttattactcccgttgaaaccgtgtacttaccaataaactatttgctattcagttttagttgtttttaattgttaaatgtaaagaatattcaacacacattctgccaagttctgttagttcaaaatatatggataaaaatgtaacccaaaaaagtcatctaaattttatgatacaaaaatattgtgggagggggaacctggatgactacctcacttttgaattcttgttcttataggtataatgaaactaatctattcttcttaaatatacctcatactttagcagctacatttacaagtcagagtagtaactattcgtatttataagttcaacctgacaatgccaggtttgataaaaagctgctagtctacatgctcagcccactcatttgaaattaagtaaaaatgtttctaaaggatcccttaaagttctttaaatgagttctgacttttactgtacacaaaatattaaatacatagaaaaatgcatctttaaggcatatgccatctgtagttggctatagtcaataatactttataaaagttcatttcagcatagcagcagtgcaatggccctgtcttcataaatacaggcattaatactatatctttt

SEQ ID NO: 6406 - protein, 166 aa, Homo sapiens; identical to SEQ ID NO: 866

SEQ ID NO: 6407 - DNA, 1357 bp, Homo sapiens
gaaaagtgcgccctacgaaaggacggtcgacttcggcggggcccaggtgagaaaggcccacctgtgtcctggttgagggtctccagggttctttggggcccgaggaatttcagacctgaacaatcaggtggacaacttcttgtgactttgggtattctgaaattactgccaatggtggcagagtctacatagaactatgcttcgtggtgttctggggaaaacctttcgacttgttggctatactattcaatatggctgtatagctcattgtgcttttgaatacgttggtggtgttgtcatgtgttctggaccatcaatggagcctacaattcaaaattcagatattgtctttgcagaaaatcttagtcgacatttttatggtatccaaagaggtgacattgtgattgcaaaaagcccaagtgatccaaaatcaaatatttgtaaaagagtaattggtttggaaggagacaaaatcctcaccactagtccatcagatttctttaaaagccatagttatgtgccaatgggtcatgtttggttagaaggtgacaatctacagaattctacagattccaggtgctatggacctattccatatggactaataagaggacgaatcttctttaagatttggcctctgagtgattttggatttttacgtgccagccctaatggccacagattttctgatgattagtaagcatttattcttttgacttgattattgtctccttttcatgtgaatttattactcccgttgaaaccgtgtacttaccaataaactatttgctattcagttttagttgtttttaattgttaaatgtaaagaatattcaacacacattctgccaagttctgttagttcaaaatatatggataaaaatgtaacccaaaaaagtcatctaaattttatgatacaaaaatattgtgggagggggaacctggatgactacctcacttttgaattcttgttcttataggtataatgaaactaatctattcttcttaaatatacctcatactttagcagctacatttacaagtcagagtagtaactattcgtatttataagttcaacctgacaatgccaggtttgataaaaagctgctagtctacatgctcagcccactcatttgaaattaagtaaaaatgtttctaaaggatcccttaaagttctttaaatgagttctgacttttactgtacacaaaatattaaatacatagaaaaatgcatctttaaggcatatgccatctgtagttggctatagtcaataatactttataaaagttcatttcagcatagcagcagtgcaatggccctgtcttcataaatacaggcattaatactatatctttt

SEQ ID NO: 6408 - protein, 166 aa, Homo sapiens; identical to SEQ ID NO: 866

SEQ ID NO: 6409 - DNA, 466 bp, Homo sapiens
ctttgatatttagtaaaagttattgtgcaagaaataaaagcaaaaatgcaatattaggatttgtatctattctataaaagagagccttaggacatttctccctacctctgaatgacatgctttttaattatagtacccaaattaggttttatctttaagaggctgcatttcttctctaattctaggtgccaatgggtcatgtttggttagaaggtgacaatctacagaattctacagattccaggtgctatggacctattccatatggactaataagaggacgaatcttctttaagatttggcctctgagtgattttggatttttacgtgccagccctaatggccacagattttctgatgattagtaagcatttattcttttgacttgattattgtctccttttcatgtgaatttattactcccgttgaaaccgtgtacttaccaataaactatttgctattcagt

SEQ ID NO: 6410 - protein, 57 aa, Homo sapiens; identical to SEQ ID NO: 6396

SEQ ID NO: 6411 - DNA, 482 bp, Homo sapiens
tctcaagaaaagaaaagaaaaaaaaagatgctgtttgctttccttattttgaagactatagtgataaaaacctgtgctacacatccatttctcagcaacggctcctaggataatcaatcatggcatactgctaatgccttgattgcagctgatatggaggaaatatgtttactcttttgctaaagtgaagttcactgcggaggtgccaatgggtcatgtttggttagaaggtgacaatctacagaattctacagattccaggtgctatggacctattccatatggactaataagaggacgaatcttctttaagatttggcctctgagtgattttggatttttacgtgccagccctaatggccacagattttctgatgattagtaagcatttattcttttgacttgattattgtctccttttcatgtgaatttattactcccgttgaaaccgtgtacttaccaataaactatttgctattcag

SEQ ID NO: 6412 - protein, 57 aa, Homo sapiens; identical to SEQ ID NO: 6396

SEQ ID NO: 6413 - DNA, 437 bp, Homo sapiens
ttgtaaaagagtaattggtttggaaggagacaaaatcctcaccactagtccatcagatttctttaaaagccatagttatcatttcagataagagatactcaacctgcaacttatagaggtggatcagcaaagatgcctgctttaattttaaaagatctgtgccaatgggtcatgtttggttagaaggtgacaatctacagaattctacagattccaggtgctatggacctattccatatggactaataagaggacgaatcttctttaagatttggcctctgagtgattttggatttttacgtgccagccctaatggccacagattttctgatgattagtaagcatttattcttttgacttgattattgtctccttttcatgtgaatttattactcccgttgaaaccgtgtacttaccaataaactatttgctattca

SEQ ID NO: 6414 - protein, 57 aa, Homo sapiens; identical to SEQ ID NO: 6396

SEQ ID NO: 6415 - DNA, 456 bp, Homo sapiens
ggcccacctgtgtcctggttgagggtctccagggttctttggggcccgagaggtgacattgtgattgcaaaaagcccaagtgatccaaaatcaaatatttgtaaaagagtaattggtttggaaggagacaaaatcctcaccactagtccatcagatttctttaaaagccatagttatgtgccaatgggtcatgtttggttagaaggtgacaatctacagaattctacagattccaggtgctatggacctattccatatggactaataagaggacgaatcttctttaagatttggcctctgagtgattttggatttttacgtgccagccctaatggccacagattttctgatgattagtaagcatttattcttttgacttgattattgtctccttttcatgtgaatttattactcccgttgaaaccgtgtacttaccaataaactatttgctattca

SEQ ID NO: 6416 - protein, 57 aa, Homo sapiens; identical to SEQ ID NO: 6396

SEQ ID NO: 6417 - DNA, 612 bp, Homo sapiens
cttcggcggggcccaggtgagaaaggcccacctgtgtcctggttgagggtctccagggttctttggggcccgaggtgaagcgacttccagtcatttggaaaggatgggatgaaaaggaaccttggtgataattttgatgtctgcaagatttagtaccagtgtaatgggattatcggtaacaccttcactgcagaaaaagccacctggcgctataactggcagcaactgagaactaatcctttcccatctcttggatgtcattcatgaagctcaaagctatttctgccctgctaactgtgattaattttataaacaacaacaacaaaaaatcaggtgccaatgggtcatgtttggttagaaggtgacaatctacagaattctacagattccaggtgctatggacctattccatatggactaataagaggacgaatcttctttaagatttggcctctgagtgattttggatttttacgtgccagccctaatggccacagattttctgatgattagtaagcatttattcttttgacttgattattgtctccttttcatgtgaatttattactcccgttgaaaccgtgtacttaccaataaactatttgctattca

SEQ ID NO: 6418 - protein, 57 aa, Homo sapiens; identical to SEQ ID NO: 6396

SEQ ID NO: 6419 - DNA, 362 bp, Homo sapiens
gacggtcgacttcggcggggcccaggtgagaaaggcccacctgtgtcctggttgagggtctccagggttctttggggcccgaggtgccaatgggtcatgtttggttagaaggtgacaatctacagaattctacagattccaggtgctatggacctattccatatggactaataagaggacgaatcttctttaagatttggcctctgagtgattttggatttttacgtgccagccctaatggccacagattttctgatgattagtaagcatttattcttttgacttgattattgtctccttttcatgtgaatttattactcccgttgaaaccgtgtacttaccaataaactatttgctattca

SEQ ID NO: 6420 - protein, 57 aa, Homo sapiens; identical to SEQ ID NO: 6396

SEQ ID NO: 6421 - DNA, 733 bp, Homo sapiens
gaaaagtgcgccctacgaaaggacggtcgacttcggcggggcccaggtgagaaaggcccacctgtgtcctggttgagggtctccagggttctttggggcccgaggccaatggtggcagagtctacatagaactatgcttcgtggtgttctggggaaaacctttcgacttgttggctatactattcaatatggctgtatagctcattgtgcttttgaatacgttggtggtgttgtcatgtgttctggaccatcaatggagcctacaattcaaaattcagatattgtctttgcagaaaatcttagtcgacatttttatggtatccaaagaggtgacattgtgattgcaaaaagcccaagtgatccaaaatcaaatatttgtaaaagagtaattggtttggaaggagacaaaatcctcaccactagtccatcagatttctttaaaagccatagttatgtgccaatgggtcatgtttggttagaaggtgacaatctacagaattctacagattccaggtgctatggacctattccatatggactaataagaggacgaatcttctttaagatttggcctctgagtgattttggatttttacgtgccagccctaatggccacagattttctgatgattagtaagcatttattcttttgacttgattattgtctccttttcatgtgaatttattactcccgttgaaaccgtgtacttaccaataaactatttgctattca

SEQ ID NO: 6422 - protein, 166 aa, Homo sapiens; identical to SEQ ID NO: 866

SEQ ID NO: 6423 - DNA, 796 bp, Homo sapiens
gaaaagtgcgccctacgaaaggacggtcgacttcggcggggcccaggtgagaaaggcccacctgtgtcctggttgagggtctccagggttctttggggcccgaggaatttcagacctgaacaatcaggtggacaacttcttgtgactttgggtattctgaaattactgccaatggtggcagagtctacatagaactatgcttcgtggtgttctggggaaaacctttcgacttgttggctatactattcaatatggctgtatagctcattgtgcttttgaatacgttggtggtgttgtcatgtgttctggaccatcaatggagcctacaattcaaaattcagatattgtctttgcagaaaatcttagtcgacatttttatggtatccaaagaggtgacattgtgattgcaaaaagcccaagtgatccaaaatcaaatatttgtaaaagagtaattggtttggaaggagacaaaatcctcaccactagtccatcagatttctttaaaagccatagttatgtgccaatgggtcatgtttggttagaaggtgacaatctacagaattctacagattccaggtgctatggacctattccatatggactaataagaggacgaatcttctttaagatttggcctctgagtgattttggatttttacgtgccagccctaatggccacagattttctgatgattagtaagcatttattcttttgacttgattattgtctccttttcatgtgaatttattactcccgttgaaaccgtgtacttaccaataaactatttgctattca

SEQ ID NO: 6424 - protein, 166 aa, Homo sapiens; identical to SEQ ID NO: 866

SEQ ID NO: 6425 - DNA, 363 bp, Homo sapiens
aggtgagaaaggcccacctgtgtcctggttgagggtctccagggttctttggggcccgaggtaggtaatatcacgtaacgttcttctccttttgagtgccttcattcacattgagttaaagaaaaggaatttcagacctgaacaatcaggtggacaacttcttgtgactttgggtattctgaaattactcatcttgactctactgtgcctggatgtagctgtgtgttttgccaatggtggcagagtctacatagaactatgcttcgtggtgttctggggaaaacctttcgacttgttggctatactattcaatatggctgtatagctcattgtgcttttgaatacgttggtggtgttgtcatg

SEQ ID NO: 6426 - protein, 34 aa, Homo sapiens
MLRGVLGKTFRLVGYTIQYGCIAHCAFEYVGGVV

SEQ ID NO: 6427 - DNA, 712 bp, Homo sapiens
acgaaaggacggtcgacttcggcggggcccaggtgagaaaggcccacctgtgtcctggttgagggtctccagggttctttggggcccgaggtgaagcgacttccagtcatttggaaaggatgggatgaaaaggaaccttggtgataattttgatgtctgcaagatttagtaccagtgtaatgggattatcggtaacaccttcactgcagaaaaagccacctggcgctataactggcagcaactgagaactaatcctttcccatctcttggatgtcattcatgaagctcaaagctatttctgccctgctaactgtgattaattttataaacaacaacaacaaaaaatcaggtcatcaaggcaaagaatatgctctttattatttataatatgtaaccttatgttaagctatatgacttaaaattatgcaagacatatacaaactaagctatatgattcaaaatttattaagctattgaaatagaaaagttgatcaatgatgtcttggtttttttaattgaatggcaaattatttactattggtaacaattcatatttcagatcaaatattaatttaaatacttttatattcttttggctatagagccactatgaaattaatcaaaatgtctagctgtaaggaattgaaataatatgtttcgtcatatgttttacctgtttttgactgcttcagttgctactgatgaaatgttt

SEQ ID NO: 6428 - protein, 38 aa, Homo sapiens
MSFMKLKAISALLTVINFINNNNKKSGHQGKEYALYYL

SEQ ID NO: 6429 - DNA, 1565 bp, Homo sapiens
agagttcctattgggttaacactggaggctctaagatggcggcagtggcaacctgcggtagtgttgccgcgagtactgggtctgcagtggcgacagccagcaagagcaacgtcaccagtttccagaggaggggtcctagagccagcgtgaccaacgacagcggccctcgactggtgtccattgcgggcacgcgaccgtcggtgcggaatggacagctgctggtatcaaccgggctcccagccctagaccagctcttaggtggaggtttagccgttggaacagttcttctaattgaggaggataaatataatatttactcacctttgctcttcaagtatttcctggcagaaggaattgtcaatgggcatactttgttggttgcatctgctaaagaggatcctgccaacattttacaggaacttccagcaccattacttgatgataaatgtaaaaaggaatttgatgaagatgtatacaatcataaaacaccagaatctaatattaagatgaaaatagcttggcgttaccagttattacccaagatggagattggaccagtatcatcttcaagatttggtcactattatgatgcatcaaaaagaatgccacaagaactaattgaggcttcaaattggcatggattttttcttccagagaaaatatcttcaactctcaaagtagaaccctgttctttgacccctggctacacaaagctgcttcagtttatccagaacatcatttatgaggaaggatttgatggatccaatcctcagaaaaaacagagaaacattttaagaataggaattcagaatcttggctcacctttatggggagacgatatttgctgtgcagaaaatggtggcaacagtcacagccttaccaagttcctctatgttctccgtggtcttctgagaacctctctttcagcctgcatcatcacaatgccaacacatctgatccagaataaagccattattgcccgtgtcacaaccttgtcagatgtagtagttggtctggaatcatttattggttctgagagagaaactaacccattgtataaggattatcatggattgattcatatacggcagattcctcggcttaataacttgatctgtgatgaatcagatgtcaaagacttagcttttaaattaaaaaggaagctattcaccattgagcgactgcatttgcctccagacttgtcagacacagtgagccgctcaagcaaaatggatctggcagaatccgccaagcggctgggcccaggctgtggcatgatggccggaggcaagaagcacctggacttctagggattcctccttagtcgctgcatgcagaattctatgacactctaattatgattgctaatagcttatgtaaatatttttcttaacaatttgaccctccactccttgaaaaacacaggattataaaatggtgccgccatttctcattttttaactttttacagaactagcacagcagaaatacttttaaatttttccttcatgctctagagaaaataattttatttttaaataaacgccaaaaaatgtcaaaatctc

SEQ ID NO: 6430 - protein, 424 aa, Homo sapiens; identical to SEQ ID NO: 868

SEQ ID NO: 6431 - DNA, 1982 bp, Homo sapiens
tgggttaacactggaggctctaagatggcggcagtggcaacctgcggtagtgttgccgcgagtactgggtctgcagtggcgacagccagcaagagcaacgtcaccagtttccagaggaggggtcctagagccagcgtgaccaacgacagcggccctcgactggtgtccattgcgggcacgcgaccgtcggtgcggaatggacagctgctggtatcaaccgggctcccagccctagaccagctcttaggtggaggtttagccgttggaacagttcttctaattgaggaggataaatataatatttactcacctttgctcttcaagtatttcctggcagaaggaattgtcaatgggcatactttgttggttgcatctgctaaagaggatcctgccaacattttacaggaacttccagcaccattacttgatgataaatgtaaaaaggaatttgatgaagatgtatacaatcataaaacaccagaatctaatattaagatgaaaatagcttggcgttaccagttattacccaagatggagattggaccagtatcatcttcaagatttggtcactattatgatgcatcaaaaagaatgccacaagaactaattgaggcttcaaattggcatggattttttcttccagagaaaatatcttcaactctcaaagtagaaccctgttctttgacccctggctacacaaagctgcttcagtttatccagaacatcatttatgaggaaggatttgatggatccaatcctcagaaaaaacagagaaacattttaagaataggaattcagaatcttggctcacctttatggggagacgatatttgctgtgcagaaaatggtggcaacagtcacagccttaccaagttcctctatgttctccgtggtcttctgagaacctctctttcagcctgcatcatcacaatgccaacacatctgatccagaataaagccattattgcccgtgtcacaaccttgtcagatgtagtagttggtctggaatcatttattggttctgagagagaaactaacccattgtataaggattatcatggattgattcatatacggcagattcctcggcttaataacttgatctgtgatgaatcagatgtcaaagacttagcttttaaattaaaaaggaagctattcaccattgaggctggagtgcagtggcacgatctcggctcacggcaacctcgcctcctgggttcaagcaattctcccgcctcagcctccctagtagctgggattacaggcgcccaccaccacacccagctaatttttgtatttttagtagagatggggttccaccatgttggccaggctggtctcgaactcctgacctcaggtgattcatccgcctcagcctcccaaagtgctggaattacaggcatgagctaccgcgcccggcctagggctttgtatttcaaagagaacaagtctaaagtgggtgcaagacaactacttgagacaagagaggaacatttatcctccaggcttctcatacttactcaagcagaaagactctgcatggggagaaggttctttacagcattccacatttttaatgagcttccttgcaaaggcgactgcatttgcctccagacttgtcagacacagtgagccgctcaagcaaaatggatctggcagaatccgccaagcggctgggcccaggctgtggcatgatggccggaggcaagaagcacctggacttctagggattcctccttagtcgctgcatgcagaattctatgacactctaattatgattgctaatagcttatgtaaatatttttcttaacaatttgaccctccactccttgaaaaacacaggattataaaatggtgccgccatttctcattttttaactttttacagaactagcacagcagaaatacttttaaatttttccttcatgctctagagaaaataattttatttttaaataaacgccaaaaaatgtcaaaatctc

SEQ ID NO: 6432 - protein, 535 aa, Homo sapiens
MAAVATCGSVAASTGSAVATASKSNVTSFQRRGPRASVTNDSGPRLVSIAGTRPSVRNGQLLVSTGLPALDQLLGGGLAVGTVLLIEEDKYNIYSPLLFKYFLAEGIVNGHTLLVASAKEDPANILQELPAPLLDDKCKKEFDEDVYNHKTPESNIKMKIAWRYQLLPKMEIGPVSSSRFGHYYDASKRMPQELIEASNWHGFFLPEKISSTLKVEPCSLTPGYTKLLQFIQNIIYEEGFDGSNPQKKQRNILRIGIQNLGSPLWGDDICCAENGGNSHSLTKFLYVLRGLLRTSLSACIITMPTHLIQNKAIIARVTTLSDVVVGLESFIGSERETNPLYKDYHGLIHIRQIPRLNNLICDESDVKDLAFKLKRKLFTIEAGVQWHDLGSRQPRLLGSSNSPASASLVAGITGAHHHTQLIFVFLVEMGFHHVGQAGLELLTSGDSSASASQSAGITGMSYRARPRALYFKENKSKVGARQLLETREEHLSSRLLILTQAERLCMGRRFFTAFHIFNELPCKGDCICLQTCQTQ

SEQ ID NO: 6433 - DNA, 336 bp, Homo sapiens
taacactggaggctctaagatggcggcagtggcaacctgcggtagtgttgccgcgagtactgggtctgcagtggcgacagccagcaagagcaacgtcaccagtttccagaggaggggtcctagagccagcgtgaccaacgacagcggccctcgactggtgtccattgcgggcacgcgaccgtcggtgcggaatggacagctgctggtatcaaccgggctcccagccctagaccagctcttaggtggaggtttagccgttggaacagttcttctaattgaggaggataaatataatatttactcacctttgctcttcaagtatttcctggcagaagg

SEQ ID NO: 6434 - protein, 104 aa, Homo sapiens
MAAVATCGSVAASTGSAVATASKSNVTSFQRRGPRASVTNDSGPRLVSIAGTRPSVRNGQLLVSTGLPALDQLLGGGLAVGTVLLIEEDKYNIYSPLLFKYFLA

SEQ ID NO: 6435 - DNA, 479 bp, Homo sapiens
gcttttgaaaaattttctagtttataatttttgtaccacttcaaagtatgaggtttccatttttaaaaatataatttaaaagccgtgttaaaacgaccatactgttgaagtttcaaattggcaaattgagtgtattattttgaattttactgcaggacagatgaaacaggctcaagctcttctaaattttgtgaaacaccaatgaaattttccttcatgaacatttaaatccatcatcatttctgcaggttccaaggccatgggcattttaagattaatgttctagatgaaataaaattattttatggtctattaagataatttgctaaacatctatttaaaagcctactgtatagggggtactagagatacaaaaataagacattgtttctattttaaagaattcacaatttaataattaaagcatgagccacagcacccagccccaaaaaataatatttatacatagcaatgtagga

SEQ ID NO: 6436 - protein, 32 aa, Homo sapiens
DNLLNIYLKAYCIGGTRDTKIRHCFYFKEFTI

SEQ ID NO: 6437 - DNA, 620 bp, Homo sapiens
cgttgatccagtgggattacagcaaatcaccctggcctgtgcaggaaccgtggaagttgtcacacctttcccagatccgtttgcctacacagaaatcattgttttagacaaggcattaatggaaaaagtaggcagccagccagccagccagctatccatctcctgcatcacacagtctcttcctcccagaatctgagaaaagaaaatcaagtggaaaaatttcagctcaagaacgactgcatttgcctccagacttgtcagacacagtgagccgctcaagcaaaatggatctggcagaatccgccaagcggctgggcccaggctgtggcatgatggccggaggcaagaagcacctggacttctagggattcctccttagtcgctgcatgcagaattctatgacactctaattatgattgctaatagcttatgtaaatatttttcttaacaatttgaccctccactccttgaaaaacacaggattataaaatggtgccgccatttctcattttttaactttttacagaactagcacagcagaaatacttttaaatttttccttcatgctctagagaaaataattttatttttaaataaacgccaaaaaatgtcaaaatctc

SEQ ID NO: 6438 - protein, 87 aa, Homo sapiens
SSGITANHPGLCRNRGSCHTFPRSVCLHRNHCFRQGINGKSRQPASQPAIHLLHHTVSSSQNLRKENQVEKFQLKNDCICLQTCQTQ

SEQ ID NO: 6439 - DNA, 2141 bp, Homo sapiens
cgttgatccagtgggattacagcaaatcaccctggcctgtgcaggaaccgtggaagttgtcacacctttcccagatccgtttgcctacacagaaatcattgttttagacaaggcattaatggaaaaagtaggcagccagccagccagccagctatccatctcctgcatcacacagtctcttcctcccagaatctgagaaaagaaaatcaagtggaaaaatttcagctcaagaacgactgcatttgcctccagacttgtcagacacagtgagccgctcaagcaaaatggatctggcagaatccgccaagcggctgggcccaggctgtggcatgatggccggaggcaagaagcacctggacttctagggattcctccttagtcgctgcatgcagaattctatgacactctaattatgattgctaatagcttatgtaaatatttttcttaacaatttgaccctccactccttgaaaaacacaggattataaaatggtgccgccatttctcattttttaactttttacagaactagcacagcagaaatacttttaaatttttccttcatgctctagagaaaataattttatttttaaataaacgccaaaaaatgtcaaaatctcaagattcctgacagtggtcattcgtgtgtgtactaaggcatttagtgtcatggtaaagtgcatgtcacagcaggtagcatacaaaacatgatgaaattcaagattgtatgtgaaaacatactttctctttattacagaaacagtcacttgccaccaaaaatgctgttttttaaatgaaaatgtgtttactaatatataaaataaatttgcatttatgtatccagttattaaattgataaagacaaagtaatattttgggatttagattccactagagataattagtctaccatagtagttattaaatataaagaacttcagtgataggaaacatagaaaaaagaagtggatggtctttagtttagtaatcctaaacaattgaagtcagtactatgaaattatgtcaacaggcatcattcaggattgaaattcaaactgacagctacattaatgctaggataccaggagaaaaacatatactgaagcttgttgagagattttacagaacataggtctgagacaaagtgaaaaaatgaaactaactcagatttccattgcatcacataaatattttgttaataatgaacattggttgagtgtgtaaatttctaaccatgtaaacatgtctttggggggtatagcatatcgaaccagttttcatatgaaacattaggtgttttaattacaattctatattctcaaagcttttgacagataatggataaaaaatgaaagttgaaaagtaacttgcatatttaagagtcttgattttttaaaaggtgtttaacatccattgggagaaactgaatttccaaaatacattttcaaatgtatttaatattttgaagcagttataactagcatttttaagcagcttgcttttaatataccacaaattatactttatttgttcttgacaacattgtagaaaacaaagactaggtttttaaaactgtctaaccaatatgatgaatgtcagtcacttaaaaaaacccactgtagcataaacacatactgtatacagcttttattcagaattagaataattgaatcaatgacagtgatttgccaggatgtcaaatctctccatcatatcctgtcactaccagtttattttttgtgatcaaaatcaaaaagacaactattttgtcacccgctatttcattagtactaaaaatcaggtttcttattctatttttttagaatgtcgggtttatttttttcatttcttttaattctaaagacacagattcttccccattttcttttcaaaataaagtttcagaattgatctgtcagttaaaattaaagggctttatattaagcaaaggtgcttttaaattttaaagcaacttcaaaaaattgatttagtccatagataataaataatgttgtgcggatactccacaaaagctctgctatgtcctttgaaagcattatgaacattctgaataaattcaaatgagtattttagtcagtttattattttaataactctaacctttttcttaccgtgttgat

SEQ ID NO: 6440 - protein, 53 aa, Homo sapiens
MSNLSIISCHYQFIFCDQNQKDNYFVTRYFISTKNQVSYSIFLECRVYFFHFF

SEQ ID NO: 6441 - DNA, 3279 bp, Homo sapiens
gagaaaactactctttgaattttggagtgggtgagcccgattgtctatccatttattcattctcttgaccaaaatcatcattttacaaatggtgggtgtcttcctctggaccttctctgatatgcttccctctctgagcatatggattttggaaattaaacatttctccagtttgcagagaagagaaatgatagtatactgtactatcatctgacctgcttgttcccgacacacttcttttaattcatcccaagtttgctgccatggcatagtaccatgagagctcatgaggcgttttgttaggagaaaggtttacctcctcagtgctgccattccgaacagttcgagggtagcaacagttttctagttataagtcagtctgggcttttgggtctgttaggaagtcatggttaattctcaggatggaggtcgttatatttactaacacttctgatcactttaacttggggtcattacagatctgcttcttcaaagaatctttaatcccatcagtgaaaggttcccaaggtccctgaaccatactttactgagagctcctcccactgctctctgtcccaaagcttgagatatgggctctgggggtcatagggttcccaaataaatccagatttgcagggagaggggatgtgttttgatgaaggtcctcatgctataggttcttcaaagatgctagcagaggttagagacaaaaatcctattaatttatggatagtggcaaccatctagctggacagttgtcagaacctaaagtgctttagaggcttgatacataggcagctttcttctagctgtggccagtggaaggactagctcgaggcccaatcttagatttatcatatggaattccagtacttcacgtgaaggcatctttaatgatcagacttgttggcagagttcctcgggaggagggagcctggggctgtggctgtgtgatgtgttcctcagtaaccacaggtttgcctctctcctcacagcccccagtccccagccagacctcctcatactcctgcatgctgcccaccagcccttcggtgaatgggcggagttatgatacctacacccccccacatatgcagacacacatgaacagtcagccaatgggcacctcgggcaccacttcaacaggactcatttcccctggtgtgtcagttccagttcaagttcccggaagtgaacctgatatgtctcaatactggccaagattacagtaaaaaaaaaaaaaaaaaaaaaaaggaaaggaaatattgtgttaattcagtcagtgactatggggacacaacagttgagctttcaggaaagaaagaaaaatggctgttagagccgcttcagttctacaattgtgtcctgtattgtaccactggggaaggaatggacttgaaacaaggacctttgtatacagaaggcacgatatcagttggaacaaatcttcattttggtatccaaacttttattcattttggtgtattatttgtaaatgggcatttgtatgttataatgaaaaaaagaacaatgtagactggatggatgtttgatctgtgttggtcatgaagttgttttttttttttttaaaaagaaaaccatgatcaacaagctttgccacgaatttaagagttttatcaagatatatcgaatacttctacccatctgttcatagtttatggactgatgttccaagtttgtatcattcctttgcatataattaaacctggaacaacatgcactagatttatgtcagaaatatctgttggttttccaaaggttgttaacagatgaagtttatgtgcaaaaaagggtaagatataaattcaaggaagaaaaaaagttgatagctaaaaggtagagtgtgtcttcgatataatccaatttgttttatgtcaaaatgtaagtatttgtcttccctagaaatcctcagaatgatttctataataaagttaatttcatttatatttgacaagaatatagatgttttatacacattttcatgcaatcatacgtttcttttttggccagcaaaagttaattgttcttagatatagttgtattactgttcacggtccaatcattttgtgcatctagagttcattcctaatcaattaaaagtgcttgcaagagttttaaacttaagtgttttgaagttgttcacaactacatatcaaaattaaccattgttgattgtaaaaaaccatgccaaagcctttgtatttcctttattatacagttttctttttaaccttatagtgtggtgttacaaattttatttccatgttagatcaacattctaaaccaatggttactttcacacacactctgttttacatcctgatgatccttaaaaaataatccttatagataccataaatcaaaaacgtgttagaaaaaaattccacttacagcagggtgtagatctgtgcccatttatacccacaacatatatacaaaatggtaacatttcccagttagccatttaattctaaagctcaaagtctagaaataatttaaaaatgcaacaagcgattagctaggaattgttttttgaattaggactggcattttcaatctgggcagatttccattgtcagcctatttcaacaatgatttcactgaagtatattcaaaagtagatttcttaaaggagactttctgaaagctgttgcctttttcaaataggccctctcccttttctgtctccctcccctttgcacaagaggcatcatttcccattgaaccactacagctgttcccatttgaatcttgctttctgtgcggttgtggatggttggagggtggaggggggatgttgcatgtcaaggaataatgagcacagacacatcaacagacaacaacaaagcagactgtgactggccggtgggaattaaaggccttcagtcattggcagcttaagccaaacattcccaaatctatgaagcagggcccattgttggtcagttgttatttgcaatgaagcacagttctgatcatgtttaaagtggaggcacgcagggcaggagtgcttgagcccaagcaaaggatggaaaaaaataagcctttgttgggtaaaaaaggactgtctgagactttcatttgttctgtgcaacatataagtcaatacagataagtcttcctctgcaaacttcactaaaaagcctgggggttctggcagtctagattaaaatgcttgcacatgcagaaacctctggggacaaagacacacttccactgaattatactctgctttaaaaaaatccccaaaagcaaatg

SEQ ID NO: 6442 - protein, 112 aa, Homo sapiens
MIRLVGRVPREEGAWGCGCVMCSSVTTGLPLSSQPPVPSQTSSYSCMLPTSPSVNGRSYDTYTPPHMQTHMNSQPMGTSGTTSTGLISPGVSVPVQVPGSEPDMSQYWPRLQ

SEQ ID NO: 6443 - DNA, 4623 bp, Homo sapiens
ggaaacatttctggattttagcgtctaagggagcactcaagggctgtaaggtttgctatcactgtcccaacactgcagagaccttgaaggttcagtgtgggatctgtagaacccatggtttgcggtgacactcagaggggatctttgggagatttatagagccggttcttagcgctttgtgggttcagaggctggctgcagtgtttatgaagaggggcagtgggctggggacactgctggggttatggctgtagtgaggtccatgtgtacttgttccttggcatgtgtctgactctgtgttgctgctgcagtacagtgggcaggggcacggttgcttggactgggctgcccgatgtctggcatggctggtggtcctgttgtcctttatttgatcgatagcagggaactgaccgccgaggttggcacaggttggcagggggatgaggatgcattgtggttgtctcctcctcctctccttcttcctcttccccttcctcctctcctttctgttcttgttctccctcatcttcctcttccttcttctccctcttcttcctcttcactctgctctcttctcttcttttcccctttcctctcctctccctttcctcaggtcacagcggagtgaatcagctcggtggtgtctttgtcaacgggcggccactgccggactccacccggcagaagattgtagagctagctcacagcggggcccggccgtgcgacatttcccgaattctgcaggtgtccaacggatgtgtgagtaaaattctgggcaggtattacgagactggctccatcagacccagggcaatcggtggtagtaaaccgagagtagcgactccagaagttgtaagcaaaatagcccagtataagcgggagtgcccgtccatctttgcttgggaaatccgagacagattactgtccgagggggtctgtaccaacgataacataccaagcgtaagttcattgagaacatctgccctccctgccctaagcccaatgctctctcctctttacctcctcccaccctctctctccactgtctcttagtctgtgtcctctccctgctccacatttgtctcctttgtacctgggggaacagagaggaatgccctgacttttctttgactgtctggaaaatgggagtcaagtgtggggagtcattcacttcatttgcatgctgcaaaacagagggcggaggcaccagggaaaggcacttgaatgaagaaggaaaatgagaaccagattgtaacttcgtcctaatccacctgccagaactttccttcaggtgtcacacatccatttccatcctaatattaaacaatataatgaaagaaagctttacaacaagtctaaatagtttttattttcgggcagtcttttaacaaagcaaagcaaccgtgtgagttaggtcaccagagacaccaagcaatggtgaaggaccccctccgcccaattctctatccaactaaatttccatgcccaaagtgatagctatcattttttccacggtgtatctgcaaatccacccactgtcccggggtggctgggagctttttaacgggttgagagttgctttttaaggttgtgggtgagctgagatgggtgactgtgtcttcaggagacactaccatttggtttgattttggtttgatttgcaggtgtcatcaataaacagagttcttcgcaacctggctagcgaaaagcaacagatgggcgcagacggcatgtatgataaactaaggatgttgaacgggcagaccggaagctggggcacccgccctggttggtatccggggacttcggtgccagggcaacctacgcaagatggctgccagcaacaggaaggagggggagagaataccaactccatcagttccaacggagaagattcagatgaggctcaaatgcgacttcagctgaagcggaagctgcaaagaaatagaacatcctttacccaagagcaaattgaggccctggagaaagagtttgagagaacccattatccagatgtgtttgcccgagaaagactagcagccaaaatagatctacctgaagcaagaatacaggtatggttttctaatcgaagggccaaatggagaagagaagaaaaactgaggaatcagagaagacaggccagcaacacacctagtcatattcctatcagcagtagtttcagcaccagtgtctaccaaccaattccacaacccaccacaccggtttcctccttcacatctggctccatgttgggccgaacagacacagccctcacaaacacctacagcgctctgccgcctatgcccagcttcaccatggcaaataacctgcctatgcaacccccagtccccagccagacctcctcatactcctgcatgctgcccaccagcccttcggtgaatgggcggagttatgatacctacacccccccacatatgcagacacacatgaacagtcagccaatgggcacctcgggcaccacttcaacaggactcatttcccctggtgtgtcagttccagttcaagttcccggaagtgaacctgatatgtctcaatactggccaagattacagtaaaaaaaaaaaaaaaaaaaaaaaggaaaggaaatattgtgttaattcagtcagtgactatggggacacaacagttgagctttcaggaaagaaagaaaaatggctgttagagccgcttcagttctacaattgtgtcctgtattgtaccactggggaaggaatggacttgaaacaaggacctttgtatacagaaggcacgatatcagttggaacaaatcttcattttggtatccaaacttttattcattttggtgtattatttgtaaatgggcatttgtatgttataatgaaaaaaagaacaatgtagactggatggatgtttgatctgtgttggtcatgaagttgttttttttttttttaaaaagaaaaccatgatcaacaagctttgccacgaatttaagagttttatcaagatatatcgaatacttctacccatctgttcatagtttatggactgatgttccaagtttgtatcattcctttgcatataattaaacctggaacaacatgcactagatttatgtcagaaatatctgttggttttccaaaggttgttaacagatgaagtttatgtgcaaaaaagggtaagatataaattcaaggaagaaaaaaagttgatagctaaaaggtagagtgtgtcttcgatataatccaatttgttttatgtcaaaatgtaagtatttgtcttccctagaaatcctcagaatgatttctataataaagttaatttcatttatatttgacaagaatatagatgttttatacacattttcatgcaatcatacgtttcttttttggccagcaaaagttaattgttcttagatatagttgtattactgttcacggtccaatcattttgtgcatctagagttcattcctaatcaattaaaagtgcttgcaagagttttaaacttaagtgttttgaagttgttcacaactacatatcaaaattaaccattgttgattgtaaaaaaccatgccaaagcctttgtatttcctttattatacagttttctttttaaccttatagtgtggtgttacaaattttatttccatgttagatcaacattctaaaccaatggttactttcacacacactctgttttacatcctgatgatccttaaaaaataatccttatagataccataaatcaaaaacgtgttagaaaaaaattccacttacagcagggtgtagatctgtgcccatttatacccacaacatatatacaaaatggtaacatttcccagttagccatttaattctaaagctcaaagtctagaaataatttaaaaatgcaacaagcgattagctaggaattgttttttgaattaggactggcattttcaatctgggcagatttccattgtcagcctatttcaacaatgatttcactgaagtatattcaaaagtagatttcttaaaggagactttctgaaagctgttgcctttttcaaataggccctctcccttttctgtctccctcccctttgcacaagaggcatcatttcccattgaaccactacagctgttcccatttgaatcttgctttctgtgcggttgtggatggttggagggtggaggggggatgttgcatgtcaaggaataatgagcacagacacatcaacagacaacaacaaagcagactgtgactggccggtgggaattaaaggccttcagtcattggcagcttaagccaaacattcccaaatctatgaagcagggcccattgttggtcagttgttatttgcaatgaagcacagttctgatcatgtttaaagtggaggcacgcagggcaggagtgcttgagcccaagcaaaggatggaaaaaaataagcctttgttgggtaaaaaaggactgtctgagactttcatttgttctgtgcaacatataagtcaatacagataagtcttcctctgcaaacttcactaaaaagcctgggggttctggcagtctagattaaaatgcttgcacatgcagaaacctctggggacaaagacacacttccactgaattatactctgctttaaaaaaatccccaaaagcaaatg

SEQ ID NO: 6444 - protein, 286 aa, Homo sapiens
MGADGMYDKLRMLNGQTGSWGTRPGWYPGTSVPGQPTQDGCQQQEGGGENTNSISSNGEDSDEAQMRLQLKRKLQRNRTSFTQEQIEALEKEFERTHYPDVFARERLAAKIDLPEARIQVWFSNRRAKWRREEKLRNQRRQASNTPSHIPISSSFSTSVYQPIPQPTTPVSSFTSGSMLGRTDTALTNTYSALPPMPSFTMANNLPMQPPVPSQTSSYSCMLPTSPSVNGRSYDTYTPPHMQTHMNSQPMGTSGTTSTGLISPGVSVPVQVPGSEPDMSQYWPRLQ

SEQ ID NO: 6445 - DNA, 4891 bp, Homo sapiens
agtaggctccaaggagaagagaggagaggagaggagagctgaacagggagccacgtcttttcctgggagggctgctatctaagtcggggctgcaggttggagatttttaaggaagtggaaattggcaattggctttgtgtgtctgtggtttttggggagggggactacaaagaggggctaactccctctccctattctctaaggttggaccacagggatgaggttgtgagatacaaagataaaggagggatggggaacactatgatgtggtatttttcttttctgttttttctttttgataatatctatccttggctaaggggagggcggagttcagcggcggaaataaagcgagcagtggctggtgcgaaccgactcccggctctaagccttacttgcggtggccggacttgtctgtggctgaagccgagcccgggctctgactctcacgtctgcactggaggtgcggaaacctggactggggttcaccagccacatactggctgctctggttgttctctcctcttccttcttctattctaaccaaacaaaacccaactcgatgcttgtgccaggccttggccagtttggacggtgatggaaacatttctggattttagcgtctaagggagcactcaagggctgtaaggtttgctatcactgtcccaacactgcagagaccttgaaggttcagtgtgggatctgtagaacccatggtttgcggtgacactcagaggggatctttgggagatttatagagccggttcttagcgctttgtgggttcagaggctggctgcagtgtttatgaagaggggcagtgggctggggacactgctggggttatggctgtagtgaggtccatgtgtacttgttccttggcatgtgtctgactctgtgttgctgctgcagtacagtgggcaggggcacggttgcttggactgggctgcccgatgtctggcatggctggtggtcctgttgtcctttatttgatcgatagcagggaactgaccgccgaggttggcacaggttggcagggggatgaggatgcattgtggttgtctcctcctcctctccttcttcctcttccccttcctcctctcctttctgttcttgttctccctcatcttcctcttccttcttctccctcttcttcctcttcactctgctctcttctcttcttttcccctttcctctcctctccctttcctcaggtcacagcggagtgaatcagctcggtggtgtctttgtcaacgggcggccactgccggactccacccggcagaagattgtagagctagctcacagcggggcccggccgtgcgacatttcccgaattctgcagacccatgcagatgcaaaagtccaagtgctggacaatcaaaacgtgtccaacggatgtgtgagtaaaattctgggcaggtattacgagactggctccatcagacccagggcaatcggtggtagtaaaccgagagtagcgactccagaagttgtaagcaaaatagcccagtataagcgggagtgcccgtccatctttgcttgggaaatccgagacagattactgtccgagggggtctgtaccaacgataacataccaagcgtaagttcattgagaacatctgccctccctgccctaagcccaatgctctctcctctttacctcctcccaccctctctctccactgtctcttagtctgtgtcctctccctgctccacatttgtctcctttgtacctgggggaacagagaggaatgccctgacttttctttgactgtctggaaaatgggagtcaagtgtggggagtcattcacttcatttgcatgctgcaaaacagagggcggaggcaccagggaaaggcacttgaatgaagaaggaaaatgagaaccagattgtaacttcgtcctaatccacctgccagaactttccttcaggtgtcatcaataaacagagttcttcgcaacctggctagcgaaaagcaacagatgggcgcagacggcatgtatgataaactaaggatgttgaacgggcagaccggaagctggggcacccgccctggttggtatccggggacttcggtgccagggcaacctacgcaagatggctgccagcaacaggaaggagggggagagaataccaactccatcagttccaacggagaagattcagatgaggctcaaatgcgacttcagctgaagcggaagctgcaaagaaatagaacatcctttacccaagagcaaattgaggccctggagaaagagtttgagagaacccattatccagatgtgtttgcccgagaaagactagcagccaaaatagatctacctgaagcaagaatacaggtatggttttctaatcgaagggccaaatggagaagagaagaaaaactgaggaatcagagaagacaggccagcaacacacctagtcatattcctatcagcagtagtttcagcaccagtgtctaccaaccaattccacaacccaccacaccggtttcctccttcacatctggctccatgttgggccgaacagacacagccctcacaaacacctacagcgctctgccgcctatgcccagcttcaccatggcaaataacctgcctatgcaacccccagtccccagccagacctcctcatactcctgcatgctgcccaccagcccttcggtgaatgggcggagttatgatacctacacccccccacatatgcagacacacatgaacagtcagccaatgggcacctcgggcaccacttcaacaggactcatttcccctggtgtgtcagttccagttcaagttcccggaagtgaacctgatatgtctcaatactggccaagattacagtaaaaaaaaaaaaaaaaaaaaaaaggaaaggaaatattgtgttaattcagtcagtgactatggggacacaacagttgagctttcaggaaagaaagaaaaatggctgttagagccgcttcagttctacaattgtgtcctgtattgtaccactggggaaggaatggacttgaaacaaggacctttgtatacagaaggcacgatatcagttggaacaaatcttcattttggtatccaaacttttattcattttggtgtattatttgtaaatgggcatttgtatgttataatgaaaaaaagaacaatgtagactggatggatgtttgatctgtgttggtcatgaagttgttttttttttttttaaaaagaaaaccatgatcaacaagctttgccacgaatttaagagttttatcaagatatatcgaatacttctacccatctgttcatagtttatggactgatgttccaagtttgtatcattcctttgcatataattaaacctggaacaacatgcactagatttatgtcagaaatatctgttggttttccaaaggttgttaacagatgaagtttatgtgcaaaaaagggtaagatataaattcaaggaagaaaaaaagttgatagctaaaaggtagagtgtgtcttcgatataatccaatttgttttatgtcaaaatgtaagtatttgtcttccctagaaatcctcagaatgatttctataataaagttaatttcatttatatttgacaagaatatagatgttttatacacattttcatgcaatcatacgtttcttttttggccagcaaaagttaattgttcttagatatagttgtattactgttcacggtccaatcattttgtgcatctagagttcattcctaatcaattaaaagtgcttgcaagagttttaaacttaagtgttttgaagttgttcacaactacatatcaaaattaaccattgttgattgtaaaaaaccatgccaaagcctttgtatttcctttattatacagttttctttttaaccttatagtgtggtgttacaaattttatttccatgttagatcaacattctaaaccaatggttactttcacacacactctgttttacatcctgatgatccttaaaaaataatccttatagataccataaatcaaaaacgtgttagaaaaaaattccacttacagcagggtgtagatctgtgcccatttatacccacaacatatatacaaaatggtaacatttcccagttagccatttaattctaaagctcaaagtctagaaataatttaaaaatgcaacaagcgattagctaggaattgttttttgaattaggactggcattttcaatctgggcagatttccattgtcagcctatttcaacaatgatttcactgaagtatattcaaaagtagatttcttaaaggagactttctgaaagctgttgcctttttcaaataggccctctcccttttctgtctccctcccctttgcacaagaggcatcatttcccattgaaccactacagctgttcccatttgaatcttgctttctgtgcggttgtggatggttggagggtggaggggggatgttgcatgtcaaggaataatgagcacagacacatcaacagacaacaacaaagcagactgtgactggccggtgggaattaaaggccttcagtcattggcagcttaagccaaacattcccaaatctatgaagcagggcccattgttggtcagttgttatttgcaatgaagcacagttctgatcatgtttaaagtggaggcacgcagggcaggagtgcttgagcccaagcaaaggatggaaaaaaataagcctttgttgggtaaaaaaggactgtctgagactttcatttgttctgtgcaacatataagtcaatacagataagtcttcctctgcaaacttcactaaaaagcctgggggttctggcagtctagattaaaatgcttgcacatgcagaaacctctggggacaaagacacacttccactgaattatactctgctttaaaaaaatccccaaaagcaaatg

SEQ ID NO: 6446 - protein, 286 aa, Homo sapiens; identical to SEQ ID NO: 6444

SEQ ID NO: 6447 - DNA, 2426 bp, Homo sapiens
cgaaccacacaggcttaaggagggtccccagcaccttatccatctgttttggaaacgccggtcgccccctggtgcttccggggctggtcacagcggagtgaatcagctcggtggtgtctttgtcaacgggcggccactgccggactccacccggcagaagattgtagagctagctcacagcggggcccggccgtgcgacatttcccgaattctgcagacccatgcagatgcaaaagtccaagtgctggacaatcaaaacgtgtccaacggatgtgtgagtaaaattctgggcaggtattacgagactggtgtgtcagttccagttcaagttcccggaagtgaacctgatatgtctcaatactggccaagattacagtaaaaaaaaaaaaaaaaaaaaaaaggaaaggaaatattgtgttaattcagtcagtgactatggggacacaacagttgagctttcaggaaagaaagaaaaatggctgttagagccgcttcagttctacaattgtgtcctgtattgtaccactggggaaggaatggacttgaaacaaggacctttgtatacagaaggcacgatatcagttggaacaaatcttcattttggtatccaaacttttattcattttggtgtattatttgtaaatgggcatttgtatgttataatgaaaaaaagaacaatgtagactggatggatgtttgatctgtgttggtcatgaagttgttttttttttttttaaaaagaaaaccatgatcaacaagctttgccacgaatttaagagttttatcaagatatatcgaatacttctacccatctgttcatagtttatggactgatgttccaagtttgtatcattcctttgcatataattaaacctggaacaacatgcactagatttatgtcagaaatatctgttggttttccaaaggttgttaacagatgaagtttatgtgcaaaaaagggtaagatataaattcaaggaagaaaaaaagttgatagctaaaaggtagagtgtgtcttcgatataatccaatttgttttatgtcaaaatgtaagtatttgtcttccctagaaatcctcagaatgatttctataataaagttaatttcatttatatttgacaagaatatagatgttttatacacattttcatgcaatcatacgtttcttttttggccagcaaaagttaattgttcttagatatagttgtattactgttcacggtccaatcattttgtgcatctagagttcattcctaatcaattaaaagtgcttgcaagagttttaaacttaagtgttttgaagttgttcacaactacatatcaaaattaaccattgttgattgtaaaaaaccatgccaaagcctttgtatttcctttattatacagttttctttttaaccttatagtgtggtgttacaaattttatttccatgttagatcaacattctaaaccaatggttactttcacacacactctgttttacatcctgatgatccttaaaaaataatccttatagataccataaatcaaaaacgtgttagaaaaaaattccacttacagcagggtgtagatctgtgcccatttatacccacaacatatatacaaaatggtaacatttcccagttagccatttaattctaaagctcaaagtctagaaataatttaaaaatgcaacaagcgattagctaggaattgttttttgaattaggactggcattttcaatctgggcagatttccattgtcagcctatttcaacaatgatttcactgaagtatattcaaaagtagatttcttaaaggagactttctgaaagctgttgcctttttcaaataggccctctcccttttctgtctccctcccctttgcacaagaggcatcatttcccattgaaccactacagctgttcccatttgaatcttgctttctgtgcggttgtggatggttggagggtggaggggggatgttgcatgtcaaggaataatgagcacagacacatcaacagacaacaacaaagcagactgtgactggccggtgggaattaaaggccttcagtcattggcagcttaagccaaacattcccaaatctatgaagcagggcccattgttggtcagttgttatttgcaatgaagcacagttctgatcatgtttaaagtggaggcacgcagggcaggagtgcttgagcccaagcaaaggatggaaaaaaataagcctttgttgggtaaaaaaggactgtctgagactttcatttgttctgtgcaacatataagtcaatacagataagtcttcctctgcaaacttcactaaaaagcctgggggttctggcagtctagattaaaatgcttgcacatgcagaaacctctggggacaaagacacacttccactgaattatactctgctttaaaaaaatccccaaaagcaaatg

SEQ ID NO: 6448 - protein, 74 aa, Homo sapiens
MAVRAASVLQLCPVLYHWGRNGLETRTFVYRRHDISWNKSSFWYPNFYSFWCIICKWAFVCYNEKKNNVDWMDV

SEQ ID NO: 6449 - DNA, 4208 bp, Homo sapiens
ctacttccagcgaaagcccgcgtcggagggcgactgccggcgagcgggagcggcgcagggctcggggcgggcggccagctcagccccagcgccagcgccagcgccagcgcgggctgagctcgcgggaagaagggagactccaggcgcgacagcagccgcggctcctagccccagcgtcgcccaatgctcccgacccgcgggaaaagacgaagaggctctgtggtgcccaaggccctggaacggccgcagagagcaaccgctgccggctgctttgtccagcccgaggcccagcgaacgcgcagagagcgggcgctccgaggactcgccgagggagcgccgagggaacctgctcgccgcgtctccgcccgcccgccggccctcgggctttgtgccgcactgggctccggcgcagaagagtcagccggcactcgagcgccgaggggggcaccgcgcccgccaccagcccgagtggagtcagtcggcaaggcagccgcacgctggaggtagagggaagagcgagctagcgcgagccgggaaggaagccaccaggccaaggcggtggaacgcgcgctccgagggagctcagagccgagcgggaggactgtcagcttccacccagcccccgggctcttgcccccaactccactggagcgctgagctcggaacttgaaaactctctgctccccaggcttcccccgactctcatctcccttgccttgcggaggctggggctcttccctgttctccggccccctgcgcttgggggaagactttaactaggggcgcgcagatgtgtgaggccttttattgtgagagtggacagacatccgagatttcaggcaaccccatattcgagccccgtggaatcccgcggcccccagccagagccagcatgcagaacagtcacagcggagtgaatcagctcggtggtgtctttgtcaacgggcggccactgccggactccacccggcagaagattgtagagctagctcacagcggggcccggccgtgcgacatttcccgaattctgcaggtgtccaacggatgtgtgagtaaaattctgggcaggtattacgagactggctccatcagacccagggcaatcggtggtagtaaaccgagagtagcgactccagaagttgtaagcaaaatagcccagtataagcgggagtgcccgtccatctttgcttgggaaatccgagacagattactgtccgagggggtctgtaccaacgataacataccaagcgtgtcatcaataaacagagttcttcgcaacctggctagcgaaaagcaacagatgggcgcagacggcatgtatgataaactaaggatgttgaacgggcagaccggaagctggggcacccgccctggttggtatccggggacttcggtgccagggcaacctacgcaagatggctgccagcaacaggaaggagggggagagaataccaactccatcagttccaacggagaagattcagatgaggctcaaatgcgacttcagctgaagcggaagctgcaaagaaatagaacatcctttacccaagagcaaattgaggccctggagaaagagtttgagagaacccattatccagatgtgtttgcccgagaaagactagcagccaaaatagatctacctgaagcaagaatacaggtatggttttctaatcgaagggccaaatggagaagagaagaaaaactgaggaatcagagaagacaggccagcaacacacctagtcatattcctatcagcagtagtttcagcaccagtgtctaccaaccaattccacaacccaccacaccggtttcctccttcacatctggctccatgttgggccgaacagacacagccctcacaaacacctacagcgctctgccgcctatgcccagcttcaccatggcaaataacctgcctatgcaacccccagtccccagccagacctcctcatactcctgcatgctgcccaccagcccttcggtgaatgggcggagttatgatacctacacccccccacatatgcagacacacatgaacagtcagccaatgggcacctcgggcaccacttcaacaggactcatttcccctggtgtgtcagttccagttcaagttcccggaagtgaacctgatatgtctcaatactggccaagattacagtaaaaaaaaaaaaaaaaaaaaaaaggaaaggaaatattgtgttaattcagtcagtgactatggggacacaacagttgagctttcaggaaagaaagaaaaatggctgttagagccgcttcagttctacaattgtgtcctgtattgtaccactggggaaggaatggacttgaaacaaggacctttgtatacagaaggcacgatatcagttggaacaaatcttcattttggtatccaaacttttattcattttggtgtattatttgtaaatgggcatttgtatgttataatgaaaaaaagaacaatgtagactggatggatgtttgatctgtgttggtcatgaagttgttttttttttttttaaaaagaaaaccatgatcaacaagctttgccacgaatttaagagttttatcaagatatatcgaatacttctacccatctgttcatagtttatggactgatgttccaagtttgtatcattcctttgcatataattaaacctggaacaacatgcactagatttatgtcagaaatatctgttggttttccaaaggttgttaacagatgaagtttatgtgcaaaaaagggtaagatataaattcaaggaagaaaaaaagttgatagctaaaaggtagagtgtgtcttcgatataatccaatttgttttatgtcaaaatgtaagtatttgtcttccctagaaatcctcagaatgatttctataataaagttaatttcatttatatttgacaagaatatagatgttttatacacattttcatgcaatcatacgtttcttttttggccagcaaaagttaattgttcttagatatagttgtattactgttcacggtccaatcattttgtgcatctagagttcattcctaatcaattaaaagtgcttgcaagagttttaaacttaagtgttttgaagttgttcacaactacatatcaaaattaaccattgttgattgtaaaaaaccatgccaaagcctttgtatttcctttattatacagttttctttttaaccttatagtgtggtgttacaaattttatttccatgttagatcaacattctaaaccaatggttactttcacacacactctgttttacatcctgatgatccttaaaaaataatccttatagataccataaatcaaaaacgtgttagaaaaaaattccacttacagcagggtgtagatctgtgcccatttatacccacaacatatatacaaaatggtaacatttcccagttagccatttaattctaaagctcaaagtctagaaataatttaaaaatgcaacaagcgattagctaggaattgttttttgaattaggactggcattttcaatctgggcagatttccattgtcagcctatttcaacaatgatttcactgaagtatattcaaaagtagatttcttaaaggagactttctgaaagctgttgcctttttcaaataggccctctcccttttctgtctccctcccctttgcacaagaggcatcatttcccattgaaccactacagctgttcccatttgaatcttgctttctgtgcggttgtggatggttggagggtggaggggggatgttgcatgtcaaggaataatgagcacagacacatcaacagacaacaacaaagcagactgtgactggccggtgggaattaaaggccttcagtcattggcagcttaagccaaacattcccaaatctatgaagcagggcccattgttggtcagttgttatttgcaatgaagcacagttctgatcatgtttaaagtggaggcacgcagggcaggagtgcttgagcccaagcaaaggatggaaaaaaataagcctttgttgggtaaaaaaggactgtctgagactttcatttgttctgtgcaacatataagtcaatacagataagtcttcctctgcaaacttcactaaaaagcctgggggttctggcagtctagattaaaatgcttgcacatgcagaaacctctggggacaaagacacacttccactgaattatactctgctttaaaaaaatccccaaaagcaaatg

SEQ ID NO: 6450 - protein, 456 aa, Homo sapiens [sequence omitted]

SEQ ID NO: 6451 - DNA, 3753 bp, Homo sapiens
ggtgcatttgcatgttgcggagtgattagtgggtttgaaaagggaaccgtggctcggcctcatttcccgctctggttcaggcgcaggaggaagtgttttgctggaggatgatgacagaggaatctgagaattgctctcacacaccaacccagcaacatccgtggagaaaactctcaccagcaactcctttaaaacaccgtcatttcaaaccattgtggtcttcaagcaacaacagcagcacaaaaaaccccaaccaaacaaaactcttgacagaagctgtgacaaccagaaaggatgcctcataaagggggaagactttaactaggggcgcgcagatgtgtgaggccttttattgtgagagtggacagacatccgagatttcaggcaaccccatattcgagccccgtggaatcccgcggcccccagccagagccagcatgcagaacagtcacagcggagtgaatcagctcggtggtgtctttgtcaacgggcggccactgccggactccacccggcagaagattgtagagctagctcacagcggggcccggccgtgcgacatttcccgaattctgcaggtgtccaacggatgtgtgagtaaaattctgggcaggtattacgagactggctccatcagacccagggcaatcggtggtagtaaaccgagagtagcgactccagaagttgtaagcaaaatagcccagtataagcgggagtgcccgtccatctttgcttgggaaatccgagacagattactgtccgagggggtctgtaccaacgataacataccaagcgtgtcatcaataaacagagttcttcgcaacctggctagcgaaaagcaacagatgggcgcagacggcatgtatgataaactaaggatgttgaacgggcagaccggaagctggggcacccgccctggttggtatccggggacttcggtgccagggcaacctacgcaagatggctgccagcaacaggaaggagggggagagaataccaactccatcagttccaacggagaagattcagatgaggctcaaatgcgacttcagctgaagcggaagctgcaaagaaatagaacatcctttacccaagagcaaattgaggccctggagaaagagtttgagagaacccattatccagatgtgtttgcccgagaaagactagcagccaaaatagatctacctgaagcaagaatacaggtatggttttctaatcgaagggccaaatggagaagagaagaaaaactgaggaatcagagaagacaggccagcaacacacctagtcatattcctatcagcagtagtttcagcaccagtgtctaccaaccaattccacaacccaccacaccggtttcctccttcacatctggctccatgttgggccgaacagacacagccctcacaaacacctacagcgctctgccgcctatgcccagcttcaccatggcaaataacctgcctatgcaacccccagtccccagccagacctcctcatactcctgcatgctgcccaccagcccttcggtgaatgggcggagttatgatacctacacccccccacatatgcagacacacatgaacagtcagccaatgggcacctcgggcaccacttcaacaggactcatttcccctggtgtgtcagttccagttcaagttcccggaagtgaacctgatatgtctcaatactggccaagattacagtaaaaaaaaaaaaaaaaaaaaaaaggaaaggaaatattgtgttaattcagtcagtgactatggggacacaacagttgagctttcaggaaagaaagaaaaatggctgttagagccgcttcagttctacaattgtgtcctgtattgtaccactggggaaggaatggacttgaaacaaggacctttgtatacagaaggcacgatatcagttggaacaaatcttcattttggtatccaaacttttattcattttggtgtattatttgtaaatgggcatttgtatgttataatgaaaaaaagaacaatgtagactggatggatgtttgatctgtgttggtcatgaagttgttttttttttttttaaaaagaaaaccatgatcaacaagctttgccacgaatttaagagttttatcaagatatatcgaatacttctacccatctgttcatagtttatggactgatgttccaagtttgtatcattcctttgcatataattaaacctggaacaacatgcactagatttatgtcagaaatatctgttggttttccaaaggttgttaacagatgaagtttatgtgcaaaaaagggtaagatataaattcaaggaagaaaaaaagttgatagctaaaaggtagagtgtgtcttcgatataatccaatttgttttatgtcaaaatgtaagtatttgtcttccctagaaatcctcagaatgatttctataataaagttaatttcatttatatttgacaagaatatagatgttttatacacattttcatgcaatcatacgtttcttttttggccagcaaaagttaattgttcttagatatagttgtattactgttcacggtccaatcattttgtgcatctagagttcattcctaatcaattaaaagtgcttgcaagagttttaaacttaagtgttttgaagttgttcacaactacatatcaaaattaaccattgttgattgtaaaaaaccatgccaaagcctttgtatttcctttattatacagttttctttttaaccttatagtgtggtgttacaaattttatttccatgttagatcaacattctaaaccaatggttactttcacacacactctgttttacatcctgatgatccttaaaaaataatccttatagataccataaatcaaaaacgtgttagaaaaaaattccacttacagcagggtgtagatctgtgcccatttatacccacaacatatatacaaaatggtaacatttcccagttagccatttaattctaaagctcaaagtctagaaataatttaaaaatgcaacaagcgattagctaggaattgttttttgaattaggactggcattttcaatctgggcagatttccattgtcagcctatttcaacaatgatttcactgaagtatattcaaaagtagatttcttaaaggagactttctgaaagctgttgcctttttcaaataggccctctcccttttctgtctccctcccctttgcacaagaggcatcatttcccattgaaccactacagctgttcccatttgaatcttgctttctgtgcggttgtggatggttggagggtggaggggggatgttgcatgtcaaggaataatgagcacagacacatcaacagacaacaacaaagcagactgtgactggccggtgggaattaaaggccttcagtcattggcagcttaagccaaacattcccaaatctatgaagcagggcccattgttggtcagttgttatttgcaatgaagcacagttctgatcatgtttaaagtggaggcacgcagggcaggagtgcttgagcccaagcaaaggatggaaaaaaataagcctttgttgggtaaaaaaggactgtctgagactttcatttgttctgtgcaacatataagtcaatacagataagtcttcctctgcaaacttcactaaaaagcctgggggttctggcagtctagattaaaatgcttgcacatgcagaaacctctggggacaaagacacacttccactgaattatactctgctttaaaaaaatccccaaaagcaaatg

SEQ ID NO: 6452 - protein, 456 aa, Homo sapiens [sequence omitted]

SEQ ID NO: 6453 - DNA, 3795 bp, Homo sapiens
ggtgcatttgcatgttgcggagtgattagtgggtttgaaaagggaaccgtggctcggcctcatttcccgctctggttcaggcgcaggaggaagtgttttgctggaggatgatgacagaggaatctgagaattgctctcacacaccaacccagcaacatccgtggagaaaactctcaccagcaactcctttaaaacaccgtcatttcaaaccattgtggtcttcaagcaacaacagcagcacaaaaaaccccaaccaaacaaaactcttgacagaagctgtgacaaccagaaaggatgcctcataaagggggaagactttaactaggggcgcgcagatgtgtgaggccttttattgtgagagtggacagacatccgagatttcaggcaaccccatattcgagccccgtggaatcccgcggcccccagccagagccagcatgcagaacagtcacagcggagtgaatcagctcggtggtgtctttgtcaacgggcggccactgccggactccacccggcagaagattgtagagctagctcacagcggggcccggccgtgcgacatttcccgaattctgcagacccatgcagatgcaaaagtccaagtgctggacaatcaaaacgtgtccaacggatgtgtgagtaaaattctgggcaggtattacgagactggctccatcagacccagggcaatcggtggtagtaaaccgagagtagcgactccagaagttgtaagcaaaatagcccagtataagcgggagtgcccgtccatctttgcttgggaaatccgagacagattactgtccgagggggtctgtaccaacgataacataccaagcgtgtcatcaataaacagagttcttcgcaacctggctagcgaaaagcaacagatgggcgcagacggcatgtatgataaactaaggatgttgaacgggcagaccggaagctggggcacccgccctggttggtatccggggacttcggtgccagggcaacctacgcaagatggctgccagcaacaggaaggagggggagagaataccaactccatcagttccaacggagaagattcagatgaggctcaaatgcgacttcagctgaagcggaagctgcaaagaaatagaacatcctttacccaagagcaaattgaggccctggagaaagagtttgagagaacccattatccagatgtgtttgcccgagaaagactagcagccaaaatagatctacctgaagcaagaatacaggtatggttttctaatcgaagggccaaatggagaagagaagaaaaactgaggaatcagagaagacaggccagcaacacacctagtcatattcctatcagcagtagtttcagcaccagtgtctaccaaccaattccacaacccaccacaccggtttcctccttcacatctggctccatgttgggccgaacagacacagccctcacaaacacctacagcgctctgccgcctatgcccagcttcaccatggcaaataacctgcctatgcaacccccagtccccagccagacctcctcatactcctgcatgctgcccaccagcccttcggtgaatgggcggagttatgatacctacacccccccacatatgcagacacacatgaacagtcagccaatgggcacctcgggcaccacttcaacaggactcatttcccctggtgtgtcagttccagttcaagttcccggaagtgaacctgatatgtctcaatactggccaagattacagtaaaaaaaaaaaaaaaaaaaaaaaggaaaggaaatattgtgttaattcagtcagtgactatggggacacaacagttgagctttcaggaaagaaagaaaaatggctgttagagccgcttcagttctacaattgtgtcctgtattgtaccactggggaaggaatggacttgaaacaaggacctttgtatacagaaggcacgatatcagttggaacaaatcttcattttggtatccaaacttttattcattttggtgtattatttgtaaatgggcatttgtatgttataatgaaaaaaagaacaatgtagactggatggatgtttgatctgtgttggtcatgaagttgttttttttttttttaaaaagaaaaccatgatcaacaagctttgccacgaatttaagagttttatcaagatatatcgaatacttctacccatctgttcatagtttatggactgatgttccaagtttgtatcattcctttgcatataattaaacctggaacaacatgcactagatttatgtcagaaatatctgttggttttccaaaggttgttaacagatgaagtttatgtgcaaaaaagggtaagatataaattcaaggaagaaaaaaagttgatagctaaaaggtagagtgtgtcttcgatataatccaatttgttttatgtcaaaatgtaagtatttgtcttccctagaaatcctcagaatgatttctataataaagttaatttcatttatatttgacaagaatatagatgttttatacacattttcatgcaatcatacgtttcttttttggccagcaaaagttaattgttcttagatatagttgtattactgttcacggtccaatcattttgtgcatctagagttcattcctaatcaattaaaagtgcttgcaagagttttaaacttaagtgttttgaagttgttcacaactacatatcaaaattaaccattgttgattgtaaaaaaccatgccaaagcctttgtatttcctttattatacagttttctttttaaccttatagtgtggtgttacaaattttatttccatgttagatcaacattctaaaccaatggttactttcacacacactctgttttacatcctgatgatccttaaaaaataatccttatagataccataaatcaaaaacgtgttagaaaaaaattccacttacagcagggtgtagatctgtgcccatttatacccacaacatatatacaaaatggtaacatttcccagttagccatttaattctaaagctcaaagtctagaaataatttaaaaatgcaacaagcgattagctaggaattgttttttgaattaggactggcattttcaatctgggcagatttccattgtcagcctatttcaacaatgatttcactgaagtatattcaaaagtagatttcttaaaggagactttctgaaagctgttgcctttttcaaataggccctctcccttttctgtctccctcccctttgcacaagaggcatcatttcccattgaaccactacagctgttcccatttgaatcttgctttctgtgcggttgtggatggttggagggtggaggggggatgttgcatgtcaaggaataatgagcacagacacatcaacagacaacaacaaagcagactgtgactggccggtgggaattaaaggccttcagtcattggcagcttaagccaaacattcccaaatctatgaagcagggcccattgttggtcagttgttatttgcaatgaagcacagttctgatcatgtttaaagtggaggcacgcagggcaggagtgcttgagcccaagcaaaggatggaaaaaaataagcctttgttgggtaaaaaaggactgtctgagactttcatttgttctgtgcaacatataagtcaatacagataagtcttcctctgcaaacttcactaaaaagcctgggggttctggcagtctagattaaaatgcttgcacatgcagaaacctctggggacaaagacacacttccactgaattatactctgctttaaaaaaatccccaaaagcaaatg

SEQ ID NO: 6454 - protein, 470 aa, Homo sapiens [sequence omitted]

SEQ ID NO: 6455 - DNA, 4239 bp, Homo sapiens
tgcaccctccgaggactgggagtcccgagtccagcttagggggagtgggggcgcgacccccaacccagaaaccttcacttgaccgctcaagttcgcggcagcagggcgggccgcgccgaatctcggcgtgcgcggagcggggagatgcaggcgagcgccagagcccgggctcgggggccctgcgccggggagaggagccgggacccaccggcggagccgaaaacaagtgtattcatattcaaacaaacggaccaattgcaccaggcggggagagggagcatccaatcggctggcgcgaggccccggcgctgctttgcataaagcaatattttgtgtgagagcgagcggtgcatttgcatgttgcggagtgattagtgggtttgaaaagggaaccgtggctcggcctcatttcccgctctggttcaggcgcaggaggaagtgttttgctggaggatgatgacagaggtcaggcttcgctaatgggccagtgaggagcggtggaggcgaggccgggcgccggcacacacacattaacacacttgagccatcaccaatcagcataggaatctgagaattgctctcacacaccaacccagcaacatccgtggagaaaactctcaccagcaactcctttaaaacaccgtcatttcaaaccattgtggtcttcaagcaacaacagcagcacaaaaaaccccaaccaaacaaaactcttgacagaagctgtgacaaccagaaaggatgcctcataaagggggaagactttaactaggggcgcgcagatgtgtgaggccttttattgtgagagtggacagacatccgagatttcaggcaaccccatattcgagccccgtggaatcccgcggcccccagccagagccagcatgcagaacagtcacagcggagtgaatcagctcggtggtgtctttgtcaacgggcggccactgccggactccacccggcagaagattgtagagctagctcacagcggggcccggccgtgcgacatttcccgaattctgcagacccatgcagatgcaaaagtccaagtgctggacaatcaaaacgtgtccaacggatgtgtgagtaaaattctgggcaggtattacgagactggctccatcagacccagggcaatcggtggtagtaaaccgagagtagcgactccagaagttgtaagcaaaatagcccagtataagcgggagtgcccgtccatctttgcttgggaaatccgagacagattactgtccgagggggtctgtaccaacgataacataccaagcgtgtcatcaataaacagagttcttcgcaacctggctagcgaaaagcaacagatgggcgcagacggcatgtatgataaactaaggatgttgaacgggcagaccggaagctggggcacccgccctggttggtatccggggacttcggtgccagggcaacctacgcaagatggctgccagcaacaggaaggagggggagagaataccaactccatcagttccaacggagaagattcagatgaggctcaaatgcgacttcagctgaagcggaagctgcaaagaaatagaacatcctttacccaagagcaaattgaggccctggagaaagagtttgagagaacccattatccagatgtgtttgcccgagaaagactagcagccaaaatagatctacctgaagcaagaatacaggtatggttttctaatcgaagggccaaatggagaagagaagaaaaactgaggaatcagagaagacaggccagcaacacacctagtcatattcctatcagcagtagtttcagcaccagtgtctaccaaccaattccacaacccaccacaccggtttcctccttcacatctggctccatgttgggccgaacagacacagccctcacaaacacctacagcgctctgccgcctatgcccagcttcaccatggcaaataacctgcctatgcaacccccagtccccagccagacctcctcatactcctgcatgctgcccaccagcccttcggtgaatgggcggagttatgatacctacacccccccacatatgcagacacacatgaacagtcagccaatgggcacctcgggcaccacttcaacaggactcatttcccctggtgtgtcagttccagttcaagttcccggaagtgaacctgatatgtctcaatactggccaagattacagtaaaaaaaaaaaaaaaaaaaaaaaggaaaggaaatattgtgttaattcagtcagtgactatggggacacaacagttgagctttcaggaaagaaagaaaaatggctgttagagccgcttcagttctacaattgtgtcctgtattgtaccactggggaaggaatggacttgaaacaaggacctttgtatacagaaggcacgatatcagttggaacaaatcttcattttggtatccaaacttttattcattttggtgtattatttgtaaatgggcatttgtatgttataatgaaaaaaagaacaatgtagactggatggatgtttgatctgtgttggtcatgaagttgttttttttttttttaaaaagaaaaccatgatcaacaagctttgccacgaatttaagagttttatcaagatatatcgaatacttctacccatctgttcatagtttatggactgatgttccaagtttgtatcattcctttgcatataattaaacctggaacaacatgcactagatttatgtcagaaatatctgttggttttccaaaggttgttaacagatgaagtttatgtgcaaaaaagggtaagatataaattcaaggaagaaaaaaagttgatagctaaaaggtagagtgtgtcttcgatataatccaatttgttttatgtcaaaatgtaagtatttgtcttccctagaaatcctcagaatgatttctataataaagttaatttcatttatatttgacaagaatatagatgttttatacacattttcatgcaatcatacgtttcttttttggccagcaaaagttaattgttcttagatatagttgtattactgttcacggtccaatcattttgtgcatctagagttcattcctaatcaattaaaagtgcttgcaagagttttaaacttaagtgttttgaagttgttcacaactacatatcaaaattaaccattgttgattgtaaaaaaccatgccaaagcctttgtatttcctttattatacagttttctttttaaccttatagtgtggtgttacaaattttatttccatgttagatcaacattctaaaccaatggttactttcacacacactctgttttacatcctgatgatccttaaaaaataatccttatagataccataaatcaaaaacgtgttagaaaaaaattccacttacagcagggtgtagatctgtgcccatttatacccacaacatatatacaaaatggtaacatttcccagttagccatttaattctaaagctcaaagtctagaaataatttaaaaatgcaacaagcgattagctaggaattgttttttgaattaggactggcattttcaatctgggcagatttccattgtcagcctatttcaacaatgatttcactgaagtatattcaaaagtagatttcttaaaggagactttctgaaagctgttgcctttttcaaataggccctctcccttttctgtctccctcccctttgcacaagaggcatcatttcccattgaaccactacagctgttcccatttgaatcttgctttctgtgcggttgtggatggttggagggtggaggggggatgttgcatgtcaaggaataatgagcacagacacatcaacagacaacaacaaagcagactgtgactggccggtgggaattaaaggccttcagtcattggcagcttaagccaaacattcccaaatctatgaagcagggcccattgttggtcagttgttatttgcaatgaagcacagttctgatcatgtttaaagtggaggcacgcagggcaggagtgcttgagcccaagcaaaggatggaaaaaaataagcctttgttgggtaaaaaaggactgtctgagactttcatttgttctgtgcaacatataagtcaatacagataagtcttcctctgcaaacttcactaaaaagcctgggggttctggcagtctagattaaaatgcttgcacatgcagaaacctctggggacaaagacacacttccactgaattatactctgctttaaaaaaatccccaaaagcaaatg

SEQ ID NO: 6456 - protein, 470 aa, Homo sapiens [sequence omitted]

SEQ ID NO: 6457 - DNA, 4197 bp, Homo sapiens
tgcaccctccgaggactgggagtcccgagtccagcttagggggagtgggggcgcgacccccaacccagaaaccttcacttgaccgctcaagttcgcggcagcagggcgggccgcgccgaatctcggcgtgcgcggagcggggagatgcaggcgagcgccagagcccgggctcgggggccctgcgccggggagaggagccgggacccaccggcggagccgaaaacaagtgtattcatattcaaacaaacggaccaattgcaccaggcggggagagggagcatccaatcggctggcgcgaggccccggcgctgctttgcataaagcaatattttgtgtgagagcgagcggtgcatttgcatgttgcggagtgattagtgggtttgaaaagggaaccgtggctcggcctcatttcccgctctggttcaggcgcaggaggaagtgttttgctggaggatgatgacagaggtcaggcttcgctaatgggccagtgaggagcggtggaggcgaggccgggcgccggcacacacacattaacacacttgagccatcaccaatcagcataggaatctgagaattgctctcacacaccaacccagcaacatccgtggagaaaactctcaccagcaactcctttaaaacaccgtcatttcaaaccattgtggtcttcaagcaacaacagcagcacaaaaaaccccaaccaaacaaaactcttgacagaagctgtgacaaccagaaaggatgcctcataaagggggaagactttaactaggggcgcgcagatgtgtgaggccttttattgtgagagtggacagacatccgagatttcaggcaaccccatattcgagccccgtggaatcccgcggcccccagccagagccagcatgcagaacagtcacagcggagtgaatcagctcggtggtgtctttgtcaacgggcggccactgccggactccacccggcagaagattgtagagctagctcacagcggggcccggccgtgcgacatttcccgaattctgcaggtgtccaacggatgtgtgagtaaaattctgggcaggtattacgagactggctccatcagacccagggcaatcggtggtagtaaaccgagagtagcgactccagaagttgtaagcaaaatagcccagtataagcgggagtgcccgtccatctttgcttgggaaatccgagacagattactgtccgagggggtctgtaccaacgataacataccaagcgtgtcatcaataaacagagttcttcgcaacctggctagcgaaaagcaacagatgggcgcagacggcatgtatgataaactaaggatgttgaacgggcagaccggaagctggggcacccgccctggttggtatccggggacttcggtgccagggcaacctacgcaagatggctgccagcaacaggaaggagggggagagaataccaactccatcagttccaacggagaagattcagatgaggctcaaatgcgacttcagctgaagcggaagctgcaaagaaatagaacatcctttacccaagagcaaattgaggccctggagaaagagtttgagagaacccattatccagatgtgtttgcccgagaaagactagcagccaaaatagatctacctgaagcaagaatacaggtatggttttctaatcgaagggccaaatggagaagagaagaaaaactgaggaatcagagaagacaggccagcaacacacctagtcatattcctatcagcagtagtttcagcaccagtgtctaccaaccaattccacaacccaccacaccggtttcctccttcacatctggctccatgttgggccgaacagacacagccctcacaaacacctacagcgctctgccgcctatgcccagcttcaccatggcaaataacctgcctatgcaacccccagtccccagccagacctcctcatactcctgcatgctgcccaccagcccttcggtgaatgggcggagttatgatacctacacccccccacatatgcagacacacatgaacagtcagccaatgggcacctcgggcaccacttcaacaggactcatttcccctggtgtgtcagttccagttcaagttcccggaagtgaacctgatatgtctcaatactggccaagattacagtaaaaaaaaaaaaaaaaaaaaaaaggaaaggaaatattgtgttaattcagtcagtgactatggggacacaacagttgagctttcaggaaagaaagaaaaatggctgttagagccgcttcagttctacaattgtgtcctgtattgtaccactggggaaggaatggacttgaaacaaggacctttgtatacagaaggcacgatatcagttggaacaaatcttcattttggtatccaaacttttattcattttggtgtattatttgtaaatgggcatttgtatgttataatgaaaaaaagaacaatgtagactggatggatgtttgatctgtgttggtcatgaagttgttttttttttttttaaaaagaaaaccatgatcaacaagctttgccacgaatttaagagttttatcaagatatatcgaatacttctacccatctgttcatagtttatggactgatgttccaagtttgtatcattcctttgcatataattaaacctggaacaacatgcactagatttatgtcagaaatatctgttggttttccaaaggttgttaacagatgaagtttatgtgcaaaaaagggtaagatataaattcaaggaagaaaaaaagttgatagctaaaaggtagagtgtgtcttcgatataatccaatttgttttatgtcaaaatgtaagtatttgtcttccctagaaatcctcagaatgatttctataataaagttaatttcatttatatttgacaagaatatagatgttttatacacattttcatgcaatcatacgtttcttttttggccagcaaaagttaattgttcttagatatagttgtattactgttcacggtccaatcattttgtgcatctagagttcattcctaatcaattaaaagtgcttgcaagagttttaaacttaagtgttttgaagttgttcacaactacatatcaaaattaaccattgttgattgtaaaaaaccatgccaaagcctttgtatttcctttattatacagttttctttttaaccttatagtgtggtgttacaaattttatttccatgttagatcaacattctaaaccaatggttactttcacacacactctgttttacatcctgatgatccttaaaaaataatccttatagataccataaatcaaaaacgtgttagaaaaaaattccacttacagcagggtgtagatctgtgcccatttatacccacaacatatatacaaaatggtaacatttcccagttagccatttaattctaaagctcaaagtctagaaataatttaaaaatgcaacaagcgattagctaggaattgttttttgaattaggactggcattttcaatctgggcagatttccattgtcagcctatttcaacaatgatttcactgaagtatattcaaaagtagatttcttaaaggagactttctgaaagctgttgcctttttcaaataggccctctcccttttctgtctccctcccctttgcacaagaggcatcatttcccattgaaccactacagctgttcccatttgaatcttgctttctgtgcggttgtggatggttggagggtggaggggggatgttgcatgtcaaggaataatgagcacagacacatcaacagacaacaacaaagcagactgtgactggccggtgggaattaaaggccttcagtcattggcagcttaagccaaacattcccaaatctatgaagcagggcccattgttggtcagttgttatttgcaatgaagcacagttctgatcatgtttaaagtggaggcacgcagggcaggagtgcttgagcccaagcaaaggatggaaaaaaataagcctttgttgggtaaaaaaggactgtctgagactttcatttgttctgtgcaacatataagtcaatacagataagtcttcctctgcaaacttcactaaaaagcctgggggttctggcagtctagattaaaatgcttgcacatgcagaaacctctggggacaaagacacacttccactgaattatactctgctttaaaaaaatccccaaaagcaaatg

SEQ ID NO: 6458 - protein, 456 aa, Homo sapiens [sequence omitted]

SEQ ID NO: 6459 - DNA, 2255 bp, Homo sapiens
gagaaaactactctttgaattttggagtgggtgagcccgattgtctatccatttattcattctcttgaccaaaatcatcattttacaaatggtgggtgtcttcctctggaccttctctgatatgcttccctctctgagcatatggattttggaaattaaacatttctccagtttgcagagaagagaaatgatagtatactgtactatcatctgacctgcttgttcccgacacacttcttttaattcatcccaagtttgctgccatggcatagtaccatgagagctcatgaggcgttttgttaggagaaaggtttacctcctcagtgctgccattccgaacagttcgagggtagcaacagttttctagttataagtcagtctgggcttttgggtctgttaggaagtcatggttaattctcaggatggaggtcgttatatttactaacacttctgatcactttaacttggggtcattacagatctgcttcttcaaagaatctttaatcccatcagtgaaaggttcccaaggtccctgaaccatactttactgagagctcctcccactgctctctgtcccaaagcttgagatatgggctctgggggtcatagggttcccaaataaatccagatttgcagggagaggggatgtgttttgatgaaggtcctcatgctataggttcttcaaagatgctagcagaggttagagacaaaaatcctattaatttatggatagtggcaaccatctagctggacagttgtcagaacctaaagtgctttagaggcttgatacataggcagctttcttctagctgtggccagtggaaggactagctcgaggcccaatcttagatttatcatatggaattccagtacttcacgtgaaggcatctttaatgatcagacttgttggcagagttcctcgggaggagggagcctggggctgtggctgtgtgatgtgttcctcagtaaccacaggtttgcctctctcctcacagcccccagtccccagccagacctcctcatactcctgcatgctgcccaccagcccttcggtgaatgggcggagttatgatacctacacccccccacatatgcagacacacatgaacagtcagccaatgggcacctcgggcaccacttcaacaggactcatttcccctggtgtgtcagttccagttcaagttcccggaagtgaacctgatatgtctcaatactggccaagattacagtaaaaaaaaaaaaaaaaaaaaaaaggaaaggaaatattgtgttaattcagtcagtgactatggggacacaacagttgagctttcaggaaagaaagaaaaatggctgttagagccgcttcagttctacaattgtgtcctgtattgtaccactggggaaggaatggacttgaaacaaggacctttgtatacagaaggcacgatatcagttggaacaaatcttcattttggtatccaaacttttattcattttggtgtattatttgtaaatgggcatttgtatgttataatgaaaaaaagaacaatgtagactggatggatgtttgatctgtgttggtcatgaagttgttttttttttttttaaaaagaaaaccatgatcaacaagctttgccacgaatttaagagttttatcaagatatatcgaatacttctacccatctgttcatagtttatggactgatgttccaagtttgtatcattcctttgcatataattaaacctggaacaacatgcactagatttatgtcagaaatatctgttggttttccaaaggttgttaacagatgaagtttatgtgcaaaaaagggtaagatataaattcaaggaagaaaaaaagttgatagctaaaaggtagagtgtgtcttcgatataatccaatttgttttatgtcaaaatgtaagtatttgtcttccctagaaatcctcagaatgatttctataataaagttaatttcatttatatttgacaagaatatagatgttttatacacattttcatgcaatcatacgtttcttttttggccagcaaaagttaattgttcttagatatagttgtattactgttcacggtccaatcattttgtgcatctagagttcattcctaatcaattaaaagtgcttgcaagagttttaaacttaagtgttttgaagttgttcacaactacatatcaaaattaaccattgttgattgtaaaaaaccatgccaaagcctttgtatttcctttattatacagttttctttttaacctt

SEQ ID NO: 6460 - protein, 112 aa, Homo sapiens; identical to SEQ ID NO: 6442

SEQ ID NO: 6461 - DNA, 3599 bp, Homo sapiens
ggaaacatttctggattttagcgtctaagggagcactcaagggctgtaaggtttgctatcactgtcccaacactgcagagaccttgaaggttcagtgtgggatctgtagaacccatggtttgcggtgacactcagaggggatctttgggagatttatagagccggttcttagcgctttgtgggttcagaggctggctgcagtgtttatgaagaggggcagtgggctggggacactgctggggttatggctgtagtgaggtccatgtgtacttgttccttggcatgtgtctgactctgtgttgctgctgcagtacagtgggcaggggcacggttgcttggactgggctgcccgatgtctggcatggctggtggtcctgttgtcctttatttgatcgatagcagggaactgaccgccgaggttggcacaggttggcagggggatgaggatgcattgtggttgtctcctcctcctctccttcttcctcttccccttcctcctctcctttctgttcttgttctccctcatcttcctcttccttcttctccctcttcttcctcttcactctgctctcttctcttcttttcccctttcctctcctctccctttcctcaggtcacagcggagtgaatcagctcggtggtgtctttgtcaacgggcggccactgccggactccacccggcagaagattgtagagctagctcacagcggggcccggccgtgcgacatttcccgaattctgcaggtgtccaacggatgtgtgagtaaaattctgggcaggtattacgagactggctccatcagacccagggcaatcggtggtagtaaaccgagagtagcgactccagaagttgtaagcaaaatagcccagtataagcgggagtgcccgtccatctttgcttgggaaatccgagacagattactgtccgagggggtctgtaccaacgataacataccaagcgtaagttcattgagaacatctgccctccctgccctaagcccaatgctctctcctctttacctcctcccaccctctctctccactgtctcttagtctgtgtcctctccctgctccacatttgtctcctttgtacctgggggaacagagaggaatgccctgacttttctttgactgtctggaaaatgggagtcaagtgtggggagtcattcacttcatttgcatgctgcaaaacagagggcggaggcaccagggaaaggcacttgaatgaagaaggaaaatgagaaccagattgtaacttcgtcctaatccacctgccagaactttccttcaggtgtcacacatccatttccatcctaatattaaacaatataatgaaagaaagctttacaacaagtctaaatagtttttattttcgggcagtcttttaacaaagcaaagcaaccgtgtgagttaggtcaccagagacaccaagcaatggtgaaggaccccctccgcccaattctctatccaactaaatttccatgcccaaagtgatagctatcattttttccacggtgtatctgcaaatccacccactgtcccggggtggctgggagctttttaacgggttgagagttgctttttaaggttgtgggtgagctgagatgggtgactgtgtcttcaggagacactaccatttggtttgattttggtttgatttgcaggtgtcatcaataaacagagttcttcgcaacctggctagcgaaaagcaacagatgggcgcagacggcatgtatgataaactaaggatgttgaacgggcagaccggaagctggggcacccgccctggttggtatccggggacttcggtgccagggcaacctacgcaagatggctgccagcaacaggaaggagggggagagaataccaactccatcagttccaacggagaagattcagatgaggctcaaatgcgacttcagctgaagcggaagctgcaaagaaatagaacatcctttacccaagagcaaattgaggccctggagaaagagtttgagagaacccattatccagatgtgtttgcccgagaaagactagcagccaaaatagatctacctgaagcaagaatacaggtatggttttctaatcgaagggccaaatggagaagagaagaaaaactgaggaatcagagaagacaggccagcaacacacctagtcatattcctatcagcagtagtttcagcaccagtgtctaccaaccaattccacaacccaccacaccggtttcctccttcacatctggctccatgttgggccgaacagacacagccctcacaaacacctacagcgctctgccgcctatgcccagcttcaccatggcaaataacctgcctatgcaacccccagtccccagccagacctcctcatactcctgcatgctgcccaccagcccttcggtgaatgggcggagttatgatacctacacccccccacatatgcagacacacatgaacagtcagccaatgggcacctcgggcaccacttcaacaggactcatttcccctggtgtgtcagttccagttcaagttcccggaagtgaacctgatatgtctcaatactggccaagattacagtaaaaaaaaaaaaaaaaaaaaaaaggaaaggaaatattgtgttaattcagtcagtgactatggggacacaacagttgagctttcaggaaagaaagaaaaatggctgttagagccgcttcagttctacaattgtgtcctgtattgtaccactggggaaggaatggacttgaaacaaggacctttgtatacagaaggcacgatatcagttggaacaaatcttcattttggtatccaaacttttattcattttggtgtattatttgtaaatgggcatttgtatgttataatgaaaaaaagaacaatgtagactggatggatgtttgatctgtgttggtcatgaagttgttttttttttttttaaaaagaaaaccatgatcaacaagctttgccacgaatttaagagttttatcaagatatatcgaatacttctacccatctgttcatagtttatggactgatgttccaagtttgtatcattcctttgcatataattaaacctggaacaacatgcactagatttatgtcagaaatatctgttggttttccaaaggttgttaacagatgaagtttatgtgcaaaaaagggtaagatataaattcaaggaagaaaaaaagttgatagctaaaaggtagagtgtgtcttcgatataatccaatttgttttatgtcaaaatgtaagtatttgtcttccctagaaatcctcagaatgatttctataataaagttaatttcatttatatttgacaagaatatagatgttttatacacattttcatgcaatcatacgtttcttttttggccagcaaaagttaattgttcttagatatagttgtattactgttcacggtccaatcattttgtgcatctagagttcattcctaatcaattaaaagtgcttgcaagagttttaaacttaagtgttttgaagttgttcacaactacatatcaaaattaaccattgttgattgtaaaaaaccatgccaaagcctttgtatttcctttattatacagttttctttttaacctt

SEQ ID NO: 6462 - protein, 286 aa, Homo sapiens; identical to SEQ ID NO: 6444

SEQ ID NO: 6463 - DNA, 3867 bp, Homo sapiens
agtaggctccaaggagaagagaggagaggagaggagagctgaacagggagccacgtcttttcctgggagggctgctatctaagtcggggctgcaggttggagatttttaaggaagtggaaattggcaattggctttgtgtgtctgtggtttttggggagggggactacaaagaggggctaactccctctccctattctctaaggttggaccacagggatgaggttgtgagatacaaagataaaggagggatggggaacactatgatgtggtatttttcttttctgttttttctttttgataatatctatccttggctaaggggagggcggagttcagcggcggaaataaagcgagcagtggctggtgcgaaccgactcccggctctaagccttacttgcggtggccggacttgtctgtggctgaagccgagcccgggctctgactctcacgtctgcactggaggtgcggaaacctggactggggttcaccagccacatactggctgctctggttgttctctcctcttccttcttctattctaaccaaacaaaacccaactcgatgcttgtgccaggccttggccagtttggacggtgatggaaacatttctggattttagcgtctaagggagcactcaagggctgtaaggtttgctatcactgtcccaacactgcagagaccttgaaggttcagtgtgggatctgtagaacccatggtttgcggtgacactcagaggggatctttgggagatttatagagccggttcttagcgctttgtgggttcagaggctggctgcagtgtttatgaagaggggcagtgggctggggacactgctggggttatggctgtagtgaggtccatgtgtacttgttccttggcatgtgtctgactctgtgttgctgctgcagtacagtgggcaggggcacggttgcttggactgggctgcccgatgtctggcatggctggtggtcctgttgtcctttatttgatcgatagcagggaactgaccgccgaggttggcacaggttggcagggggatgaggatgcattgtggttgtctcctcctcctctccttcttcctcttccccttcctcctctcctttctgttcttgttctccctcatcttcctcttccttcttctccctcttcttcctcttcactctgctctcttctcttcttttcccctttcctctcctctccctttcctcaggtcacagcggagtgaatcagctcggtggtgtctttgtcaacgggcggccactgccggactccacccggcagaagattgtagagctagctcacagcggggcccggccgtgcgacatttcccgaattctgcagacccatgcagatgcaaaagtccaagtgctggacaatcaaaacgtgtccaacggatgtgtgagtaaaattctgggcaggtattacgagactggctccatcagacccagggcaatcggtggtagtaaaccgagagtagcgactccagaagttgtaagcaaaatagcccagtataagcgggagtgcccgtccatctttgcttgggaaatccgagacagattactgtccgagggggtctgtaccaacgataacataccaagcgtaagttcattgagaacatctgccctccctgccctaagcccaatgctctctcctctttacctcctcccaccctctctctccactgtctcttagtctgtgtcctctccctgctccacatttgtctcctttgtacctgggggaacagagaggaatgccctgacttttctttgactgtctggaaaatgggagtcaagtgtggggagtcattcacttcatttgcatgctgcaaaacagagggcggaggcaccagggaaaggcacttgaatgaagaaggaaaatgagaaccagattgtaacttcgtcctaatccacctgccagaactttccttcaggtgtcatcaataaacagagttcttcgcaacctggctagcgaaaagcaacagatgggcgcagacggcatgtatgataaactaaggatgttgaacgggcagaccggaagctggggcacccgccctggttggtatccggggacttcggtgccagggcaacctacgcaagatggctgccagcaacaggaaggagggggagagaataccaactccatcagttccaacggagaagattcagatgaggctcaaatgcgacttcagctgaagcggaagctgcaaagaaatagaacatcctttacccaagagcaaattgaggccctggagaaagagtttgagagaacccattatccagatgtgtttgcccgagaaagactagcagccaaaatagatctacctgaagcaagaatacaggtatggttttctaatcgaagggccaaatggagaagagaagaaaaactgaggaatcagagaagacaggccagcaacacacctagtcatattcctatcagcagtagtttcagcaccagtgtctaccaaccaattccacaacccaccacaccggtttcctccttcacatctggctccatgttgggccgaacagacacagccctcacaaacacctacagcgctctgccgcctatgcccagcttcaccatggcaaataacctgcctatgcaacccccagtccccagccagacctcctcatactcctgcatgctgcccaccagcccttcggtgaatgggcggagttatgatacctacacccccccacatatgcagacacacatgaacagtcagccaatgggcacctcgggcaccacttcaacaggactcatttcccctggtgtgtcagttccagttcaagttcccggaagtgaacctgatatgtctcaatactggccaagattacagtaaaaaaaaaaaaaaaaaaaaaaaggaaaggaaatattgtgttaattcagtcagtgactatggggacacaacagttgagctttcaggaaagaaagaaaaatggctgttagagccgcttcagttctacaattgtgtcctgtattgtaccactggggaaggaatggacttgaaacaaggacctttgtatacagaaggcacgatatcagttggaacaaatcttcattttggtatccaaacttttattcattttggtgtattatttgtaaatgggcatttgtatgttataatgaaaaaaagaacaatgtagactggatggatgtttgatctgtgttggtcatgaagttgttttttttttttttaaaaagaaaaccatgatcaacaagctttgccacgaatttaagagttttatcaagatatatcgaatacttctacccatctgttcatagtttatggactgatgttccaagtttgtatcattcctttgcatataattaaacctggaacaacatgcactagatttatgtcagaaatatctgttggttttccaaaggttgttaacagatgaagtttatgtgcaaaaaagggtaagatataaattcaaggaagaaaaaaagttgatagctaaaaggtagagtgtgtcttcgatataatccaatttgttttatgtcaaaatgtaagtatttgtcttccctagaaatcctcagaatgatttctataataaagttaatttcatttatatttgacaagaatatagatgttttatacacattttcatgcaatcatacgtttcttttttggccagcaaaagttaattgttcttagatatagttgtattactgttcacggtccaatcattttgtgcatctagagttcattcctaatcaattaaaagtgcttgcaagagttttaaacttaagtgttttgaagttgttcacaactacatatcaaaattaaccattgttgattgtaaaaaaccatgccaaagcctttgtatttcctttattatacagttttctttttaacctt

SEQ ID NO: 6464 - protein, 286 aa, Homo sapiens; identical to SEQ ID NO: 6444

SEQ ID NO: 6465 - DNA, 1402 bp, Homo sapiens
cgaaccacacaggcttaaggagggtccccagcaccttatccatctgttttggaaacgccggtcgccccctggtgcttccggggctggtcacagcggagtgaatcagctcggtggtgtctttgtcaacgggcggccactgccggactccacccggcagaagattgtagagctagctcacagcggggcccggccgtgcgacatttcccgaattctgcagacccatgcagatgcaaaagtccaagtgctggacaatcaaaacgtgtccaacggatgtgtgagtaaaattctgggcaggtattacgagactggtgtgtcagttccagttcaagttcccggaagtgaacctgatatgtctcaatactggccaagattacagtaaaaaaaaaaaaaaaaaaaaaaaggaaaggaaatattgtgttaattcagtcagtgactatggggacacaacagttgagctttcaggaaagaaagaaaaatggctgttagagccgcttcagttctacaattgtgtcctgtattgtaccactggggaaggaatggacttgaaacaaggacctttgtatacagaaggcacgatatcagttggaacaaatcttcattttggtatccaaacttttattcattttggtgtattatttgtaaatgggcatttgtatgttataatgaaaaaaagaacaatgtagactggatggatgtttgatctgtgttggtcatgaagttgttttttttttttttaaaaagaaaaccatgatcaacaagctttgccacgaatttaagagttttatcaagatatatcgaatacttctacccatctgttcatagtttatggactgatgttccaagtttgtatcattcctttgcatataattaaacctggaacaacatgcactagatttatgtcagaaatatctgttggttttccaaaggttgttaacagatgaagtttatgtgcaaaaaagggtaagatataaattcaaggaagaaaaaaagttgatagctaaaaggtagagtgtgtcttcgatataatccaatttgttttatgtcaaaatgtaagtatttgtcttccctagaaatcctcagaatgatttctataataaagttaatttcatttatatttgacaagaatatagatgttttatacacattttcatgcaatcatacgtttcttttttggccagcaaaagttaattgttcttagatatagttgtattactgttcacggtccaatcattttgtgcatctagagttcattcctaatcaattaaaagtgcttgcaagagttttaaacttaagtgttttgaagttgttcacaactacatatcaaaattaaccattgttgattgtaaaaaaccatgccaaagcctttgtatttcctttattatacagttttctttttaacctt

SEQ ID NO: 6466 - protein, 74 aa, Homo sapiens; identical to SEQ ID NO: 6448

SEQ ID NO: 6467 - DNA, 3184 bp, Homo sapiens
ctacttccagcgaaagcccgcgtcggagggcgactgccggcgagcgggagcggcgcagggctcggggcgggcggccagctcagccccagcgccagcgccagcgccagcgcgggctgagctcgcgggaagaagggagactccaggcgcgacagcagccgcggctcctagccccagcgtcgcccaatgctcccgacccgcgggaaaagacgaagaggctctgtggtgcccaaggccctggaacggccgcagagagcaaccgctgccggctgctttgtccagcccgaggcccagcgaacgcgcagagagcgggcgctccgaggactcgccgagggagcgccgagggaacctgctcgccgcgtctccgcccgcccgccggccctcgggctttgtgccgcactgggctccggcgcagaagagtcagccggcactcgagcgccgaggggggcaccgcgcccgccaccagcccgagtggagtcagtcggcaaggcagccgcacgctggaggtagagggaagagcgagctagcgcgagccgggaaggaagccaccaggccaaggcggtggaacgcgcgctccgagggagctcagagccgagcgggaggactgtcagcttccacccagcccccgggctcttgcccccaactccactggagcgctgagctcggaacttgaaaactctctgctccccaggcttcccccgactctcatctcccttgccttgcggaggctggggctcttccctgttctccggccccctgcgcttgggggaagactttaactaggggcgcgcagatgtgtgaggccttttattgtgagagtggacagacatccgagatttcaggcaaccccatattcgagccccgtggaatcccgcggcccccagccagagccagcatgcagaacagtcacagcggagtgaatcagctcggtggtgtctttgtcaacgggcggccactgccggactccacccggcagaagattgtagagctagctcacagcggggcccggccgtgcgacatttcccgaattctgcaggtgtccaacggatgtgtgagtaaaattctgggcaggtattacgagactggctccatcagacccagggcaatcggtggtagtaaaccgagagtagcgactccagaagttgtaagcaaaatagcccagtataagcgggagtgcccgtccatctttgcttgggaaatccgagacagattactgtccgagggggtctgtaccaacgataacataccaagcgtgtcatcaataaacagagttcttcgcaacctggctagcgaaaagcaacagatgggcgcagacggcatgtatgataaactaaggatgttgaacgggcagaccggaagctggggcacccgccctggttggtatccggggacttcggtgccagggcaacctacgcaagatggctgccagcaacaggaaggagggggagagaataccaactccatcagttccaacggagaagattcagatgaggctcaaatgcgacttcagctgaagcggaagctgcaaagaaatagaacatcctttacccaagagcaaattgaggccctggagaaagagtttgagagaacccattatccagatgtgtttgcccgagaaagactagcagccaaaatagatctacctgaagcaagaatacaggtatggttttctaatcgaagggccaaatggagaagagaagaaaaactgaggaatcagagaagacaggccagcaacacacctagtcatattcctatcagcagtagtttcagcaccagtgtctaccaaccaattccacaacccaccacaccggtttcctccttcacatctggctccatgttgggccgaacagacacagccctcacaaacacctacagcgctctgccgcctatgcccagcttcaccatggcaaataacctgcctatgcaacccccagtccccagccagacctcctcatactcctgcatgctgcccaccagcccttcggtgaatgggcggagttatgatacctacacccccccacatatgcagacacacatgaacagtcagccaatgggcacctcgggcaccacttcaacaggactcatttcccctggtgtgtcagttccagttcaagttcccggaagtgaacctgatatgtctcaatactggccaagattacagtaaaaaaaaaaaaaaaaaaaaaaaggaaaggaaatattgtgttaattcagtcagtgactatggggacacaacagttgagctttcaggaaagaaagaaaaatggctgttagagccgcttcagttctacaattgtgtcctgtattgtaccactggggaaggaatggacttgaaacaaggacctttgtatacagaaggcacgatatcagttggaacaaatcttcattttggtatccaaacttttattcattttggtgtattatttgtaaatgggcatttgtatgttataatgaaaaaaagaacaatgtagactggatggatgtttgatctgtgttggtcatgaagttgttttttttttttttaaaaagaaaaccatgatcaacaagctttgccacgaatttaagagttttatcaagatatatcgaatacttctacccatctgttcatagtttatggactgatgttccaagtttgtatcattcctttgcatataattaaacctggaacaacatgcactagatttatgtcagaaatatctgttggttttccaaaggttgttaacagatgaagtttatgtgcaaaaaagggtaagatataaattcaaggaagaaaaaaagttgatagctaaaaggtagagtgtgtcttcgatataatccaatttgttttatgtcaaaatgtaagtatttgtcttccctagaaatcctcagaatgatttctataataaagttaatttcatttatatttgacaagaatatagatgttttatacacattttcatgcaatcatacgtttcttttttggccagcaaaagttaattgttcttagatatagttgtattactgttcacggtccaatcattttgtgcatctagagttcattcctaatcaattaaaagtgcttgcaagagttttaaacttaagtgttttgaagttgttcacaactacatatcaaaattaaccattgttgattgtaaaaaaccatgccaaagcctttgtatttcctttattatacagttttctttttaacctt

SEQ ID NO: 6468 - protein, 456 aa, Homo sapiens [sequence omitted]

SEQ ID NO: 6469 - DNA, 2729 bp, Homo sapiens
ggtgcatttgcatgttgcggagtgattagtgggtttgaaaagggaaccgtggctcggcctcatttcccgctctggttcaggcgcaggaggaagtgttttgctggaggatgatgacagaggaatctgagaattgctctcacacaccaacccagcaacatccgtggagaaaactctcaccagcaactcctttaaaacaccgtcatttcaaaccattgtggtcttcaagcaacaacagcagcacaaaaaaccccaaccaaacaaaactcttgacagaagctgtgacaaccagaaaggatgcctcataaagggggaagactttaactaggggcgcgcagatgtgtgaggccttttattgtgagagtggacagacatccgagatttcaggcaaccccatattcgagccccgtggaatcccgcggcccccagccagagccagcatgcagaacagtcacagcggagtgaatcagctcggtggtgtctttgtcaacgggcggccactgccggactccacccggcagaagattgtagagctagctcacagcggggcccggccgtgcgacatttcccgaattctgcaggtgtccaacggatgtgtgagtaaaattctgggcaggtattacgagactggctccatcagacccagggcaatcggtggtagtaaaccgagagtagcgactccagaagttgtaagcaaaatagcccagtataagcgggagtgcccgtccatctttgcttgggaaatccgagacagattactgtccgagggggtctgtaccaacgataacataccaagcgtgtcatcaataaacagagttcttcgcaacctggctagcgaaaagcaacagatgggcgcagacggcatgtatgataaactaaggatgttgaacgggcagaccggaagctggggcacccgccctggttggtatccggggacttcggtgccagggcaacctacgcaagatggctgccagcaacaggaaggagggggagagaataccaactccatcagttccaacggagaagattcagatgaggctcaaatgcgacttcagctgaagcggaagctgcaaagaaatagaacatcctttacccaagagcaaattgaggccctggagaaagagtttgagagaacccattatccagatgtgtttgcccgagaaagactagcagccaaaatagatctacctgaagcaagaatacaggtatggttttctaatcgaagggccaaatggagaagagaagaaaaactgaggaatcagagaagacaggccagcaacacacctagtcatattcctatcagcagtagtttcagcaccagtgtctaccaaccaattccacaacccaccacaccggtttcctccttcacatctggctccatgttgggccgaacagacacagccctcacaaacacctacagcgctctgccgcctatgcccagcttcaccatggcaaataacctgcctatgcaacccccagtccccagccagacctcctcatactcctgcatgctgcccaccagcccttcggtgaatgggcggagttatgatacctacacccccccacatatgcagacacacatgaacagtcagccaatgggcacctcgggcaccacttcaacaggactcatttcccctggtgtgtcagttccagttcaagttcccggaagtgaacctgatatgtctcaatactggccaagattacagtaaaaaaaaaaaaaaaaaaaaaaaggaaaggaaatattgtgttaattcagtcagtgactatggggacacaacagttgagctttcaggaaagaaagaaaaatggctgttagagccgcttcagttctacaattgtgtcctgtattgtaccactggggaaggaatggacttgaaacaaggacctttgtatacagaaggcacgatatcagttggaacaaatcttcattttggtatccaaacttttattcattttggtgtattatttgtaaatgggcatttgtatgttataatgaaaaaaagaacaatgtagactggatggatgtttgatctgtgttggtcatgaagttgttttttttttttttaaaaagaaaaccatgatcaacaagctttgccacgaatttaagagttttatcaagatatatcgaatacttctacccatctgttcatagtttatggactgatgttccaagtttgtatcattcctttgcatataattaaacctggaacaacatgcactagatttatgtcagaaatatctgttggttttccaaaggttgttaacagatgaagtttatgtgcaaaaaagggtaagatataaattcaaggaagaaaaaaagttgatagctaaaaggtagagtgtgtcttcgatataatccaatttgttttatgtcaaaatgtaagtatttgtcttccctagaaatcctcagaatgatttctataataaagttaatttcatttatatttgacaagaatatagatgttttatacacattttcatgcaatcatacgtttcttttttggccagcaaaagttaattgttcttagatatagttgtattactgttcacggtccaatcattttgtgcatctagagttcattcctaatcaattaaaagtgcttgcaagagttttaaacttaagtgttttgaagttgttcacaactacatatcaaaattaaccattgttgattgtaaaaaaccatgccaaagcctttgtatttcctttattatacagttttctttttaacctt

SEQ ID NO: 6470 - protein, 456 aa, Homo sapiens [sequence omitted]

SEQ ID NO: 6471 - DNA, 2771 bp, Homo sapiens
ggtgcatttgcatgttgcggagtgattagtgggtttgaaaagggaaccgtggctcggcctcatttcccgctctggttcaggcgcaggaggaagtgttttgctggaggatgatgacagaggaatctgagaattgctctcacacaccaacccagcaacatccgtggagaaaactctcaccagcaactcctttaaaacaccgtcatttcaaaccattgtggtcttcaagcaacaacagcagcacaaaaaaccccaaccaaacaaaactcttgacagaagctgtgacaaccagaaaggatgcctcataaagggggaagactttaactaggggcgcgcagatgtgtgaggccttttattgtgagagtggacagacatccgagatttcaggcaaccccatattcgagccccgtggaatcccgcggcccccagccagagccagcatgcagaacagtcacagcggagtgaatcagctcggtggtgtctttgtcaacgggcggccactgccggactccacccggcagaagattgtagagctagctcacagcggggcccggccgtgcgacatttcccgaattctgcagacccatgcagatgcaaaagtccaagtgctggacaatcaaaacgtgtccaacggatgtgtgagtaaaattctgggcaggtattacgagactggctccatcagacccagggcaatcggtggtagtaaaccgagagtagcgactccagaagttgtaagcaaaatagcccagtataagcgggagtgcccgtccatctttgcttgggaaatccgagacagattactgtccgagggggtctgtaccaacgataacataccaagcgtgtcatcaataaacagagttcttcgcaacctggctagcgaaaagcaacagatgggcgcagacggcatgtatgataaactaaggatgttgaacgggcagaccggaagctggggcacccgccctggttggtatccggggacttcggtgccagggcaacctacgcaagatggctgccagcaacaggaaggagggggagagaataccaactccatcagttccaacggagaagattcagatgaggctcaaatgcgacttcagctgaagcggaagctgcaaagaaatagaacatcctttacccaagagcaaattgaggccctggagaaagagtttgagagaacccattatccagatgtgtttgcccgagaaagactagcagccaaaatagatctacctgaagcaagaatacaggtatggttttctaatcgaagggccaaatggagaagagaagaaaaactgaggaatcagagaagacaggccagcaacacacctagtcatattcctatcagcagtagtttcagcaccagtgtctaccaaccaattccacaacccaccacaccggtttcctccttcacatctggctccatgttgggccgaacagacacagccctcacaaacacctacagcgctctgccgcctatgcccagcttcaccatggcaaataacctgcctatgcaacccccagtccccagccagacctcctcatactcctgcatgctgcccaccagcccttcggtgaatgggcggagttatgatacctacacccccccacatatgcagacacacatgaacagtcagccaatgggcacctcgggcaccacttcaacaggactcatttcccctggtgtgtcagttccagttcaagttcccggaagtgaacctgatatgtctcaatactggccaagattacagtaaaaaaaaaaaaaaaaaaaaaaaggaaaggaaatattgtgttaattcagtcagtgactatggggacacaacagttgagctttcaggaaagaaagaaaaatggctgttagagccgcttcagttctacaattgtgtcctgtattgtaccactggggaaggaatggacttgaaacaaggacctttgtatacagaaggcacgatatcagttggaacaaatcttcattttggtatccaaacttttattcattttggtgtattatttgtaaatgggcatttgtatgttataatgaaaaaaagaacaatgtagactggatggatgtttgatctgtgttggtcatgaagttgttttttttttttttaaaaagaaaaccatgatcaacaagctttgccacgaatttaagagttttatcaagatatatcgaatacttctacccatctgttcatagtttatggactgatgttccaagtttgtatcattcctttgcatataattaaacctggaacaacatgcactagatttatgtcagaaatatctgttggttttccaaaggttgttaacagatgaagtttatgtgcaaaaaagggtaagatataaattcaaggaagaaaaaaagttgatagctaaaaggtagagtgtgtcttcgatataatccaatttgttttatgtcaaaatgtaagtatttgtcttccctagaaatcctcagaatgatttctataataaagttaatttcatttatatttgacaagaatatagatgttttatacacattttcatgcaatcatacgtttcttttttggccagcaaaagttaattgttcttagatatagttgtattactgttcacggtccaatcattttgtgcatctagagttcattcctaatcaattaaaagtgcttgcaagagttttaaacttaagtgttttgaagttgttcacaactacatatcaaaattaaccattgttgattgtaaaaaaccatgccaaagcctttgtatttcctttattatacagttttctttttaacctt

SEQ ID NO: 6472 - protein, 470 aa, Homo sapiens [sequence omitted]

SEQ ID NO: 6473 - DNA, 3215 bp, Homo sapiens
tgcaccctccgaggactgggagtcccgagtccagcttagggggagtgggggcgcgacccccaacccagaaaccttcacttgaccgctcaagttcgcggcagcagggcgggccgcgccgaatctcggcgtgcgcggagcggggagatgcaggcgagcgccagagcccgggctcgggggccctgcgccggggagaggagccgggacccaccggcggagccgaaaacaagtgtattcatattcaaacaaacggaccaattgcaccaggcggggagagggagcatccaatcggctggcgcgaggccccggcgctgctttgcataaagcaatattttgtgtgagagcgagcggtgcatttgcatgttgcggagtgattagtgggtttgaaaagggaaccgtggctcggcctcatttcccgctctggttcaggcgcaggaggaagtgttttgctggaggatgatgacagaggtcaggcttcgctaatgggccagtgaggagcggtggaggcgaggccgggcgccggcacacacacattaacacacttgagccatcaccaatcagcataggaatctgagaattgctctcacacaccaacccagcaacatccgtggagaaaactctcaccagcaactcctttaaaacaccgtcatttcaaaccattgtggtcttcaagcaacaacagcagcacaaaaaaccccaaccaaacaaaactcttgacagaagctgtgacaaccagaaaggatgcctcataaagggggaagactttaactaggggcgcgcagatgtgtgaggccttttattgtgagagtggacagacatccgagatttcaggcaaccccatattcgagccccgtggaatcccgcggcccccagccagagccagcatgcagaacagtcacagcggagtgaatcagctcggtggtgtctttgtcaacgggcggccactgccggactccacccggcagaagattgtagagctagctcacagcggggcccggccgtgcgacatttcccgaattctgcagacccatgcagatgcaaaagtccaagtgctggacaatcaaaacgtgtccaacggatgtgtgagtaaaattctgggcaggtattacgagactggctccatcagacccagggcaatcggtggtagtaaaccgagagtagcgactccagaagttgtaagcaaaatagcccagtataagcgggagtgcccgtccatctttgcttgggaaatccgagacagattactgtccgagggggtctgtaccaacgataacataccaagcgtgtcatcaataaacagagttcttcgcaacctggctagcgaaaagcaacagatgggcgcagacggcatgtatgataaactaaggatgttgaacgggcagaccggaagctggggcacccgccctggttggtatccggggacttcggtgccagggcaacctacgcaagatggctgccagcaacaggaaggagggggagagaataccaactccatcagttccaacggagaagattcagatgaggctcaaatgcgacttcagctgaagcggaagctgcaaagaaatagaacatcctttacccaagagcaaattgaggccctggagaaagagtttgagagaacccattatccagatgtgtttgcccgagaaagactagcagccaaaatagatctacctgaagcaagaatacaggtatggttttctaatcgaagggccaaatggagaagagaagaaaaactgaggaatcagagaagacaggccagcaacacacctagtcatattcctatcagcagtagtttcagcaccagtgtctaccaaccaattccacaacccaccacaccggtttcctccttcacatctggctccatgttgggccgaacagacacagccctcacaaacacctacagcgctctgccgcctatgcccagcttcaccatggcaaataacctgcctatgcaacccccagtccccagccagacctcctcatactcctgcatgctgcccaccagcccttcggtgaatgggcggagttatgatacctacacccccccacatatgcagacacacatgaacagtcagccaatgggcacctcgggcaccacttcaacaggactcatttcccctggtgtgtcagttccagttcaagttcccggaagtgaacctgatatgtctcaatactggccaagattacagtaaaaaaaaaaaaaaaaaaaaaaaggaaaggaaatattgtgttaattcagtcagtgactatggggacacaacagttgagctttcaggaaagaaagaaaaatggctgttagagccgcttcagttctacaattgtgtcctgtattgtaccactggggaaggaatggacttgaaacaaggacctttgtatacagaaggcacgatatcagttggaacaaatcttcattttggtatccaaacttttattcattttggtgtattatttgtaaatgggcatttgtatgttataatgaaaaaaagaacaatgtagactggatggatgtttgatctgtgttggtcatgaagttgttttttttttttttaaaaagaaaaccatgatcaacaagctttgccacgaatttaagagttttatcaagatatatcgaatacttctacccatctgttcatagtttatggactgatgttccaagtttgtatcattcctttgcatataattaaacctggaacaacatgcactagatttatgtcagaaatatctgttggttttccaaaggttgttaacagatgaagtttatgtgcaaaaaagggtaagatataaattcaaggaagaaaaaaagttgatagctaaaaggtagagtgtgtcttcgatataatccaatttgttttatgtcaaaatgtaagtatttgtcttccctagaaatcctcagaatgatttctataataaagttaatttcatttatatttgacaagaatatagatgttttatacacattttcatgcaatcatacgtttcttttttggccagcaaaagttaattgttcttagatatagttgtattactgttcacggtccaatcattttgtgcatctagagttcattcctaatcaattaaaagtgcttgcaagagttttaaacttaagtgttttgaagttgttcacaactacatatcaaaattaaccattgttgattgtaaaaaaccatgccaaagcctttgtatttcctttattatacagttttctttttaacctt

SEQ ID NO: 6474 - protein, 470 aa, Homo sapiens [sequence omitted]

SEQ ID NO: 6475 - DNA, 3173 bp, Homo sapiens
tgcaccctccgaggactgggagtcccgagtccagcttagggggagtgggggcgcgacccccaacccagaaaccttcacttgaccgctcaagttcgcggcagcagggcgggccgcgccgaatctcggcgtgcgcggagcggggagatgcaggcgagcgccagagcccgggctcgggggccctgcgccggggagaggagccgggacccaccggcggagccgaaaacaagtgtattcatattcaaacaaacggaccaattgcaccaggcggggagagggagcatccaatcggctggcgcgaggccccggcgctgctttgcataaagcaatattttgtgtgagagcgagcggtgcatttgcatgttgcggagtgattagtgggtttgaaaagggaaccgtggctcggcctcatttcccgctctggttcaggcgcaggaggaagtgttttgctggaggatgatgacagaggtcaggcttcgctaatgggccagtgaggagcggtggaggcgaggccgggcgccggcacacacacattaacacacttgagccatcaccaatcagcataggaatctgagaattgctctcacacaccaacccagcaacatccgtggagaaaactctcaccagcaactcctttaaaacaccgtcatttcaaaccattgtggtcttcaagcaacaacagcagcacaaaaaaccccaaccaaacaaaactcttgacagaagctgtgacaaccagaaaggatgcctcataaagggggaagactttaactaggggcgcgcagatgtgtgaggccttttattgtgagagtggacagacatccgagatttcaggcaaccccatattcgagccccgtggaatcccgcggcccccagccagagccagcatgcagaacagtcacagcggagtgaatcagctcggtggtgtctttgtcaacgggcggccactgccggactccacccggcagaagattgtagagctagctcacagcggggcccggccgtgcgacatttcccgaattctgcaggtgtccaacggatgtgtgagtaaaattctgggcaggtattacgagactggctccatcagacccagggcaatcggtggtagtaaaccgagagtagcgactccagaagttgtaagcaaaatagcccagtataagcgggagtgcccgtccatctttgcttgggaaatccgagacagattactgtccgagggggtctgtaccaacgataacataccaagcgtgtcatcaataaacagagttcttcgcaacctggctagcgaaaagcaacagatgggcgcagacggcatgtatgataaactaaggatgttgaacgggcagaccggaagctggggcacccgccctggttggtatccggggacttcggtgccagggcaacctacgcaagatggctgccagcaacaggaaggagggggagagaataccaactccatcagttccaacggagaagattcagatgaggctcaaatgcgacttcagctgaagcggaagctgcaaagaaatagaacatcctttacccaagagcaaattgaggccctggagaaagagtttgagagaacccattatccagatgtgtttgcccgagaaagactagcagccaaaatagatctacctgaagcaagaatacaggtatggttttctaatcgaagggccaaatggagaagagaagaaaaactgaggaatcagagaagacaggccagcaacacacctagtcatattcctatcagcagtagtttcagcaccagtgtctaccaaccaattccacaacccaccacaccggtttcctccttcacatctggctccatgttgggccgaacagacacagccctcacaaacacctacagcgctctgccgcctatgcccagcttcaccatggcaaataacctgcctatgcaacccccagtccccagccagacctcctcatactcctgcatgctgcccaccagcccttcggtgaatgggcggagttatgatacctacacccccccacatatgcagacacacatgaacagtcagccaatgggcacctcgggcaccacttcaacaggactcatttcccctggtgtgtcagttccagttcaagttcccggaagtgaacctgatatgtctcaatactggccaagattacagtaaaaaaaaaaaaaaaaaaaaaaaggaaaggaaatattgtgttaattcagtcagtgactatggggacacaacagttgagctttcaggaaagaaagaaaaatggctgttagagccgcttcagttctacaattgtgtcctgtattgtaccactggggaaggaatggacttgaaacaaggacctttgtatacagaaggcacgatatcagttggaacaaatcttcattttggtatccaaacttttattcattttggtgtattatttgtaaatgggcatttgtatgttataatgaaaaaaagaacaatgtagactggatggatgtttgatctgtgttggtcatgaagttgttttttttttttttaaaaagaaaaccatgatcaacaagctttgccacgaatttaagagttttatcaagatatatcgaatacttctacccatctgttcatagtttatggactgatgttccaagtttgtatcattcctttgcatataattaaacctggaacaacatgcactagatttatgtcagaaatatctgttggttttccaaaggttgttaacagatgaagtttatgtgcaaaaaagggtaagatataaattcaaggaagaaaaaaagttgatagctaaaaggtagagtgtgtcttcgatataatccaatttgttttatgtcaaaatgtaagtatttgtcttccctagaaatcctcagaatgatttctataataaagttaatttcatttatatttgacaagaatatagatgttttatacacattttcatgcaatcatacgtttcttttttggccagcaaaagttaattgttcttagatatagttgtattactgttcacggtccaatcattttgtgcatctagagttcattcctaatcaattaaaagtgcttgcaagagttttaaacttaagtgttttgaagttgttcacaactacatatcaaaattaaccattgttgattgtaaaaaaccatgccaaagcctttgtatttcctttattatacagttttctttttaacctt

SEQ ID NO: 6476 - protein, 456 aa, Homo sapiens [sequence omitted]

SEQ ID NO: 6477 - DNA, 2137 bp, Homo sapiens
gagaaaactactctttgaattttggagtgggtgagcccgattgtctatccatttattcattctcttgaccaaaatcatcattttacaaatggtgggtgtcttcctctggaccttctctgatatgcttccctctctgagcatatggattttggaaattaaacatttctccagtttgcagagaagagaaatgatagtatactgtactatcatctgacctgcttgttcccgacacacttcttttaattcatcccaagtttgctgccatggcatagtaccatgagagctcatgaggcgttttgttaggagaaaggtttacctcctcagtgctgccattccgaacagttcgagggtagcaacagttttctagttataagtcagtctgggcttttgggtctgttaggaagtcatggttaattctcaggatggaggtcgttatatttactaacacttctgatcactttaacttggggtcattacagatctgcttcttcaaagaatctttaatcccatcagtgaaaggttcccaaggtccctgaaccatactttactgagagctcctcccactgctctctgtcccaaagcttgagatatgggctctgggggtcatagggttcccaaataaatccagatttgcagggagaggggatgtgttttgatgaaggtcctcatgctataggttcttcaaagatgctagcagaggttagagacaaaaatcctattaatttatggatagtggcaaccatctagctggacagttgtcagaacctaaagtgctttagaggcttgatacataggcagctttcttctagctgtggccagtggaaggactagctcgaggcccaatcttagatttatcatatggaattccagtacttcacgtgaaggcatctttaatgatcagacttgttggcagagttcctcgggaggagggagcctggggctgtggctgtgtgatgtgttcctcagtaaccacaggtttgcctctctcctcacagcccccagtccccagccagacctcctcatactcctgcatgctgcccaccagcccttcggtgaatgggcggagttatgatacctacacccccccacatatgcagacacacatgaacagtcagccaatgggcacctcgggcaccacttcaacaggactcatttcccctggtgtgtcagttccagttcaagttcccggaagtgaacctgatatgtctcaatactggccaagattacagtaaaaaaaaaaaaaaaaaaaaaaaggaaaggaaatattgtgttaattcagtcagtgactatggggacacaacagttgagctttcaggaaagaaagaaaaatggctgttagagccgcttcagttctacaattgtgtcctgtattgtaccactggggaaggaatggacttgaaacaaggacctttgtatacagaaggcacgatatcagttggaacaaatcttcattttggtatccaaacttttattcattttggtgtattatttgtaaatgggcatttgtatgttataatgaaaaaaagaacaatgtagactggatggatgtttgatctgtgttggtcatgaagttgttttttttttttttaaaaagaaaaccatgatcaacaagctttgccacgaatttaagagttttatcaagatatatcgaatacttctacccatctgttcatagtttatggactgatgttccaagtttgtatcattcctttgcatataattaaacctggaacaacatgcactagatttatgtcagaaatatctgttggttttccaaaggttgttaacagatgaagtttatgtgcaaaaaagggtaagatataaattcaaggaagaaaaaaagttgatagctaaaaggtagagtgtgtcttcgatataatccaatttgttttatgtcaaaatgtaagtatttgtcttccctagaaatcctcagaatgatttctataataaagttaatttcatttatatttgacaagaatatagatgttttatacacattttcatgcaatcatacgtttcttttttggccagcaaaagttaattgttcttagatatagttgtattactgttcacggtccaatcattttgtgcatctagagttcattcctaatcaattaaaagtgcttgcaagagtttt

SEQ ID NO: 6478 - protein, 112 aa, Homo sapiens; identical to SEQ ID NO: 6442

SEQ ID NO: 6479 - DNA, 3481 bp, Homo sapiens
ggaaacatttctggattttagcgtctaagggagcactcaagggctgtaaggtttgctatcactgtcccaacactgcagagaccttgaaggttcagtgtgggatctgtagaacccatggtttgcggtgacactcagaggggatctttgggagatttatagagccggttcttagcgctttgtgggttcagaggctggctgcagtgtttatgaagaggggcagtgggctggggacactgctggggttatggctgtagtgaggtccatgtgtacttgttccttggcatgtgtctgactctgtgttgctgctgcagtacagtgggcaggggcacggttgcttggactgggctgcccgatgtctggcatggctggtggtcctgttgtcctttatttgatcgatagcagggaactgaccgccgaggttggcacaggttggcagggggatgaggatgcattgtggttgtctcctcctcctctccttcttcctcttccccttcctcctctcctttctgttcttgttctccctcatcttcctcttccttcttctccctcttcttcctcttcactctgctctcttctcttcttttcccctttcctctcctctccctttcctcaggtcacagcggagtgaatcagctcggtggtgtctttgtcaacgggcggccactgccggactccacccggcagaagattgtagagctagctcacagcggggcccggccgtgcgacatttcccgaattctgcaggtgtccaacggatgtgtgagtaaaattctgggcaggtattacgagactggctccatcagacccagggcaatcggtggtagtaaaccgagagtagcgactccagaagttgtaagcaaaatagcccagtataagcgggagtgcccgtccatctttgcttgggaaatccgagacagattactgtccgagggggtctgtaccaacgataacataccaagcgtaagttcattgagaacatctgccctccctgccctaagcccaatgctctctcctctttacctcctcccaccctctctctccactgtctcttagtctgtgtcctctccctgctccacatttgtctcctttgtacctgggggaacagagaggaatgccctgacttttctttgactgtctggaaaatgggagtcaagtgtggggagtcattcacttcatttgcatgctgcaaaacagagggcggaggcaccagggaaaggcacttgaatgaagaaggaaaatgagaaccagattgtaacttcgtcctaatccacctgccagaactttccttcaggtgtcacacatccatttccatcctaatattaaacaatataatgaaagaaagctttacaacaagtctaaatagtttttattttcgggcagtcttttaacaaagcaaagcaaccgtgtgagttaggtcaccagagacaccaagcaatggtgaaggaccccctccgcccaattctctatccaactaaatttccatgcccaaagtgatagctatcattttttccacggtgtatctgcaaatccacccactgtcccggggtggctgggagctttttaacgggttgagagttgctttttaaggttgtgggtgagctgagatgggtgactgtgtcttcaggagacactaccatttggtttgattttggtttgatttgcaggtgtcatcaataaacagagttcttcgcaacctggctagcgaaaagcaacagatgggcgcagacggcatgtatgataaactaaggatgttgaacgggcagaccggaagctggggcacccgccctggttggtatccggggacttcggtgccagggcaacctacgcaagatggctgccagcaacaggaaggagggggagagaataccaactccatcagttccaacggagaagattcagatgaggctcaaatgcgacttcagctgaagcggaagctgcaaagaaatagaacatcctttacccaagagcaaattgaggccctggagaaagagtttgagagaacccattatccagatgtgtttgcccgagaaagactagcagccaaaatagatctacctgaagcaagaatacaggtatggttttctaatcgaagggccaaatggagaagagaagaaaaactgaggaatcagagaagacaggccagcaacacacctagtcatattcctatcagcagtagtttcagcaccagtgtctaccaaccaattccacaacccaccacaccggtttcctccttcacatctggctccatgttgggccgaacagacacagccctcacaaacacctacagcgctctgccgcctatgcccagcttcaccatggcaaataacctgcctatgcaacccccagtccccagccagacctcctcatactcctgcatgctgcccaccagcccttcggtgaatgggcggagttatgatacctacacccccccacatatgcagacacacatgaacagtcagccaatgggcacctcgggcaccacttcaacaggactcatttcccctggtgtgtcagttccagttcaagttcccggaagtgaacctgatatgtctcaatactggccaagattacagtaaaaaaaaaaaaaaaaaaaaaaaggaaaggaaatattgtgttaattcagtcagtgactatggggacacaacagttgagctttcaggaaagaaagaaaaatggctgttagagccgcttcagttctacaattgtgtcctgtattgtaccactggggaaggaatggacttgaaacaaggacctttgtatacagaaggcacgatatcagttggaacaaatcttcattttggtatccaaacttttattcattttggtgtattatttgtaaatgggcatttgtatgttataatgaaaaaaagaacaatgtagactggatggatgtttgatctgtgttggtcatgaagttgttttttttttttttaaaaagaaaaccatgatcaacaagctttgccacgaatttaagagttttatcaagatatatcgaatacttctacccatctgttcatagtttatggactgatgttccaagtttgtatcattcctttgcatataattaaacctggaacaacatgcactagatttatgtcagaaatatctgttggttttccaaaggttgttaacagatgaagtttatgtgcaaaaaagggtaagatataaattcaaggaagaaaaaaagttgatagctaaaaggtagagtgtgtcttcgatataatccaatttgttttatgtcaaaatgtaagtatttgtcttccctagaaatcctcagaatgatttctataataaagttaatttcatttatatttgacaagaatatagatgttttatacacattttcatgcaatcatacgtttcttttttggccagcaaaagttaattgttcttagatatagttgtattactgttcacggtccaatcattttgtgcatctagagttcattcctaatcaattaaaagtgcttgcaagagtttt

SEQ ID NO: 6480 - protein, 286 aa, Homo sapiens; identical to SEQ ID NO: 6444

SEQ ID NO: 6481 - DNA, 3749 bp, Homo sapiens
agtaggctccaaggagaagagaggagaggagaggagagctgaacagggagccacgtcttttcctgggagggctgctatctaagtcggggctgcaggttggagatttttaaggaagtggaaattggcaattggctttgtgtgtctgtggtttttggggagggggactacaaagaggggctaactccctctccctattctctaaggttggaccacagggatgaggttgtgagatacaaagataaaggagggatggggaacactatgatgtggtatttttcttttctgttttttctttttgataatatctatccttggctaaggggagggcggagttcagcggcggaaataaagcgagcagtggctggtgcgaaccgactcccggctctaagccttacttgcggtggccggacttgtctgtggctgaagccgagcccgggctctgactctcacgtctgcactggaggtgcggaaacctggactggggttcaccagccacatactggctgctctggttgttctctcctcttccttcttctattctaaccaaacaaaacccaactcgatgcttgtgccaggccttggccagtttggacggtgatggaaacatttctggattttagcgtctaagggagcactcaagggctgtaaggtttgctatcactgtcccaacactgcagagaccttgaaggttcagtgtgggatctgtagaacccatggtttgcggtgacactcagaggggatctttgggagatttatagagccggttcttagcgctttgtgggttcagaggctggctgcagtgtttatgaagaggggcagtgggctggggacactgctggggttatggctgtagtgaggtccatgtgtacttgttccttggcatgtgtctgactctgtgttgctgctgcagtacagtgggcaggggcacggttgcttggactgggctgcccgatgtctggcatggctggtggtcctgttgtcctttatttgatcgatagcagggaactgaccgccgaggttggcacaggttggcagggggatgaggatgcattgtggttgtctcctcctcctctccttcttcctcttccccttcctcctctcctttctgttcttgttctccctcatcttcctcttccttcttctccctcttcttcctcttcactctgctctcttctcttcttttcccctttcctctcctctccctttcctcaggtcacagcggagtgaatcagctcggtggtgtctttgtcaacgggcggccactgccggactccacccggcagaagattgtagagctagctcacagcggggcccggccgtgcgacatttcccgaattctgcagacccatgcagatgcaaaagtccaagtgctggacaatcaaaacgtgtccaacggatgtgtgagtaaaattctgggcaggtattacgagactggctccatcagacccagggcaatcggtggtagtaaaccgagagtagcgactccagaagttgtaagcaaaatagcccagtataagcgggagtgcccgtccatctttgcttgggaaatccgagacagattactgtccgagggggtctgtaccaacgataacataccaagcgtaagttcattgagaacatctgccctccctgccctaagcccaatgctctctcctctttacctcctcccaccctctctctccactgtctcttagtctgtgtcctctccctgctccacatttgtctcctttgtacctgggggaacagagaggaatgccctgacttttctttgactgtctggaaaatgggagtcaagtgtggggagtcattcacttcatttgcatgctgcaaaacagagggcggaggcaccagggaaaggcacttgaatgaagaaggaaaatgagaaccagattgtaacttcgtcctaatccacctgccagaactttccttcaggtgtcatcaataaacagagttcttcgcaacctggctagcgaaaagcaacagatgggcgcagacggcatgtatgataaactaaggatgttgaacgggcagaccggaagctggggcacccgccctggttggtatccggggacttcggtgccagggcaacctacgcaagatggctgccagcaacaggaaggagggggagagaataccaactccatcagttccaacggagaagattcagatgaggctcaaatgcgacttcagctgaagcggaagctgcaaagaaatagaacatcctttacccaagagcaaattgaggccctggagaaagagtttgagagaacccattatccagatgtgtttgcccgagaaagactagcagccaaaatagatctacctgaagcaagaatacaggtatggttttctaatcgaagggccaaatggagaagagaagaaaaactgaggaatcagagaagacaggccagcaacacacctagtcatattcctatcagcagtagtttcagcaccagtgtctaccaaccaattccacaacccaccacaccggtttcctccttcacatctggctccatgttgggccgaacagacacagccctcacaaacacctacagcgctctgccgcctatgcccagcttcaccatggcaaataacctgcctatgcaacccccagtccccagccagacctcctcatactcctgcatgctgcccaccagcccttcggtgaatgggcggagttatgatacctacacccccccacatatgcagacacacatgaacagtcagccaatgggcacctcgggcaccacttcaacaggactcatttcccctggtgtgtcagttccagttcaagttcccggaagtgaacctgatatgtctcaatactggccaagattacagtaaaaaaaaaaaaaaaaaaaaaaaggaaaggaaatattgtgttaattcagtcagtgactatggggacacaacagttgagctttcaggaaagaaagaaaaatggctgttagagccgcttcagttctacaattgtgtcctgtattgtaccactggggaaggaatggacttgaaacaaggacctttgtatacagaaggcacgatatcagttggaacaaatcttcattttggtatccaaacttttattcattttggtgtattatttgtaaatgggcatttgtatgttataatgaaaaaaagaacaatgtagactggatggatgtttgatctgtgttggtcatgaagttgttttttttttttttaaaaagaaaaccatgatcaacaagctttgccacgaatttaagagttttatcaagatatatcgaatacttctacccatctgttcatagtttatggactgatgttccaagtttgtatcattcctttgcatataattaaacctggaacaacatgcactagatttatgtcagaaatatctgttggttttccaaaggttgttaacagatgaagtttatgtgcaaaaaagggtaagatataaattcaaggaagaaaaaaagttgatagctaaaaggtagagtgtgtcttcgatataatccaatttgttttatgtcaaaatgtaagtatttgtcttccctagaaatcctcagaatgatttctataataaagttaatttcatttatatttgacaagaatatagatgttttatacacattttcatgcaatcatacgtttcttttttggccagcaaaagttaattgttcttagatatagttgtattactgttcacggtccaatcattttgtgcatctagagttcattcctaatcaattaaaagtgcttgcaagagtttt

SEQ ID NO: 6482 - protein, 286 aa, Homo sapiens; identical to SEQ ID NO: 6444

SEQ ID NO: 6483 - DNA, 1284 bp, Homo sapiens
cgaaccacacaggcttaaggagggtccccagcaccttatccatctgttttggaaacgccggtcgccccctggtgcttccggggctggtcacagcggagtgaatcagctcggtggtgtctttgtcaacgggcggccactgccggactccacccggcagaagattgtagagctagctcacagcggggcccggccgtgcgacatttcccgaattctgcagacccatgcagatgcaaaagtccaagtgctggacaatcaaaacgtgtccaacggatgtgtgagtaaaattctgggcaggtattacgagactggtgtgtcagttccagttcaagttcccggaagtgaacctgatatgtctcaatactggccaagattacagtaaaaaaaaaaaaaaaaaaaaaaaggaaaggaaatattgtgttaattcagtcagtgactatggggacacaacagttgagctttcaggaaagaaagaaaaatggctgttagagccgcttcagttctacaattgtgtcctgtattgtaccactggggaaggaatggacttgaaacaaggacctttgtatacagaaggcacgatatcagttggaacaaatcttcattttggtatccaaacttttattcattttggtgtattatttgtaaatgggcatttgtatgttataatgaaaaaaagaacaatgtagactggatggatgtttgatctgtgttggtcatgaagttgttttttttttttttaaaaagaaaaccatgatcaacaagctttgccacgaatttaagagttttatcaagatatatcgaatacttctacccatctgttcatagtttatggactgatgttccaagtttgtatcattcctttgcatataattaaacctggaacaacatgcactagatttatgtcagaaatatctgttggttttccaaaggttgttaacagatgaagtttatgtgcaaaaaagggtaagatataaattcaaggaagaaaaaaagttgatagctaaaaggtagagtgtgtcttcgatataatccaatttgttttatgtcaaaatgtaagtatttgtcttccctagaaatcctcagaatgatttctataataaagttaatttcatttatatttgacaagaatatagatgttttatacacattttcatgcaatcatacgtttcttttttggccagcaaaagttaattgttcttagatatagttgtattactgttcacggtccaatcattttgtgcatctagagttcattcctaatcaattaaaagtgcttgcaagagtttt

SEQ ID NO: 6484 - protein, 74 aa, Homo sapiens; identical to SEQ ID NO: 6448

SEQ ID NO: 6485 - DNA, 3066 bp, Homo sapiens
ctacttccagcgaaagcccgcgtcggagggcgactgccggcgagcgggagcggcgcagggctcggggcgggcggccagctcagccccagcgccagcgccagcgccagcgcgggctgagctcgcgggaagaagggagactccaggcgcgacagcagccgcggctcctagccccagcgtcgcccaatgctcccgacccgcgggaaaagacgaagaggctctgtggtgcccaaggccctggaacggccgcagagagcaaccgctgccggctgctttgtccagcccgaggcccagcgaacgcgcagagagcgggcgctccgaggactcgccgagggagcgccgagggaacctgctcgccgcgtctccgcccgcccgccggccctcgggctttgtgccgcactgggctccggcgcagaagagtcagccggcactcgagcgccgaggggggcaccgcgcccgccaccagcccgagtggagtcagtcggcaaggcagccgcacgctggaggtagagggaagagcgagctagcgcgagccgggaaggaagccaccaggccaaggcggtggaacgcgcgctccgagggagctcagagccgagcgggaggactgtcagcttccacccagcccccgggctcttgcccccaactccactggagcgctgagctcggaacttgaaaactctctgctccccaggcttcccccgactctcatctcccttgccttgcggaggctggggctcttccctgttctccggccccctgcgcttgggggaagactttaactaggggcgcgcagatgtgtgaggccttttattgtgagagtggacagacatccgagatttcaggcaaccccatattcgagccccgtggaatcccgcggcccccagccagagccagcatgcagaacagtcacagcggagtgaatcagctcggtggtgtctttgtcaacgggcggccactgccggactccacccggcagaagattgtagagctagctcacagcggggcccggccgtgcgacatttcccgaattctgcaggtgtccaacggatgtgtgagtaaaattctgggcaggtattacgagactggctccatcagacccagggcaatcggtggtagtaaaccgagagtagcgactccagaagttgtaagcaaaatagcccagtataagcgggagtgcccgtccatctttgcttgggaaatccgagacagattactgtccgagggggtctgtaccaacgataacataccaagcgtgtcatcaataaacagagttcttcgcaacctggctagcgaaaagcaacagatgggcgcagacggcatgtatgataaactaaggatgttgaacgggcagaccggaagctggggcacccgccctggttggtatccggggacttcggtgccagggcaacctacgcaagatggctgccagcaacaggaaggagggggagagaataccaactccatcagttccaacggagaagattcagatgaggctcaaatgcgacttcagctgaagcggaagctgcaaagaaatagaacatcctttacccaagagcaaattgaggccctggagaaagagtttgagagaacccattatccagatgtgtttgcccgagaaagactagcagccaaaatagatctacctgaagcaagaatacaggtatggttttctaatcgaagggccaaatggagaagagaagaaaaactgaggaatcagagaagacaggccagcaacacacctagtcatattcctatcagcagtagtttcagcaccagtgtctaccaaccaattccacaacccaccacaccggtttcctccttcacatctggctccatgttgggccgaacagacacagccctcacaaacacctacagcgctctgccgcctatgcccagcttcaccatggcaaataacctgcctatgcaacccccagtccccagccagacctcctcatactcctgcatgctgcccaccagcccttcggtgaatgggcggagttatgatacctacacccccccacatatgcagacacacatgaacagtcagccaatgggcacctcgggcaccacttcaacaggactcatttcccctggtgtgtcagttccagttcaagttcccggaagtgaacctgatatgtctcaatactggccaagattacagtaaaaaaaaaaaaaaaaaaaaaaaggaaaggaaatattgtgttaattcagtcagtgactatggggacacaacagttgagctttcaggaaagaaagaaaaatggctgttagagccgcttcagttctacaattgtgtcctgtattgtaccactggggaaggaatggacttgaaacaaggacctttgtatacagaaggcacgatatcagttggaacaaatcttcattttggtatccaaacttttattcattttggtgtattatttgtaaatgggcatttgtatgttataatgaaaaaaagaacaatgtagactggatggatgtttgatctgtgttggtcatgaagttgttttttttttttttaaaaagaaaaccatgatcaacaagctttgccacgaatttaagagttttatcaagatatatcgaatacttctacccatctgttcatagtttatggactgatgttccaagtttgtatcattcctttgcatataattaaacctggaacaacatgcactagatttatgtcagaaatatctgttggttttccaaaggttgttaacagatgaagtttatgtgcaaaaaagggtaagatataaattcaaggaagaaaaaaagttgatagctaaaaggtagagtgtgtcttcgatataatccaatttgttttatgtcaaaatgtaagtatttgtcttccctagaaatcctcagaatgatttctataataaagttaatttcatttatatttgacaagaatatagatgttttatacacattttcatgcaatcatacgtttcttttttggccagcaaaagttaattgttcttagatatagttgtattactgttcacggtccaatcattttgtgcatctagagttcattcctaatcaattaaaagtgcttgcaagagtttt

SEQ ID NO: 6486 - protein, 456 aa, Homo sapiens [sequence omitted]

SEQ ID NO: 6487 - DNA, 2611 bp, Homo sapiens
ggtgcatttgcatgttgcggagtgattagtgggtttgaaaagggaaccgtggctcggcctcatttcccgctctggttcaggcgcaggaggaagtgttttgctggaggatgatgacagaggaatctgagaattgctctcacacaccaacccagcaacatccgtggagaaaactctcaccagcaactcctttaaaacaccgtcatttcaaaccattgtggtcttcaagcaacaacagcagcacaaaaaaccccaaccaaacaaaactcttgacagaagctgtgacaaccagaaaggatgcctcataaagggggaagactttaactaggggcgcgcagatgtgtgaggccttttattgtgagagtggacagacatccgagatttcaggcaaccccatattcgagccccgtggaatcccgcggcccccagccagagccagcatgcagaacagtcacagcggagtgaatcagctcggtggtgtctttgtcaacgggcggccactgccggactccacccggcagaagattgtagagctagctcacagcggggcccggccgtgcgacatttcccgaattctgcaggtgtccaacggatgtgtgagtaaaattctgggcaggtattacgagactggctccatcagacccagggcaatcggtggtagtaaaccgagagtagcgactccagaagttgtaagcaaaatagcccagtataagcgggagtgcccgtccatctttgcttgggaaatccgagacagattactgtccgagggggtctgtaccaacgataacataccaagcgtgtcatcaataaacagagttcttcgcaacctggctagcgaaaagcaacagatgggcgcagacggcatgtatgataaactaaggatgttgaacgggcagaccggaagctggggcacccgccctggttggtatccggggacttcggtgccagggcaacctacgcaagatggctgccagcaacaggaaggagggggagagaataccaactccatcagttccaacggagaagattcagatgaggctcaaatgcgacttcagctgaagcggaagctgcaaagaaatagaacatcctttacccaagagcaaattgaggccctggagaaagagtttgagagaacccattatccagatgtgtttgcccgagaaagactagcagccaaaatagatctacctgaagcaagaatacaggtatggttttctaatcgaagggccaaatggagaagagaagaaaaactgaggaatcagagaagacaggccagcaacacacctagtcatattcctatcagcagtagtttcagcaccagtgtctaccaaccaattccacaacccaccacaccggtttcctccttcacatctggctccatgttgggccgaacagacacagccctcacaaacacctacagcgctctgccgcctatgcccagcttcaccatggcaaataacctgcctatgcaacccccagtccccagccagacctcctcatactcctgcatgctgcccaccagcccttcggtgaatgggcggagttatgatacctacacccccccacatatgcagacacacatgaacagtcagccaatgggcacctcgggcaccacttcaacaggactcatttcccctggtgtgtcagttccagttcaagttcccggaagtgaacctgatatgtctcaatactggccaagattacagtaaaaaaaaaaaaaaaaaaaaaaaggaaaggaaatattgtgttaattcagtcagtgactatggggacacaacagttgagctttcaggaaagaaagaaaaatggctgttagagccgcttcagttctacaattgtgtcctgtattgtaccactggggaaggaatggacttgaaacaaggacctttgtatacagaaggcacgatatcagttggaacaaatcttcattttggtatccaaacttttattcattttggtgtattatttgtaaatgggcatttgtatgttataatgaaaaaaagaacaatgtagactggatggatgtttgatctgtgttggtcatgaagttgttttttttttttttaaaaagaaaaccatgatcaacaagctttgccacgaatttaagagttttatcaagatatatcgaatacttctacccatctgttcatagtttatggactgatgttccaagtttgtatcattcctttgcatataattaaacctggaacaacatgcactagatttatgtcagaaatatctgttggttttccaaaggttgttaacagatgaagtttatgtgcaaaaaagggtaagatataaattcaaggaagaaaaaaagttgatagctaaaaggtagagtgtgtcttcgatataatccaatttgttttatgtcaaaatgtaagtatttgtcttccctagaaatcctcagaatgatttctataataaagttaatttcatttatatttgacaagaatatagatgttttatacacattttcatgcaatcatacgtttcttttttggccagcaaaagttaattgttcttagatatagttgtattactgttcacggtccaatcattttgtgcatctagagttcattcctaatcaattaaaagtgcttgcaagagtttt

SEQ ID NO: 6488 - protein, 456 aa, Homo sapiens [sequence omitted]

SEQ ID NO: 6489 - DNA, 2653 bp, Homo sapiens
ggtgcatttgcatgttgcggagtgattagtgggtttgaaaagggaaccgtggctcggcctcatttcccgctctggttcaggcgcaggaggaagtgttttgctggaggatgatgacagaggaatctgagaattgctctcacacaccaacccagcaacatccgtggagaaaactctcaccagcaactcctttaaaacaccgtcatttcaaaccattgtggtcttcaagcaacaacagcagcacaaaaaaccccaaccaaacaaaactcttgacagaagctgtgacaaccagaaaggatgcctcataaagggggaagactttaactaggggcgcgcagatgtgtgaggccttttattgtgagagtggacagacatccgagatttcaggcaaccccatattcgagccccgtggaatcccgcggcccccagccagagccagcatgcagaacagtcacagcggagtgaatcagctcggtggtgtctttgtcaacgggcggccactgccggactccacccggcagaagattgtagagctagctcacagcggggcccggccgtgcgacatttcccgaattctgcagacccatgcagatgcaaaagtccaagtgctggacaatcaaaacgtgtccaacggatgtgtgagtaaaattctgggcaggtattacgagactggctccatcagacccagggcaatcggtggtagtaaaccgagagtagcgactccagaagttgtaagcaaaatagcccagtataagcgggagtgcccgtccatctttgcttgggaaatccgagacagattactgtccgagggggtctgtaccaacgataacataccaagcgtgtcatcaataaacagagttcttcgcaacctggctagcgaaaagcaacagatgggcgcagacggcatgtatgataaactaaggatgttgaacgggcagaccggaagctggggcacccgccctggttggtatccggggacttcggtgccagggcaacctacgcaagatggctgccagcaacaggaaggagggggagagaataccaactccatcagttccaacggagaagattcagatgaggctcaaatgcgacttcagctgaagcggaagctgcaaagaaatagaacatcctttacccaagagcaaattgaggccctggagaaagagtttgagagaacccattatccagatgtgtttgcccgagaaagactagcagccaaaatagatctacctgaagcaagaatacaggtatggttttctaatcgaagggccaaatggagaagagaagaaaaactgaggaatcagagaagacaggccagcaacacacctagtcatattcctatcagcagtagtttcagcaccagtgtctaccaaccaattccacaacccaccacaccggtttcctccttcacatctggctccatgttgggccgaacagacacagccctcacaaacacctacagcgctctgccgcctatgcccagcttcaccatggcaaataacctgcctatgcaacccccagtccccagccagacctcctcatactcctgcatgctgcccaccagcccttcggtgaatgggcggagttatgatacctacacccccccacatatgcagacacacatgaacagtcagccaatgggcacctcgggcaccacttcaacaggactcatttcccctggtgtgtcagttccagttcaagttcccggaagtgaacctgatatgtctcaatactggccaagattacagtaaaaaaaaaaaaaaaaaaaaaaaggaaaggaaatattgtgttaattcagtcagtgactatggggacacaacagttgagctttcaggaaagaaagaaaaatggctgttagagccgcttcagttctacaattgtgtcctgtattgtaccactggggaaggaatggacttgaaacaaggacctttgtatacagaaggcacgatatcagttggaacaaatcttcattttggtatccaaacttttattcattttggtgtattatttgtaaatgggcatttgtatgttataatgaaaaaaagaacaatgtagactggatggatgtttgatctgtgttggtcatgaagttgttttttttttttttaaaaagaaaaccatgatcaacaagctttgccacgaatttaagagttttatcaagatatatcgaatacttctacccatctgttcatagtttatggactgatgttccaagtttgtatcattcctttgcatataattaaacctggaacaacatgcactagatttatgtcagaaatatctgttggttttccaaaggttgttaacagatgaagtttatgtgcaaaaaagggtaagatataaattcaaggaagaaaaaaagttgatagctaaaaggtagagtgtgtcttcgatataatccaatttgttttatgtcaaaatgtaagtatttgtcttccctagaaatcctcagaatgatttctataataaagttaatttcatttatatttgacaagaatatagatgttttatacacattttcatgcaatcatacgtttcttttttggccagcaaaagttaattgttcttagatatagttgtattactgttcacggtccaatcattttgtgcatctagagttcattcctaatcaattaaaagtgcttgcaagagtttt

SEQ ID NO: 6490 - protein, 470 aa, Homo sapiens [sequence omitted]

SEQ ID NO: 6491 - DNA, 3097 bp, Homo sapiens
tgcaccctccgaggactgggagtcccgagtccagcttagggggagtgggggcgcgacccccaacccagaaaccttcacttgaccgctcaagttcgcggcagcagggcgggccgcgccgaatctcggcgtgcgcggagcggggagatgcaggcgagcgccagagcccgggctcgggggccctgcgccggggagaggagccgggacccaccggcggagccgaaaacaagtgtattcatattcaaacaaacggaccaattgcaccaggcggggagagggagcatccaatcggctggcgcgaggccccggcgctgctttgcataaagcaatattttgtgtgagagcgagcggtgcatttgcatgttgcggagtgattagtgggtttgaaaagggaaccgtggctcggcctcatttcccgctctggttcaggcgcaggaggaagtgttttgctggaggatgatgacagaggtcaggcttcgctaatgggccagtgaggagcggtggaggcgaggccgggcgccggcacacacacattaacacacttgagccatcaccaatcagcataggaatctgagaattgctctcacacaccaacccagcaacatccgtggagaaaactctcaccagcaactcctttaaaacaccgtcatttcaaaccattgtggtcttcaagcaacaacagcagcacaaaaaaccccaaccaaacaaaactcttgacagaagctgtgacaaccagaaaggatgcctcataaagggggaagactttaactaggggcgcgcagatgtgtgaggccttttattgtgagagtggacagacatccgagatttcaggcaaccccatattcgagccccgtggaatcccgcggcccccagccagagccagcatgcagaacagtcacagcggagtgaatcagctcggtggtgtctttgtcaacgggcggccactgccggactccacccggcagaagattgtagagctagctcacagcggggcccggccgtgcgacatttcccgaattctgcagacccatgcagatgcaaaagtccaagtgctggacaatcaaaacgtgtccaacggatgtgtgagtaaaattctgggcaggtattacgagactggctccatcagacccagggcaatcggtggtagtaaaccgagagtagcgactccagaagttgtaagcaaaatagcccagtataagcgggagtgcccgtccatctttgcttgggaaatccgagacagattactgtccgagggggtctgtaccaacgataacataccaagcgtgtcatcaataaacagagttcttcgcaacctggctagcgaaaagcaacagatgggcgcagacggcatgtatgataaactaaggatgttgaacgggcagaccggaagctggggcacccgccctggttggtatccggggacttcggtgccagggcaacctacgcaagatggctgccagcaacaggaaggagggggagagaataccaactccatcagttccaacggagaagattcagatgaggctcaaatgcgacttcagctgaagcggaagctgcaaagaaatagaacatcctttacccaagagcaaattgaggccctggagaaagagtttgagagaacccattatccagatgtgtttgcccgagaaagactagcagccaaaatagatctacctgaagcaagaatacaggtatggttttctaatcgaagggccaaatggagaagagaagaaaaactgaggaatcagagaagacaggccagcaacacacctagtcatattcctatcagcagtagtttcagcaccagtgtctaccaaccaattccacaacccaccacaccggtttcctccttcacatctggctccatgttgggccgaacagacacagccctcacaaacacctacagcgctctgccgcctatgcccagcttcaccatggcaaataacctgcctatgcaacccccagtccccagccagacctcctcatactcctgcatgctgcccaccagcccttcggtgaatgggcggagttatgatacctacacccccccacatatgcagacacacatgaacagtcagccaatgggcacctcgggcaccacttcaacaggactcatttcccctggtgtgtcagttccagttcaagttcccggaagtgaacctgatatgtctcaatactggccaagattacagtaaaaaaaaaaaaaaaaaaaaaaaggaaaggaaatattgtgttaattcagtcagtgactatggggacacaacagttgagctttcaggaaagaaagaaaaatggctgttagagccgcttcagttctacaattgtgtcctgtattgtaccactggggaaggaatggacttgaaacaaggacctttgtatacagaaggcacgatatcagttggaacaaatcttcattttggtatccaaacttttattcattttggtgtattatttgtaaatgggcatttgtatgttataatgaaaaaaagaacaatgtagactggatggatgtttgatctgtgttggtcatgaagttgttttttttttttttaaaaagaaaaccatgatcaacaagctttgccacgaatttaagagttttatcaagatatatcgaatacttctacccatctgttcatagtttatggactgatgttccaagtttgtatcattcctttgcatataattaaacctggaacaacatgcactagatttatgtcagaaatatctgttggttttccaaaggttgttaacagatgaagtttatgtgcaaaaaagggtaagatataaattcaaggaagaaaaaaagttgatagctaaaaggtagagtgtgtcttcgatataatccaatttgttttatgtcaaaatgtaagtatttgtcttccctagaaatcctcagaatgatttctataataaagttaatttcatttatatttgacaagaatatagatgttttatacacattttcatgcaatcatacgtttcttttttggccagcaaaagttaattgttcttagatatagttgtattactgttcacggtccaatcattttgtgcatctagagttcattcctaatcaattaaaagtgcttgcaagagtttt

SEQ ID NO: 6492 - protein, 470 aa, Homo sapiens [sequence omitted]

SEQ ID NO: 6493 - DNA, 3055 bp, Homo sapiens
tgcaccctccgaggactgggagtcccgagtccagcttagggggagtgggggcgcgacccccaacccagaaaccttcacttgaccgctcaagttcgcggcagcagggcgggccgcgccgaatctcggcgtgcgcggagcggggagatgcaggcgagcgccagagcccgggctcgggggccctgcgccggggagaggagccgggacccaccggcggagccgaaaacaagtgtattcatattcaaacaaacggaccaattgcaccaggcggggagagggagcatccaatcggctggcgcgaggccccggcgctgctttgcataaagcaatattttgtgtgagagcgagcggtgcatttgcatgttgcggagtgattagtgggtttgaaaagggaaccgtggctcggcctcatttcccgctctggttcaggcgcaggaggaagtgttttgctggaggatgatgacagaggtcaggcttcgctaatgggccagtgaggagcggtggaggcgaggccgggcgccggcacacacacattaacacacttgagccatcaccaatcagcataggaatctgagaattgctctcacacaccaacccagcaacatccgtggagaaaactctcaccagcaactcctttaaaacaccgtcatttcaaaccattgtggtcttcaagcaacaacagcagcacaaaaaaccccaaccaaacaaaactcttgacagaagctgtgacaaccagaaaggatgcctcataaagggggaagactttaactaggggcgcgcagatgtgtgaggccttttattgtgagagtggacagacatccgagatttcaggcaaccccatattcgagccccgtggaatcccgcggcccccagccagagccagcatgcagaacagtcacagcggagtgaatcagctcggtggtgtctttgtcaacgggcggccactgccggactccacccggcagaagattgtagagctagctcacagcggggcccggccgtgcgacatttcccgaattctgcaggtgtccaacggatgtgtgagtaaaattctgggcaggtattacgagactggctccatcagacccagggcaatcggtggtagtaaaccgagagtagcgactccagaagttgtaagcaaaatagcccagtataagcgggagtgcccgtccatctttgcttgggaaatccgagacagattactgtccgagggggtctgtaccaacgataacataccaagcgtgtcatcaataaacagagttcttcgcaacctggctagcgaaaagcaacagatgggcgcagacggcatgtatgataaactaaggatgttgaacgggcagaccggaagctggggcacccgccctggttggtatccggggacttcggtgccagggcaacctacgcaagatggctgccagcaacaggaaggagggggagagaataccaactccatcagttccaacggagaagattcagatgaggctcaaatgcgacttcagctgaagcggaagctgcaaagaaatagaacatcctttacccaagagcaaattgaggccctggagaaagagtttgagagaacccattatccagatgtgtttgcccgagaaagactagcagccaaaatagatctacctgaagcaagaatacaggtatggttttctaatcgaagggccaaatggagaagagaagaaaaactgaggaatcagagaagacaggccagcaacacacctagtcatattcctatcagcagtagtttcagcaccagtgtctaccaaccaattccacaacccaccacaccggtttcctccttcacatctggctccatgttgggccgaacagacacagccctcacaaacacctacagcgctctgccgcctatgcccagcttcaccatggcaaataacctgcctatgcaacccccagtccccagccagacctcctcatactcctgcatgctgcccaccagcccttcggtgaatgggcggagttatgatacctacacccccccacatatgcagacacacatgaacagtcagccaatgggcacctcgggcaccacttcaacaggactcatttcccctggtgtgtcagttccagttcaagttcccggaagtgaacctgatatgtctcaatactggccaagattacagtaaaaaaaaaaaaaaaaaaaaaaaggaaaggaaatattgtgttaattcagtcagtgactatggggacacaacagttgagctttcaggaaagaaagaaaaatggctgttagagccgcttcagttctacaattgtgtcctgtattgtaccactggggaaggaatggacttgaaacaaggacctttgtatacagaaggcacgatatcagttggaacaaatcttcattttggtatccaaacttttattcattttggtgtattatttgtaaatgggcatttgtatgttataatgaaaaaaagaacaatgtagactggatggatgtttgatctgtgttggtcatgaagttgttttttttttttttaaaaagaaaaccatgatcaacaagctttgccacgaatttaagagttttatcaagatatatcgaatacttctacccatctgttcatagtttatggactgatgttccaagtttgtatcattcctttgcatataattaaacctggaacaacatgcactagatttatgtcagaaatatctgttggttttccaaaggttgttaacagatgaagtttatgtgcaaaaaagggtaagatataaattcaaggaagaaaaaaagttgatagctaaaaggtagagtgtgtcttcgatataatccaatttgttttatgtcaaaatgtaagtatttgtcttccctagaaatcctcagaatgatttctataataaagttaatttcatttatatttgacaagaatatagatgttttatacacattttcatgcaatcatacgtttcttttttggccagcaaaagttaattgttcttagatatagttgtattactgttcacggtccaatcattttgtgcatctagagttcattcctaatcaattaaaagtgcttgcaagagtttt

SEQ ID NO: 6494 - protein, 456 aa, Homo sapiens [sequence omitted]

SEQ ID NO: 6495 - DNA, 1996 bp, Homo sapiens
gagaaaactactctttgaattttggagtgggtgagcccgattgtctatccatttattcattctcttgaccaaaatcatcattttacaaatggtgggtgtcttcctctggaccttctctgatatgcttccctctctgagcatatggattttggaaattaaacatttctccagtttgcagagaagagaaatgatagtatactgtactatcatctgacctgcttgttcccgacacacttcttttaattcatcccaagtttgctgccatggcatagtaccatgagagctcatgaggcgttttgttaggagaaaggtttacctcctcagtgctgccattccgaacagttcgagggtagcaacagttttctagttataagtcagtctgggcttttgggtctgttaggaagtcatggttaattctcaggatggaggtcgttatatttactaacacttctgatcactttaacttggggtcattacagatctgcttcttcaaagaatctttaatcccatcagtgaaaggttcccaaggtccctgaaccatactttactgagagctcctcccactgctctctgtcccaaagcttgagatatgggctctgggggtcatagggttcccaaataaatccagatttgcagggagaggggatgtgttttgatgaaggtcctcatgctataggttcttcaaagatgctagcagaggttagagacaaaaatcctattaatttatggatagtggcaaccatctagctggacagttgtcagaacctaaagtgctttagaggcttgatacataggcagctttcttctagctgtggccagtggaaggactagctcgaggcccaatcttagatttatcatatggaattccagtacttcacgtgaaggcatctttaatgatcagacttgttggcagagttcctcgggaggagggagcctggggctgtggctgtgtgatgtgttcctcagtaaccacaggtttgcctctctcctcacagcccccagtccccagccagacctcctcatactcctgcatgctgcccaccagcccttcggtgaatgggcggagttatgatacctacacccccccacatatgcagacacacatgaacagtcagccaatgggcacctcgggcaccacttcaacaggactcatttcccctggtgtgtcagttccagttcaagttcccggaagtgaacctgatatgtctcaatactggccaagattacagtaaaaaaaaaaaaaaaaaaaaaaaggaaaggaaatattgtgttaattcagtcagtgactatggggacacaacagttgagctttcaggaaagaaagaaaaatggctgttagagccgcttcagttctacaattgtgtcctgtattgtaccactggggaaggaatggacttgaaacaaggacctttgtatacagaaggcacgatatcagttggaacaaatcttcattttggtatccaaacttttattcattttggtgtattatttgtaaatgggcatttgtatgttataatgaaaaaaagaacaatgtagactggatggatgtttgatctgtgttggtcatgaagttgttttttttttttttaaaaagaaaaccatgatcaacaagctttgccacgaatttaagagttttatcaagatatatcgaatacttctacccatctgttcatagtttatggactgatgttccaagtttgtatcattcctttgcatataattaaacctggaacaacatgcactagatttatgtcagaaatatctgttggttttccaaaggttgttaacagatgaagtttatgtgcaaaaaagggtaagatataaattcaaggaagaaaaaaagttgatagctaaaaggtagagtgtgtcttcgatataatccaatttgttttatgtcaaaatgtaagtatttgtcttccctagaaatcctcagaatgatttctataataaagttaatttcatttatatttgacaagaatatagatgttttatacac

SEQ ID NO: 6496 - protein, 112 aa, Homo sapiens; identical to SEQ ID NO: 6442

SEQ ID NO: 6497 - DNA, 3340 bp, Homo sapiens
ggaaacatttctggattttagcgtctaagggagcactcaagggctgtaaggtttgctatcactgtcccaacactgcagagaccttgaaggttcagtgtgggatctgtagaacccatggtttgcggtgacactcagaggggatctttgggagatttatagagccggttcttagcgctttgtgggttcagaggctggctgcagtgtttatgaagaggggcagtgggctggggacactgctggggttatggctgtagtgaggtccatgtgtacttgttccttggcatgtgtctgactctgtgttgctgctgcagtacagtgggcaggggcacggttgcttggactgggctgcccgatgtctggcatggctggtggtcctgttgtcctttatttgatcgatagcagggaactgaccgccgaggttggcacaggttggcagggggatgaggatgcattgtggttgtctcctcctcctctccttcttcctcttccccttcctcctctcctttctgttcttgttctccctcatcttcctcttccttcttctccctcttcttcctcttcactctgctctcttctcttcttttcccctttcctctcctctccctttcctcaggtcacagcggagtgaatcagctcggtggtgtctttgtcaacgggcggccactgccggactccacccggcagaagattgtagagctagctcacagcggggcccggccgtgcgacatttcccgaattctgcaggtgtccaacggatgtgtgagtaaaattctgggcaggtattacgagactggctccatcagacccagggcaatcggtggtagtaaaccgagagtagcgactccagaagttgtaagcaaaatagcccagtataagcgggagtgcccgtccatctttgcttgggaaatccgagacagattactgtccgagggggtctgtaccaacgataacataccaagcgtaagttcattgagaacatctgccctccctgccctaagcccaatgctctctcctctttacctcctcccaccctctctctccactgtctcttagtctgtgtcctctccctgctccacatttgtctcctttgtacctgggggaacagagaggaatgccctgacttttctttgactgtctggaaaatgggagtcaagtgtggggagtcattcacttcatttgcatgctgcaaaacagagggcggaggcaccagggaaaggcacttgaatgaagaaggaaaatgagaaccagattgtaacttcgtcctaatccacctgccagaactttccttcaggtgtcacacatccatttccatcctaatattaaacaatataatgaaagaaagctttacaacaagtctaaatagtttttattttcgggcagtcttttaacaaagcaaagcaaccgtgtgagttaggtcaccagagacaccaagcaatggtgaaggaccccctccgcccaattctctatccaactaaatttccatgcccaaagtgatagctatcattttttccacggtgtatctgcaaatccacccactgtcccggggtggctgggagctttttaacgggttgagagttgctttttaaggttgtgggtgagctgagatgggtgactgtgtcttcaggagacactaccatttggtttgattttggtttgatttgcaggtgtcatcaataaacagagttcttcgcaacctggctagcgaaaagcaacagatgggcgcagacggcatgtatgataaactaaggatgttgaacgggcagaccggaagctggggcacccgccctggttggtatccggggacttcggtgccagggcaacctacgcaagatggctgccagcaacaggaaggagggggagagaataccaactccatcagttccaacggagaagattcagatgaggctcaaatgcgacttcagctgaagcggaagctgcaaagaaatagaacatcctttacccaagagcaaattgaggccctggagaaagagtttgagagaacccattatccagatgtgtttgcccgagaaagactagcagccaaaatagatctacctgaagcaagaatacaggtatggttttctaatcgaagggccaaatggagaagagaagaaaaactgaggaatcagagaagacaggccagcaacacacctagtcatattcctatcagcagtagtttcagcaccagtgtctaccaaccaattccacaacccaccacaccggtttcctccttcacatctggctccatgttgggccgaacagacacagccctcacaaacacctacagcgctctgccgcctatgcccagcttcaccatggcaaataacctgcctatgcaacccccagtccccagccagacctcctcatactcctgcatgctgcccaccagcccttcggtgaatgggcggagttatgatacctacacccccccacatatgcagacacacatgaacagtcagccaatgggcacctcgggcaccacttcaacaggactcatttcccctggtgtgtcagttccagttcaagttcccggaagtgaacctgatatgtctcaatactggccaagattacagtaaaaaaaaaaaaaaaaaaaaaaaggaaaggaaatattgtgttaattcagtcagtgactatggggacacaacagttgagctttcaggaaagaaagaaaaatggctgttagagccgcttcagttctacaattgtgtcctgtattgtaccactggggaaggaatggacttgaaacaaggacctttgtatacagaaggcacgatatcagttggaacaaatcttcattttggtatccaaacttttattcattttggtgtattatttgtaaatgggcatttgtatgttataatgaaaaaaagaacaatgtagactggatggatgtttgatctgtgttggtcatgaagttgttttttttttttttaaaaagaaaaccatgatcaacaagctttgccacgaatttaagagttttatcaagatatatcgaatacttctacccatctgttcatagtttatggactgatgttccaagtttgtatcattcctttgcatataattaaacctggaacaacatgcactagatttatgtcagaaatatctgttggttttccaaaggttgttaacagatgaagtttatgtgcaaaaaagggtaagatataaattcaaggaagaaaaaaagttgatagctaaaaggtagagtgtgtcttcgatataatccaatttgttttatgtcaaaatgtaagtatttgtcttccctagaaatcctcagaatgatttctataataaagttaatttcatttatatttgacaagaatatagatgttttatacac

SEQ ID NO: 6498 - protein, 286 aa, Homo sapiens; identical to SEQ ID NO: 6444

SEQ ID NO: 6499 - DNA, 3608 bp, Homo sapiens
agtaggctccaaggagaagagaggagaggagaggagagctgaacagggagccacgtcttttcctgggagggctgctatctaagtcggggctgcaggttggagatttttaaggaagtggaaattggcaattggctttgtgtgtctgtggtttttggggagggggactacaaagaggggctaactccctctccctattctctaaggttggaccacagggatgaggttgtgagatacaaagataaaggagggatggggaacactatgatgtggtatttttcttttctgttttttctttttgataatatctatccttggctaaggggagggcggagttcagcggcggaaataaagcgagcagtggctggtgcgaaccgactcccggctctaagccttacttgcggtggccggacttgtctgtggctgaagccgagcccgggctctgactctcacgtctgcactggaggtgcggaaacctggactggggttcaccagccacatactggctgctctggttgttctctcctcttccttcttctattctaaccaaacaaaacccaactcgatgcttgtgccaggccttggccagtttggacggtgatggaaacatttctggattttagcgtctaagggagcactcaagggctgtaaggtttgctatcactgtcccaacactgcagagaccttgaaggttcagtgtgggatctgtagaacccatggtttgcggtgacactcagaggggatctttgggagatttatagagccggttcttagcgctttgtgggttcagaggctggctgcagtgtttatgaagaggggcagtgggctggggacactgctggggttatggctgtagtgaggtccatgtgtacttgttccttggcatgtgtctgactctgtgttgctgctgcagtacagtgggcaggggcacggttgcttggactgggctgcccgatgtctggcatggctggtggtcctgttgtcctttatttgatcgatagcagggaactgaccgccgaggttggcacaggttggcagggggatgaggatgcattgtggttgtctcctcctcctctccttcttcctcttccccttcctcctctcctttctgttcttgttctccctcatcttcctcttccttcttctccctcttcttcctcttcactctgctctcttctcttcttttcccctttcctctcctctccctttcctcaggtcacagcggagtgaatcagctcggtggtgtctttgtcaacgggcggccactgccggactccacccggcagaagattgtagagctagctcacagcggggcccggccgtgcgacatttcccgaattctgcagacccatgcagatgcaaaagtccaagtgctggacaatcaaaacgtgtccaacggatgtgtgagtaaaattctgggcaggtattacgagactggctccatcagacccagggcaatcggtggtagtaaaccgagagtagcgactccagaagttgtaagcaaaatagcccagtataagcgggagtgcccgtccatctttgcttgggaaatccgagacagattactgtccgagggggtctgtaccaacgataacataccaagcgtaagttcattgagaacatctgccctccctgccctaagcccaatgctctctcctctttacctcctcccaccctctctctccactgtctcttagtctgtgtcctctccctgctccacatttgtctcctttgtacctgggggaacagagaggaatgccctgacttttctttgactgtctggaaaatgggagtcaagtgtggggagtcattcacttcatttgcatgctgcaaaacagagggcggaggcaccagggaaaggcacttgaatgaagaaggaaaatgagaaccagattgtaacttcgtcctaatccacctgccagaactttccttcaggtgtcatcaataaacagagttcttcgcaacctggctagcgaaaagcaacagatgggcgcagacggcatgtatgataaactaaggatgttgaacgggcagaccggaagctggggcacccgccctggttggtatccggggacttcggtgccagggcaacctacgcaagatggctgccagcaacaggaaggagggggagagaataccaactccatcagttccaacggagaagattcagatgaggctcaaatgcgacttcagctgaagcggaagctgcaaagaaatagaacatcctttacccaagagcaaattgaggccctggagaaagagtttgagagaacccattatccagatgtgtttgcccgagaaagactagcagccaaaatagatctacctgaagcaagaatacaggtatggttttctaatcgaagggccaaatggagaagagaagaaaaactgaggaatcagagaagacaggccagcaacacacctagtcatattcctatcagcagtagtttcagcaccagtgtctaccaaccaattccacaacccaccacaccggtttcctccttcacatctggctccatgttgggccgaacagacacagccctcacaaacacctacagcgctctgccgcctatgcccagcttcaccatggcaaataacctgcctatgcaacccccagtccccagccagacctcctcatactcctgcatgctgcccaccagcccttcggtgaatgggcggagttatgatacctacacccccccacatatgcagacacacatgaacagtcagccaatgggcacctcgggcaccacttcaacaggactcatttcccctggtgtgtcagttccagttcaagttcccggaagtgaacctgatatgtctcaatactggccaagattacagtaaaaaaaaaaaaaaaaaaaaaaaggaaaggaaatattgtgttaattcagtcagtgactatggggacacaacagttgagctttcaggaaagaaagaaaaatggctgttagagccgcttcagttctacaattgtgtcctgtattgtaccactggggaaggaatggacttgaaacaaggacctttgtatacagaaggcacgatatcagttggaacaaatcttcattttggtatccaaacttttattcattttggtgtattatttgtaaatgggcatttgtatgttataatgaaaaaaagaacaatgtagactggatggatgtttgatctgtgttggtcatgaagttgttttttttttttttaaaaagaaaaccatgatcaacaagctttgccacgaatttaagagttttatcaagatatatcgaatacttctacccatctgttcatagtttatggactgatgttccaagtttgtatcattcctttgcatataattaaacctggaacaacatgcactagatttatgtcagaaatatctgttggttttccaaaggttgttaacagatgaagtttatgtgcaaaaaagggtaagatataaattcaaggaagaaaaaaagttgatagctaaaaggtagagtgtgtcttcgatataatccaatttgttttatgtcaaaatgtaagtatttgtcttccctagaaatcctcagaatgatttctataataaagttaatttcatttatatttgacaagaatatagatgttttatacac

SEQ ID NO: 6500 - protein, 286 aa, Homo sapiens; identical to SEQ ID NO: 6444

SEQ ID NO: 6501 - DNA, 1143 bp, Homo sapiens
cgaaccacacaggcttaaggagggtccccagcaccttatccatctgttttggaaacgccggtcgccccctggtgcttccggggctggtcacagcggagtgaatcagctcggtggtgtctttgtcaacgggcggccactgccggactccacccggcagaagattgtagagctagctcacagcggggcccggccgtgcgacatttcccgaattctgcagacccatgcagatgcaaaagtccaagtgctggacaatcaaaacgtgtccaacggatgtgtgagtaaaattctgggcaggtattacgagactggtgtgtcagttccagttcaagttcccggaagtgaacctgatatgtctcaatactggccaagattacagtaaaaaaaaaaaaaaaaaaaaaaaggaaaggaaatattgtgttaattcagtcagtgactatggggacacaacagttgagctttcaggaaagaaagaaaaatggctgttagagccgcttcagttctacaattgtgtcctgtattgtaccactggggaaggaatggacttgaaacaaggacctttgtatacagaaggcacgatatcagttggaacaaatcttcattttggtatccaaacttttattcattttggtgtattatttgtaaatgggcatttgtatgttataatgaaaaaaagaacaatgtagactggatggatgtttgatctgtgttggtcatgaagttgttttttttttttttaaaaagaaaaccatgatcaacaagctttgccacgaatttaagagttttatcaagatatatcgaatacttctacccatctgttcatagtttatggactgatgttccaagtttgtatcattcctttgcatataattaaacctggaacaacatgcactagatttatgtcagaaatatctgttggttttccaaaggttgttaacagatgaagtttatgtgcaaaaaagggtaagatataaattcaaggaagaaaaaaagttgatagctaaaaggtagagtgtgtcttcgatataatccaatttgttttatgtcaaaatgtaagtatttgtcttccctagaaatcctcagaatgatttctataataaagttaatttcatttatatttgacaagaatatagatgttttatacac

SEQ ID NO: 6502 - protein, 74 aa, Homo sapiens; identical to SEQ ID NO: 6448

SEQ ID NO: 6503 - DNA, 2925 bp, Homo sapiens
ctacttccagcgaaagcccgcgtcggagggcgactgccggcgagcgggagcggcgcagggctcggggcgggcggccagctcagccccagcgccagcgccagcgccagcgcgggctgagctcgcgggaagaagggagactccaggcgcgacagcagccgcggctcctagccccagcgtcgcccaatgctcccgacccgcgggaaaagacgaagaggctctgtggtgcccaaggccctggaacggccgcagagagcaaccgctgccggctgctttgtccagcccgaggcccagcgaacgcgcagagagcgggcgctccgaggactcgccgagggagcgccgagggaacctgctcgccgcgtctccgcccgcccgccggccctcgggctttgtgccgcactgggctccggcgcagaagagtcagccggcactcgagcgccgaggggggcaccgcgcccgccaccagcccgagtggagtcagtcggcaaggcagccgcacgctggaggtagagggaagagcgagctagcgcgagccgggaaggaagccaccaggccaaggcggtggaacgcgcgctccgagggagctcagagccgagcgggaggactgtcagcttccacccagcccccgggctcttgcccccaactccactggagcgctgagctcggaacttgaaaactctctgctccccaggcttcccccgactctcatctcccttgccttgcggaggctggggctcttccctgttctccggccccctgcgcttgggggaagactttaactaggggcgcgcagatgtgtgaggccttttattgtgagagtggacagacatccgagatttcaggcaaccccatattcgagccccgtggaatcccgcggcccccagccagagccagcatgcagaacagtcacagcggagtgaatcagctcggtggtgtctttgtcaacgggcggccactgccggactccacccggcagaagattgtagagctagctcacagcggggcccggccgtgcgacatttcccgaattctgcaggtgtccaacggatgtgtgagtaaaattctgggcaggtattacgagactggctccatcagacccagggcaatcggtggtagtaaaccgagagtagcgactccagaagttgtaagcaaaatagcccagtataagcgggagtgcccgtccatctttgcttgggaaatccgagacagattactgtccgagggggtctgtaccaacgataacataccaagcgtgtcatcaataaacagagttcttcgcaacctggctagcgaaaagcaacagatgggcgcagacggcatgtatgataaactaaggatgttgaacgggcagaccggaagctggggcacccgccctggttggtatccggggacttcggtgccagggcaacctacgcaagatggctgccagcaacaggaaggagggggagagaataccaactccatcagttccaacggagaagattcagatgaggctcaaatgcgacttcagctgaagcggaagctgcaaagaaatagaacatcctttacccaagagcaaattgaggccctggagaaagagtttgagagaacccattatccagatgtgtttgcccgagaaagactagcagccaaaatagatctacctgaagcaagaatacaggtatggttttctaatcgaagggccaaatggagaagagaagaaaaactgaggaatcagagaagacaggccagcaacacacctagtcatattcctatcagcagtagtttcagcaccagtgtctaccaaccaattccacaacccaccacaccggtttcctccttcacatctggctccatgttgggccgaacagacacagccctcacaaacacctacagcgctctgccgcctatgcccagcttcaccatggcaaataacctgcctatgcaacccccagtccccagccagacctcctcatactcctgcatgctgcccaccagcccttcggtgaatgggcggagttatgatacctacacccccccacatatgcagacacacatgaacagtcagccaatgggcacctcgggcaccacttcaacaggactcatttcccctggtgtgtcagttccagttcaagttcccggaagtgaacctgatatgtctcaatactggccaagattacagtaaaaaaaaaaaaaaaaaaaaaaaggaaaggaaatattgtgttaattcagtcagtgactatggggacacaacagttgagctttcaggaaagaaagaaaaatggctgttagagccgcttcagttctacaattgtgtcctgtattgtaccactggggaaggaatggacttgaaacaaggacctttgtatacagaaggcacgatatcagttggaacaaatcttcattttggtatccaaacttttattcattttggtgtattatttgtaaatgggcatttgtatgttataatgaaaaaaagaacaatgtagactggatggatgtttgatctgtgttggtcatgaagttgttttttttttttttaaaaagaaaaccatgatcaacaagctttgccacgaatttaagagttttatcaagatatatcgaatacttctacccatctgttcatagtttatggactgatgttccaagtttgtatcattcctttgcatataattaaacctggaacaacatgcactagatttatgtcagaaatatctgttggttttccaaaggttgttaacagatgaagtttatgtgcaaaaaagggtaagatataaattcaaggaagaaaaaaagttgatagctaaaaggtagagtgtgtcttcgatataatccaatttgttttatgtcaaaatgtaagtatttgtcttccctagaaatcctcagaatgatttctataataaagttaatttcatttatatttgacaagaatatagatgttttatacac

SEQ ID NO: 6504 - protein, 456 aa, Homo sapiens [sequence omitted]

SEQ ID NO: 6505 - DNA, 2470 bp, Homo sapiens
ggtgcatttgcatgttgcggagtgattagtgggtttgaaaagggaaccgtggctcggcctcatttcccgctctggttcaggcgcaggaggaagtgttttgctggaggatgatgacagaggaatctgagaattgctctcacacaccaacccagcaacatccgtggagaaaactctcaccagcaactcctttaaaacaccgtcatttcaaaccattgtggtcttcaagcaacaacagcagcacaaaaaaccccaaccaaacaaaactcttgacagaagctgtgacaaccagaaaggatgcctcataaagggggaagactttaactaggggcgcgcagatgtgtgaggccttttattgtgagagtggacagacatccgagatttcaggcaaccccatattcgagccccgtggaatcccgcggcccccagccagagccagcatgcagaacagtcacagcggagtgaatcagctcggtggtgtctttgtcaacgggcggccactgccggactccacccggcagaagattgtagagctagctcacagcggggcccggccgtgcgacatttcccgaattctgcaggtgtccaacggatgtgtgagtaaaattctgggcaggtattacgagactggctccatcagacccagggcaatcggtggtagtaaaccgagagtagcgactccagaagttgtaagcaaaatagcccagtataagcgggagtgcccgtccatctttgcttgggaaatccgagacagattactgtccgagggggtctgtaccaacgataacataccaagcgtgtcatcaataaacagagttcttcgcaacctggctagcgaaaagcaacagatgggcgcagacggcatgtatgataaactaaggatgttgaacgggcagaccggaagctggggcacccgccctggttggtatccggggacttcggtgccagggcaacctacgcaagatggctgccagcaacaggaaggagggggagagaataccaactccatcagttccaacggagaagattcagatgaggctcaaatgcgacttcagctgaagcggaagctgcaaagaaatagaacatcctttacccaagagcaaattgaggccctggagaaagagtttgagagaacccattatccagatgtgtttgcccgagaaagactagcagccaaaatagatctacctgaagcaagaatacaggtatggttttctaatcgaagggccaaatggagaagagaagaaaaactgaggaatcagagaagacaggccagcaacacacctagtcatattcctatcagcagtagtttcagcaccagtgtctaccaaccaattccacaacccaccacaccggtttcctccttcacatctggctccatgttgggccgaacagacacagccctcacaaacacctacagcgctctgccgcctatgcccagcttcaccatggcaaataacctgcctatgcaacccccagtccccagccagacctcctcatactcctgcatgctgcccaccagcccttcggtgaatgggcggagttatgatacctacacccccccacatatgcagacacacatgaacagtcagccaatgggcacctcgggcaccacttcaacaggactcatttcccctggtgtgtcagttccagttcaagttcccggaagtgaacctgatatgtctcaatactggccaagattacagtaaaaaaaaaaaaaaaaaaaaaaaggaaaggaaatattgtgttaattcagtcagtgactatggggacacaacagttgagctttcaggaaagaaagaaaaatggctgttagagccgcttcagttctacaattgtgtcctgtattgtaccactggggaaggaatggacttgaaacaaggacctttgtatacagaaggcacgatatcagttggaacaaatcttcattttggtatccaaacttttattcattttggtgtattatttgtaaatgggcatttgtatgttataatgaaaaaaagaacaatgtagactggatggatgtttgatctgtgttggtcatgaagttgttttttttttttttaaaaagaaaaccatgatcaacaagctttgccacgaatttaagagttttatcaagatatatcgaatacttctacccatctgttcatagtttatggactgatgttccaagtttgtatcattcctttgcatataattaaacctggaacaacatgcactagatttatgtcagaaatatctgttggttttccaaaggttgttaacagatgaagtttatgtgcaaaaaagggtaagatataaattcaaggaagaaaaaaagttgatagctaaaaggtagagtgtgtcttcgatataatccaatttgttttatgtcaaaatgtaagtatttgtcttccctagaaatcctcagaatgatttctataataaagttaatttcatttatatttgacaagaatatagatgttttatacac

SEQ ID NO: 6506 - protein, 456 aa, Homo sapiens [sequence omitted]

SEQ ID NO: 6507 - DNA, 2512 bp, Homo sapiens
ggtgcatttgcatgttgcggagtgattagtgggtttgaaaagggaaccgtggctcggcctcatttcccgctctggttcaggcgcaggaggaagtgttttgctggaggatgatgacagaggaatctgagaattgctctcacacaccaacccagcaacatccgtggagaaaactctcaccagcaactcctttaaaacaccgtcatttcaaaccattgtggtcttcaagcaacaacagcagcacaaaaaaccccaaccaaacaaaactcttgacagaagctgtgacaaccagaaaggatgcctcataaagggggaagactttaactaggggcgcgcagatgtgtgaggccttttattgtgagagtggacagacatccgagatttcaggcaaccccatattcgagccccgtggaatcccgcggcccccagccagagccagcatgcagaacagtcacagcggagtgaatcagctcggtggtgtctttgtcaacgggcggccactgccggactccacccggcagaagattgtagagctagctcacagcggggcccggccgtgcgacatttcccgaattctgcagacccatgcagatgcaaaagtccaagtgctggacaatcaaaacgtgtccaacggatgtgtgagtaaaattctgggcaggtattacgagactggctccatcagacccagggcaatcggtggtagtaaaccgagagtagcgactccagaagttgtaagcaaaatagcccagtataagcgggagtgcccgtccatctttgcttgggaaatccgagacagattactgtccgagggggtctgtaccaacgataacataccaagcgtgtcatcaataaacagagttcttcgcaacctggctagcgaaaagcaacagatgggcgcagacggcatgtatgataaactaaggatgttgaacgggcagaccggaagctggggcacccgccctggttggtatccggggacttcggtgccagggcaacctacgcaagatggctgccagcaacaggaaggagggggagagaataccaactccatcagttccaacggagaagattcagatgaggctcaaatgcgacttcagctgaagcggaagctgcaaagaaatagaacatcctttacccaagagcaaattgaggccctggagaaagagtttgagagaacccattatccagatgtgtttgcccgagaaagactagcagccaaaatagatctacctgaagcaagaatacaggtatggttttctaatcgaagggccaaatggagaagagaagaaaaactgaggaatcagagaagacaggccagcaacacacctagtcatattcctatcagcagtagtttcagcaccagtgtctaccaaccaattccacaacccaccacaccggtttcctccttcacatctggctccatgttgggccgaacagacacagccctcacaaacacctacagcgctctgccgcctatgcccagcttcaccatggcaaataacctgcctatgcaacccccagtccccagccagacctcctcatactcctgcatgctgcccaccagcccttcggtgaatgggcggagttatgatacctacacccccccacatatgcagacacacatgaacagtcagccaatgggcacctcgggcaccacttcaacaggactcatttcccctggtgtgtcagttccagttcaagttcccggaagtgaacctgatatgtctcaatactggccaagattacagtaaaaaaaaaaaaaaaaaaaaaaaggaaaggaaatattgtgttaattcagtcagtgactatggggacacaacagttgagctttcaggaaagaaagaaaaatggctgttagagccgcttcagttctacaattgtgtcctgtattgtaccactggggaaggaatggacttgaaacaaggacctttgtatacagaaggcacgatatcagttggaacaaatcttcattttggtatccaaacttttattcattttggtgtattatttgtaaatgggcatttgtatgttataatgaaaaaaagaacaatgtagactggatggatgtttgatctgtgttggtcatgaagttgttttttttttttttaaaaagaaaaccatgatcaacaagctttgccacgaatttaagagttttatcaagatatatcgaatacttctacccatctgttcatagtttatggactgatgttccaagtttgtatcattcctttgcatataattaaacctggaacaacatgcactagatttatgtcagaaatatctgttggttttccaaaggttgttaacagatgaagtttatgtgcaaaaaagggtaagatataaattcaaggaagaaaaaaagttgatagctaaaaggtagagtgtgtcttcgatataatccaatttgttttatgtcaaaatgtaagtatttgtcttccctagaaatcctcagaatgatttctataataaagttaatttcatttatatttgacaagaatatagatgttttatacac

SEQ ID NO: 6508 - protein, 470 aa, Homo sapiens [sequence omitted]

SEQ ID NO: 6509 - DNA, 2956 bp, Homo sapiens
tgcaccctccgaggactgggagtcccgagtccagcttagggggagtgggggcgcgacccccaacccagaaaccttcacttgaccgctcaagttcgcggcagcagggcgggccgcgccgaatctcggcgtgcgcggagcggggagatgcaggcgagcgccagagcccgggctcgggggccctgcgccggggagaggagccgggacccaccggcggagccgaaaacaagtgtattcatattcaaacaaacggaccaattgcaccaggcggggagagggagcatccaatcggctggcgcgaggccccggcgctgctttgcataaagcaatattttgtgtgagagcgagcggtgcatttgcatgttgcggagtgattagtgggtttgaaaagggaaccgtggctcggcctcatttcccgctctggttcaggcgcaggaggaagtgttttgctggaggatgatgacagaggtcaggcttcgctaatgggccagtgaggagcggtggaggcgaggccgggcgccggcacacacacattaacacacttgagccatcaccaatcagcataggaatctgagaattgctctcacacaccaacccagcaacatccgtggagaaaactctcaccagcaactcctttaaaacaccgtcatttcaaaccattgtggtcttcaagcaacaacagcagcacaaaaaaccccaaccaaacaaaactcttgacagaagctgtgacaaccagaaaggatgcctcataaagggggaagactttaactaggggcgcgcagatgtgtgaggccttttattgtgagagtggacagacatccgagatttcaggcaaccccatattcgagccccgtggaatcccgcggcccccagccagagccagcatgcagaacagtcacagcggagtgaatcagctcggtggtgtctttgtcaacgggcggccactgccggactccacccggcagaagattgtagagctagctcacagcggggcccggccgtgcgacatttcccgaattctgcagacccatgcagatgcaaaagtccaagtgctggacaatcaaaacgtgtccaacggatgtgtgagtaaaattctgggcaggtattacgagactggctccatcagacccagggcaatcggtggtagtaaaccgagagtagcgactccagaagttgtaagcaaaatagcccagtataagcgggagtgcccgtccatctttgcttgggaaatccgagacagattactgtccgagggggtctgtaccaacgataacataccaagcgtgtcatcaataaacagagttcttcgcaacctggctagcgaaaagcaacagatgggcgcagacggcatgtatgataaactaaggatgttgaacgggcagaccggaagctggggcacccgccctggttggtatccggggacttcggtgccagggcaacctacgcaagatggctgccagcaacaggaaggagggggagagaataccaactccatcagttccaacggagaagattcagatgaggctcaaatgcgacttcagctgaagcggaagctgcaaagaaatagaacatcctttacccaagagcaaattgaggccctggagaaagagtttgagagaacccattatccagatgtgtttgcccgagaaagactagcagccaaaatagatctacctgaagcaagaatacaggtatggttttctaatcgaagggccaaatggagaagagaagaaaaactgaggaatcagagaagacaggccagcaacacacctagtcatattcctatcagcagtagtttcagcaccagtgtctaccaaccaattccacaacccaccacaccggtttcctccttcacatctggctccatgttgggccgaacagacacagccctcacaaacacctacagcgctctgccgcctatgcccagcttcaccatggcaaataacctgcctatgcaacccccagtccccagccagacctcctcatactcctgcatgctgcccaccagcccttcggtgaatgggcggagttatgatacctacacccccccacatatgcagacacacatgaacagtcagccaatgggcacctcgggcaccacttcaacaggactcatttcccctggtgtgtcagttccagttcaagttcccggaagtgaacctgatatgtctcaatactggccaagattacagtaaaaaaaaaaaaaaaaaaaaaaaggaaaggaaatattgtgttaattcagtcagtgactatggggacacaacagttgagctttcaggaaagaaagaaaaatggctgttagagccgcttcagttctacaattgtgtcctgtattgtaccactggggaaggaatggacttgaaacaaggacctttgtatacagaaggcacgatatcagttggaacaaatcttcattttggtatccaaacttttattcattttggtgtattatttgtaaatgggcatttgtatgttataatgaaaaaaagaacaatgtagactggatggatgtttgatctgtgttggtcatgaagttgttttttttttttttaaaaagaaaaccatgatcaacaagctttgccacgaatttaagagttttatcaagatatatcgaatacttctacccatctgttcatagtttatggactgatgttccaagtttgtatcattcctttgcatataattaaacctggaacaacatgcactagatttatgtcagaaatatctgttggttttccaaaggttgttaacagatgaagtttatgtgcaaaaaagggtaagatataaattcaaggaagaaaaaaagttgatagctaaaaggtagagtgtgtcttcgatataatccaatttgttttatgtcaaaatgtaagtatttgtcttccctagaaatcctcagaatgatttctataataaagttaatttcatttatatttgacaagaatatagatgttttatacac

SEQ ID NO: 6510 - protein, 470 aa, Homo sapiens [sequence omitted]

SEQ ID NO: 6511 - DNA, 2914 bp, Homo sapiens
tgcaccctccgaggactgggagtcccgagtccagcttagggggagtgggggcgcgacccccaacccagaaaccttcacttgaccgctcaagttcgcggcagcagggcgggccgcgccgaatctcggcgtgcgcggagcggggagatgcaggcgagcgccagagcccgggctcgggggccctgcgccggggagaggagccgggacccaccggcggagccgaaaacaagtgtattcatattcaaacaaacggaccaattgcaccaggcggggagagggagcatccaatcggctggcgcgaggccccggcgctgctttgcataaagcaatattttgtgtgagagcgagcggtgcatttgcatgttgcggagtgattagtgggtttgaaaagggaaccgtggctcggcctcatttcccgctctggttcaggcgcaggaggaagtgttttgctggaggatgatgacagaggtcaggcttcgctaatgggccagtgaggagcggtggaggcgaggccgggcgccggcacacacacattaacacacttgagccatcaccaatcagcataggaatctgagaattgctctcacacaccaacccagcaacatccgtggagaaaactctcaccagcaactcctttaaaacaccgtcatttcaaaccattgtggtcttcaagcaacaacagcagcacaaaaaaccccaaccaaacaaaactcttgacagaagctgtgacaaccagaaaggatgcctcataaagggggaagactttaactaggggcgcgcagatgtgtgaggccttttattgtgagagtggacagacatccgagatttcaggcaaccccatattcgagccccgtggaatcccgcggcccccagccagagccagcatgcagaacagtcacagcggagtgaatcagctcggtggtgtctttgtcaacgggcggccactgccggactccacccggcagaagattgtagagctagctcacagcggggcccggccgtgcgacatttcccgaattctgcaggtgtccaacggatgtgtgagtaaaattctgggcaggtattacgagactggctccatcagacccagggcaatcggtggtagtaaaccgagagtagcgactccagaagttgtaagcaaaatagcccagtataagcgggagtgcccgtccatctttgcttgggaaatccgagacagattactgtccgagggggtctgtaccaacgataacataccaagcgtgtcatcaataaacagagttcttcgcaacctggctagcgaaaagcaacagatgggcgcagacggcatgtatgataaactaaggatgttgaacgggcagaccggaagctggggcacccgccctggttggtatccggggacttcggtgccagggcaacctacgcaagatggctgccagcaacaggaaggagggggagagaataccaactccatcagttccaacggagaagattcagatgaggctcaaatgcgacttcagctgaagcggaagctgcaaagaaatagaacatcctttacccaagagcaaattgaggccctggagaaagagtttgagagaacccattatccagatgtgtttgcccgagaaagactagcagccaaaatagatctacctgaagcaagaatacaggtatggttttctaatcgaagggccaaatggagaagagaagaaaaactgaggaatcagagaagacaggccagcaacacacctagtcatattcctatcagcagtagtttcagcaccagtgtctaccaaccaattccacaacccaccacaccggtttcctccttcacatctggctccatgttgggccgaacagacacagccctcacaaacacctacagcgctctgccgcctatgcccagcttcaccatggcaaataacctgcctatgcaacccccagtccccagccagacctcctcatactcctgcatgctgcccaccagcccttcggtgaatgggcggagttatgatacctacacccccccacatatgcagacacacatgaacagtcagccaatgggcacctcgggcaccacttcaacaggactcatttcccctggtgtgtcagttccagttcaagttcccggaagtgaacctgatatgtctcaatactggccaagattacagtaaaaaaaaaaaaaaaaaaaaaaaggaaaggaaatattgtgttaattcagtcagtgactatggggacacaacagttgagctttcaggaaagaaagaaaaatggctgttagagccgcttcagttctacaattgtgtcctgtattgtaccactggggaaggaatggacttgaaacaaggacctttgtatacagaaggcacgatatcagttggaacaaatcttcattttggtatccaaacttttattcattttggtgtattatttgtaaatgggcatttgtatgttataatgaaaaaaagaacaatgtagactggatggatgtttgatctgtgttggtcatgaagttgttttttttttttttaaaaagaaaaccatgatcaacaagctttgccacgaatttaagagttttatcaagatatatcgaatacttctacccatctgttcatagtttatggactgatgttccaagtttgtatcattcctttgcatataattaaacctggaacaacatgcactagatttatgtcagaaatatctgttggttttccaaaggttgttaacagatgaagtttatgtgcaaaaaagggtaagatataaattcaaggaagaaaaaaagttgatagctaaaaggtagagtgtgtcttcgatataatccaatttgttttatgtcaaaatgtaagtatttgtcttccctagaaatcctcagaatgatttctataataaagttaatttcatttatatttgacaagaatatagatgttttatacac

SEQ ID NO: 6512 - protein, 456 aa, Homo sapiens [sequence omitted]

SEQ ID NO: 6513 - DNA, 1602 bp, Homo sapiens
ggaaacatttctggattttagcgtctaagggagcactcaagggctgtaaggtttgctatcactgtcccaacactgcagagaccttgaaggttcagtgtgggatctgtagaacccatggtttgcggtgacactcagaggggatctttgggagatttatagagccggttcttagcgctttgtgggttcagaggctggctgcagtgtttatgaagaggggcagtgggctggggacactgctggggttatggctgtagtgaggtccatgtgtacttgttccttggcatgtgtctgactctgtgttgctgctgcagtacagtgggcaggggcacggttgcttggactgggctgcccgatgtctggcatggctggtggtcctgttgtcctttatttgatcgatagcagggaactgaccgccgaggttggcacaggttggcagggggatgaggatgcattgtggttgtctcctcctcctctccttcttcctcttccccttcctcctctcctttctgttcttgttctccctcatcttcctcttccttcttctccctcttcttcctcttcactctgctctcttctcttcttttcccctttcctctcctctccctttcctcaggtcacagcggagtgaatcagctcggtggtgtctttgtcaacgggcggccactgccggactccacccggcagaagattgtagagctagctcacagcggggcccggccgtgcgacatttcccgaattctgcaggtgtccaacggatgtgtgagtaaaattctgggcaggtattacgagactggctccatcagacccagggcaatcggtggtagtaaaccgagagtagcgactccagaagttgtaagcaaaatagcccagtataagcgggagtgcccgtccatctttgcttgggaaatccgagacagattactgtccgagggggtctgtaccaacgataacataccaagcgtaagttcattgagaacatctgccctccctgccctaagcccaatgctctctcctctttacctcctcccaccctctctctccactgtctcttagtctgtgtcctctccctgctccacatttgtctcctttgtacctgggggaacagagaggaatgccctgacttttctttgactgtctggaaaatgggagtcaagtgtggggagtcattcacttcatttgcatgctgcaaaacagagggcggaggcaccagggaaaggcacttgaatgaagaaggaaaatgagaaccagattgtaacttcgtcctaatccacctgccagaactttccttcaggtgtcacacatccatttccatcctaatattaaacaatataatgaaagaaagctttacaacaagtctaaatagtttttattttcgggcagtcttttaacaaagcaaagcaaccgtgtgagttaggtcaccagagacaccaagcaatggtgaaggaccccctccgcccaattctctatccaactaaatttccatgcccaaagtgatagctatcattttttccacggtgtatctgcaaatccacccactgtcccggggtggctgggagctttttaacgggttgagagttgctttttaaggttgtgggtgagctg

SEQ ID NO: 6514 - protein, 108 aa, Homo sapiens
MRMHCGCLLLLSFFLFPFLLSFLFLFSLIFLFLLLPLLPLHSALFSSFPLSSPLPFLRSQRSESARWCLCQRAATAGLHPAEDCRASSQRGPAVRHFPNSAGVQRMCE

SEQ ID NO: 6515 - DNA, 777 bp, Homo sapiens
ggtgtgctggctgcagccacttccctcacccacactctttatctctcactctccagccgctgacagcccattttattgtcaatctctgtctccttcccaggaatctgagaattgctctcacacaccaacccagcaacatccgtggagaaaactctcaccagcaactcctttaaaacaccgtcatttcaaaccattgtggtcttcaagcaacaacagcagcacaaaaaaccccaaccaaacaaaactcttgacagaagctgtgacaaccagaaaggatgcctcataaagggggaagactttaactaggggcgcgcagatgtgtgaggccttttattgtgagagtggacagacatccgagatttcaggcaaccccatattcgagccccgtggaatcccgcggcccccagccagagccagcatgcagaacagtcacagcggagtgaatcagctcggtggtgtctttgtcaacgggcggccactgccggactccacccggcagaagattgtagagctagctcacagcggggcccggccgtgcgacatttcccgaattctgcaggtgtccaacggatgtgtgagtaaaattctgggcaggtattacgagactggctccatcagacccagggcaatcggtggtagtaaaccgagagtagcgactccagaagttgtaagcaaaatagcccagtataagcgggagtgcccgtccatctttgcttgggaaatccgagacagattactgtccgagggggtctgtaccaacgataacataccaagcgt

SEQ ID NO: 6516 - protein, 152 aa, Homo sapiens
MCEAFYCESGQTSEISGNPIFEPRGIPRPPARASMQNSHSGVNQLGGVFVNGRPLPDSTRQKIVELAHSGARPCDISRILQVSNGCVSKILGRYYETGSIRPRAIGGSKPRVATPEVVSKIAQYKRECPSIFAWEIRDRLLSEGVCTNDNIP

SEQ ID NO: 6517 - DNA, 796 bp, Homo sapiens
ggtgcatttgcatgttgcggagtgattagtgggtttgaaaagggaaccgtggctcggcctcatttcccgctctggttcaggcgcaggaggaagtgttttgctggaggatgatgacagaggaatctgagaattgctctcacacaccaacccagcaacatccgtggagaaaactctcaccagcaactcctttaaaacaccgtcatttcaaaccattgtggtcttcaagcaacaacagcagcacaaaaaaccccaaccaaacaaaactcttgacagaagctgtgacaaccagaaaggatgcctcataaagggggaagactttaactaggggcgcgcagatgtgtgaggccttttattgtgagagtggacagacatccgagatttcaggcaaccccatattcgagccccgtggaatcccgcggcccccagccagagccagcatgcagaacagtcacagcggagtgaatcagctcggtggtgtctttgtcaacgggcggccactgccggactccacccggcagaagattgtagagctagctcacagcggggcccggccgtgcgacatttcccgaattctgcaggtgtccaacggatgtgtgagtaaaattctgggcaggtattacgagactggctccatcagacccagggcaatcggtggtagtaaaccgagagtagcgactccagaagttgtaagcaaaatagcccagtataagcgggagtgcccgtccatctttgcttgggaaatccgagacagattactgtccgagggggtctgtaccaacgataacataccaagcgt

SEQ ID NO: 6518 - protein, 152 aa, Homo sapiens; identical to SEQ ID NO: 6516

SEQ ID NO: 6519 - DNA, 653 bp, Homo sapiens
attgacatttaaactctggggcaggtcctcgcgtagaacgcggctgtcagatctgccacttcccctgccgagcggcggtgagaagtgtgggaaccggcgctgccaggctcacctgcctccccgccctccgctcccaggaatctgagaattgctctcacacaccaacccagcaacatccgtggagaaaactctcaccagcaactcctttaaaacaccgtcatttcaaaccattgtggtcttcaagcaacaacagcagcacaaaaaaccccaaccaaacaaaactcttgacagaagctgtgacaaccagaaaggatgcctcataaagggggaagactttaactaggggcgcgcagatgtgtgaggccttttattgtgagagtggacagacatccgagatttcaggcaaccccatattcgagccccgtggaatcccgcggcccccagccagagccagcatgcagaacagtcacagcggagtgaatcagctcggtggtgtctttgtcaacgggcggccactgccggactccacccggcagaagattgtagagctagctcacagcggggcccggccgtgcgacatttcccgaattctgcagacccatgcagatgcaaaagtccaagtgctggacaatcaaaacgtgtccaacggatgt

SEQ ID NO: 6520 - protein, 99 aa, Homo sapiens
MCEAFYCESGQTSEISGNPIFEPRGIPRPPARASMQNSHSGVNQLGGVFVNGRPLPDSTRQKIVELAHSGARPCDISRILQTHADAKVQVLDNQNVSNG

SEQ ID NO: 6521 - DNA, 1656 bp, Homo sapiens
actgcgaagcaggcgacctgctcgccgcccagctccagggagaggaacccgcggaggagaggatcccggcccaggtggggaatccagctgctgcctttctcaaaagaccctcaaattatttctgctggaggagtgtcttccaggaaggactaatggtgcagctccccacagcaccagctctccagctgcccccacacagcctgttttgtgctagggctatcgcgatttgcaaattccttctctagctcaagtgcatggacccagaaaatgcccctgcttgagggccaatgttgaccaaggccctcagcagtaatgtgacctctgtgggagcagcacctcgcagagggcagagtttggctctatgcttgtaccattggtggtaaattctgctgagctctatggatccatctggatgaaaaggtctgtataaatgcaagatcattatcatcatcagctgtcccagttggagcctactgattctcaagcccacagtcaatggggcctttccaacaattccattgtacatggcttggaaaaggtgtaattacacgaagctgaatatcttctggagagacagacacgttcatgtctgtcccaggagtgttggagaggaatctctcaggcctctcattaggcacatggagagaggtgccctccaggcctggcccaggtcagggacaagtcagaagctacatctggagcagatccaggatcttatcctggtgcacacgaggggccagcatcgtgcttgcacatttatagctcaggtgctctctggtgttaccaggaagctgctgggaagagacggaggccggagagtgtcccaggacaatgcttccttcactcatgttcatttttaactttaaaaaatggcctccatgatccccaaaatggtcttttggtgtgagggaagtggttgctgtaaggaaagtctctgctcgacacacacaaaaattctcctccatgactttggaccatgtctctgataaaaagactggctgggtgaggagtccagcctgcagacctcccatttgtcctgagtcctctgttgcagtggtcctcaatccccaggttagggatcagtaccagttcctcttaggaactgggccgcacagcaggaggtgagcagcaggccagccagcaagcattgctgccagagctccgcctcctgtcagatcagtgatggcattagtttctcgtaggagcgtaaaccccattgtgaactggccatgtgaggtatctaggttgcatgctccttatgagaatctaactaatgcctgatgatctgaggcggaacagtttcatcccaaaaccacccccgcccactgtgaactcagagagcacctcagcctatggtcaggtaccatctacagcacttgtgccttaaacacccatcagcagatatgaagatttcccaaagcatgcctcaatttagggttgtgcaaactagtgtagcctcttgcctataaatgaagactaagggctccatccaaccagctcgcttgtctgggtccagtctccagaactcttccagcttccctgtagtaaaagaacacaccttggtgggcattgttcatttatcagtgcacagggccacgttgacaaagtcttaatatttaatggcttacgagtctaataataaaaaaattaaaactc

SEQ ID NO: 6522 - protein, 30 aa, Homo sapiens
MVQLPTAPALQLPPHSLFCARAIAICKFLL

SEQ ID NO: 6523 - DNA, 1031 bp, Homo sapiens
gctgagctctatggatccatctggatgaaaagggaacttatatttgtcagctttgcaagtggggctcagtttcggggaaggggtgagagagaagaaaggaagaaactgatgaagagaatgaaagaggaaaagacctgcctgacacctggatcttagaaacaaacctttcctaacaacagacctccaagcataaagagagtattttcaaacaactcaaaaaatcagtctaaatcaacgatattcaaaaggacaaagaaaaaaataataggggattatgttcttttctcatctgtcttatgttctgaagttattcatttgacaccttctgctcttgtacgatggcaggcctgtattcccaaagatgcccattccagccatctattgctgtgtaacaaatgacgacaatgtatgatggtttaaaatcacaactattttatttcatctctcaatattgtgggtcagagttcaggcttggtgaagtgattcatctgctccatatggcttgaacagtggtctcagagtggtattctgctggtgagttggctggtttcaagggtctaagtgaagtttagaggcttcactcacatgtctgcaccttggcagggatggcttcaaagatggggtccactgggactggcgactggagcccacacctggcctctccactcagacttctgacagtaagcaaggcagaatcacatgactttttatgacctagcttcagaagtcacaaagcatcattttggtcataccccattggtcaaaacagtcacaagcctgcctagactgaagaggcaggggatggacgctagcttttaatggagggagtgtcaaagaagtcatacttccatggctccgaagttgggctccaatgtggaatgtgtttacctttttccttctgaatgggccccatgagcagccataactgtgaagacagatacaatggcagggaccatggcgccttcatttcctaaggtccatggtaattttctgcaaaccaatacttctcctcaataaacacattatagaat

SEQ ID NO: 6524 - protein, 43 aa, Homo sapiens
MKRELIFVSFASGAQFRGRGEREERKKLMKRMKEEKTCLTPGS

SEQ ID NO: 6525 - DNA, 1828 bp, Homo sapiens
gctccccctgggagccaggtgtttgggtccctggagacgccgcaggcccccagggaggcagtggggctgaggaccccttcagggctccgagacgccaggcaaagggggtggcagcagcagcagctcagagaggtctcagccaggggctgagggctcaccagagactcctccaggccgctgctgtcgctgctgccgggcccccaggctgctgcaggcctacagctggaaggaagaagaggaagaggacgaaggctccatggagtccctcacatcctcagagggagaggagcctggctccgaagtggtgatcaagatgccaatggtggaccccgaggcacaggcccccaccaagcagcccccacggagctccccaaatacagtcaagaggccgactaagaaagggcgtgatcgagctggcaagggccagaagccccgtggaaaggagcagctggccaagcggaagaccttctcgctggtcaaggagaagaaggcggctcggaccctgagtgccatcctcctggccttcatcctcacctggacaccgtacaacatcatggtgctggtgtccaccttctgcaaggactgtgttcccgagaccctgtgggagctgggctactggctgtgctacgtcaacagcaccatcaaccccatgtgctacgcactctgcaacaaagccttccgggacacctttcgcctgctgctgctttgccgctgggacaagagacgctggcgcaagatccccaagcgccctggctccgtgcaccgcactccctcccgccaatgctgatagtcccctctcctgcatccctccaccccagtccccgggaaaggccggtgggaagagggcaggggctgcatcctcagccccagggccctgctcaggcctcacctggcttcccaggaccctgggtcaccttcctgggcagcccagagagaccctgccaactttccagacttcgctattcccaggcagggagggaaacccggggaactggtttttctgttccctgctgggtgggaatgcgctcttcaccaggaagaaggcccgggaggaggatccgggctttggactccttgtttgcctttaggcaggaagtcaggagccagcagggcgggccaggagaaagaaggcttaacattaagtattccttggcccagcagcggcccagattgcggtgtgagatggtgccccctggggggcacagccagaaactgaactggccgctgggagaaaagccagatgacagggagctggggaatcccctcgcttcataggcagagcccgcccacctgggccctaggcatactctccaggattgtccacaaatgtcctcagagggtccctaggtgggtcaactccaaggcaaatgtccaagcatcagcaagacaatgacactggaagggtccggcttggctagtcacatatcaagtcccgaggcagcaacaggaccaggagccaggtgtcctgactgtcctacaatatcattttcctgggagtgggagtcaagtgtgcctgctatccagccgcaaatccataccccctgccccagagaagcctcagtccctccctcctggctcacagccaccacctggatggatctgctccatgcagatctagccaggcctcccgcatgctgcctgcctccggccctgccccacacaggcctggcccagccagcaggttctctcctgtgagctccccaatccaacccatgcatggcctcccagccacccggatctccaggcccagcctggccccaaatgttctttcctttcatcctcagcaagtgctgagtctgtgaataaagccacataaccagcgggcact

SEQ ID NO: 6526 - protein, 176 aa, Homo sapiens [sequence omitted]

SEQ ID NO: 6527 - DNA, 3165 bp, Homo sapiens
acagaaggaatctagctctctcacagcagggaggaagagcagggtgtgtagttgggtgggtgggtgcgtgggcatgtgcaggggggagggcgtgtgtgcgagggaagcaggcatgtgaataccagggcatgtgtgttggggcatggtgcacaggggctgggggctctaaggttgggtggggggaggagcccaaggaaacagtgtgcctttgtgagggtgtgtgtgccgccgggtctgtgcagtgggtgtgggtgtttgtctccctgtatccgccttctctcccgtccgggacttttagccttcctgggctcgccttcctcatgtcctttctcctccctcttggggctcaaattgggtgccctggtgaaggaggggggcacactccagaacctagtccaaccccagacgctgcctgaggcttccctccagctcccctcccttccttttctccctttcctccctccctctctttccctttctccctccccgctaaggctggcgtgccagggggtgggacatgccaatcactggctgtgcctctcccgctgccagcacagggcgcagctccccctgggagccaggtgtttgggtccctggagacgccgcaggcccccagggaggcagtggggctgaggaccctacagacccctcttcagccccgtggtgatgactttcccctgaggaagccctgtagcgtgcctggaggaaggggctctccaaccccagccccacctagccaccatgaacacttcagccccacctgctgtcagccccaacatcaccgtcctggcaccaggaaagggtccctggcaagtggccttcattgggatcaccacgggcctcctgtcgctagccacagtgacaggcaacctgctggtactcatctctttcaaggtcaacacggagctcaagacagtcaataactacttcctgctgagcctggcctgtgctgacctcatcatcggtaccttctccatgaacctctataccacgtacctgctcatgggccactgggctctgggcacgctggcttgtgacctctggctggccctggactatgtggccagcaatgcctccgtcatgaatctgctgctcatcagctttgaccgctacttctccgtgactcggcccctgagctaccgtgccaagcgcacaccccgccgggcagctctgatgatcggcctggcctggctggtttcctttgtgctctgggccccagccatcctcttctggcagtacctggtaggggagcggacagtgctagctgggcagtgctacatccagttcctctcccagcccatcatcacctttggcacagccatggctgccttctacctccctgtcacagtcatgtgcacgctctactggcgcatctaccgggagacagagaaccgagcacgggagctggcagcccttcagggctccgagacgccaggcaaagggggtggcagcagcagcagctcagagaggtctcagccaggggctgagggctcaccagagactcctccaggccgctgctgtcgctgctgccgggcccccaggctgctgcaggcctacagctggaaggaagaagaggaagaggacgaaggctccatggagtccctcacatcctcagagggagaggagcctggctccgaagtggtgatcaagatgccaatggtggaccccgaggcacaggcccccaccaagcagcccccacggagctccccaaatacagtcaagaggccgactaagaaagggcgtgatcgagctggcaagggccagaagccccgtggaaaggagcagctggccaagcggaagaccttctcgctggtcaaggagaagaaggcggctcggaccctgagtgccatcctcctggccttcatcctcacctggacaccgtacaacatcatggtgctggtgtccaccttctgcaaggactgtgttcccgagaccctgtgggagctgggctactggctgtgctacgtcaacagcaccatcaaccccatgtgctacgcactctgcaacaaagccttccgggacacctttcgcctgctgctgctttgccgctgggacaagagacgctggcgcaagatccccaagcgccctggctccgtgcaccgcactccctcccgccaatgctgatagtcccctctcctgcatccctccaccccagtccccgggaaaggccggtgggaagagggcaggggctgcatcctcagccccagggccctgctcaggcctcacctggcttcccaggaccctgggtcaccttcctgggcagcccagagagaccctgccaactttccagacttcgctattcccaggcagggagggaaacccggggaactggtttttctgttccctgctgggtgggaatgcgctcttcaccaggaagaaggcccgggaggaggatccgggctttggactccttgtttgcctttaggcaggaagtcaggagccagcagggcgggccaggagaaagaaggcttaacattaagtattccttggcccagcagcggcccagattgcggtgtgagatggtgccccctggggggcacagccagaaactgaactggccgctgggagaaaagccagatgacagggagctggggaatcccctcgcttcataggcagagcccgcccacctgggccctaggcatactctccaggattgtccacaaatgtcctcagagggtccctaggtgggtcaactccaaggcaaatgtccaagcatcagcaagacaatgacactggaagggtccggcttggctagtcacatatcaagtcccgaggcagcaacaggaccaggagccaggtgtcctgactgtcctacaatatcattttcctgggagtgggagtcaagtgtgcctgctatccagccgcaaatccataccccctgccccagagaagcctcagtccctccctcctggctcacagccaccacctggatggatctgctccatgcagatctagccaggcctcccgcatgctgcctgcctccggccctgccccacacaggcctggcccagccagcaggttctctcctgtgagctccccaatccaacccatgcatggcctcccagccacccggatctccaggcccagcctggccccaaatgttctttcctttcatcctcagcaagtgctgagtctgtgaataaagccacataaccagcgggcact

SEQ ID NO: 6528 - protein, 49 aa, Homo sapiens
MPITGCASPAASTGRSSPWEPGVWVPGDAAGPQGGSGAEDPTDPSSAPW

SEQ ID NO: 6529 - DNA, 745 bp, Homo sapiens
cgaagtctggaaagttggcagggtctctctgggctgcccaggaaggtgacccagggtcctgggaagccaggtactgccagaagaggatggctggggcccagagcacaaaggaaaccagccaggccaggccgatcatcagagctgcccggcggggtgtgcgcttggcacggtagctcaggggccgagtcacggagaagtagcggtcaaagctgatgagcagcagattcatgacggaggcattgctggccacatagtccagggccagccagaggtcacaagccagcgtgcccagagcccagtggcccatgagcaggtcctgctatccccagtttgcaaaaggcctaacctgaggcttcaagacctgaaggaccttacagctcatcagcgatgcaaccaggatttggatccaggccgtctgcctccgagaccaacctcttgaaccctactcctgcccttgaggggttgcgggggtttgccagcctccttgcccacctcagctagcttactcaagcccaactttgaatcagttaacgatgagcaatcggtccttctttcagaatctggcctcctttgtgtgcgcggcagtgtctgtcgtatatctgtgtgatgtgtgataacagtgctgtgggaagagggtgggtctactggagctctttaaagggcagggtaagggctgcgtctgtctcattcaatgctttatcccagggcttggcagatagtagttgctcaataaatacctgtggaa

SEQ ID NO: 6530 - protein, 45 aa, Homo sapiens
MCDNSAVGRGWVYWSSLKGRVRAASVSFNALSQGLADSSCSINTC

SEQ ID NO: 6531 - DNA, 2196 bp, Homo sapiens; identical to SEQ ID NO: 877

SEQ ID NO: 6532 - protein, 563 aa, Homo sapiens; identical to SEQ ID NO: 878

SEQ ID NO: 6533 - DNA, 2064 bp, Homo sapiens; identical to SEQ ID NO: 883

SEQ ID NO: 6534 - protein, 519 aa, Homo sapiens; identical to SEQ ID NO: 884

SEQ ID NO: 6535 - DNA, 2025 bp, Homo sapiens; identical to SEQ ID NO: 881

SEQ ID NO: 6536 - protein, 506 aa, Homo sapiens; identical to SEQ ID NO: 882

SEQ ID NO: 6537 - DNA, 2156 bp, Homo sapiens
aaaaactgcccatgcaagggtcaggtctccagcagaccctgaaagctgagctgccctgacccccaaagtgaggagaagctgcaagggaaaagggagggacagatcagggagaccggggaagaaggaggagcagccaaggaggctgctgtccccccacagagcagctcggactcagctcccggagcaacccagctgcggaggcaacggcagtgctgctcctccagcgaaggacagcaggcaggcagacagacagaggtcctgggactggaaggcctcagcccccagccactgggctgggcctggcccaatggcctttaatgacctcctgcagcaggtggggggtgtcggccgcttccagcagatccaggtcaccctggtggtcctccccctgctcctgatggcttctcacaacaccctgcagaacttcactgctgccatccctacccaccactgccgcccgcctgccgatgccaacctcagcaagaacggggggctggaggtctggctgccccgggacaggcaggggcagcctgagtcctgcctccgcttcacctccccgcagtggggactgccctttctcaatggcacagaagccaatggcacaggggccacagagccctgcaccgatggctggatctatgacaacagcaccttcccatctaccatcgtgactgagtgggaccttgtgtgctctcacagggccctacgccagctggcccagtccttgtacatggtgggggtgctgctcggagccatggtgttcggctaccttgcagacaggctaggccgccggaaggtactcatcttgaactacctgcagacagctgtgtcagggacctgcgcagccttcgcacccaacttccccatctactgcgccttccggctcctctcgggcatggctctggctggcatctccctcaactgcatgacactgaatgtggagtggatgcccattcacacacgggcctgcgtgggcaccttgattggctatgtctacagcctgggccagttcctcctggctggtgtggcctacgctgtgccccactggcgccacctgcagctactggtctctgcgcctttttttgccttcttcatctactcctggttcttcattgagtcggcccgctggcactcctcctccgggaggctggacctcaccctgagggccctgcagagagtcgcccggatcaatgggaagcgggaagaaggagccaaattgagtatggaggtactccgggccagtctgcagaaggagctgaccatgggcaaaggccaggcatcggccatggagctgctgcgctgccccaccctccgccacctcttcctctgcctctccatgctgtggtttgccactagctttgcatactatgggctggtcatggacctgcagggctttggagtcagcatctacctaatccaggtgatctttggtgctgtggacctgcctgccaagcttgtgggcttccttgtcatcaactccctgggtcgccggcctgcccagatggctgcactgctgctggcaggcatctgcatcctgctcaatggggtgataccccaggaccagtccattgtccgaacctctcttgctgtgctggggaagggttgtctggctgcctccttcaactgcatcttcctgtatactggggaactgtatcccacaatgatccggcagacaggcatgggaatgggcagcaccatggcccgagtgggcagcatcgtgagcccactggtgagcatgactgccgagctctacccctccatgcctctcttcatctacggtgctgttcctgtggccgccagcgctgtcactgtcctcctgccagagaccctgggccagccactgccagacacggtgcaggacctggagagcaggaaagggaaacagacgcgacagcaacaagagcaccagaagtatatggtcccactgcaggcctcagcacaagagaagaatggactctgaggactgagaaggggccttacagaaccctaaagggagggaaggtcctacaggtctccggccacccacacaaggaggaggaagaggaaatggtgacccaagtgtgggggttgtggttcaggaaagcatcttcccaggggtccacctccctttataaaccccaccagaaccacatcattaaaaggtttgactgcgcacc

SEQ ID NO: 6538 - protein, 550 aa, Homo sapiens; identical to SEQ ID NO: 880

SEQ ID NO: 6539 - DNA, 1483 bp, Homo sapiens
caaagcaggagccagaggtggaaaaggcctcccagaggatccctctacagcctcacggaccaggcctgggctccagctgaggacaacggaaccccctttccctgccctccagagactgatcctagccaggcaccttaggagtatagggaggccccatataggtccatcctcctaggatgaagccttctgagagcttggtgaaggtgtctccatcaccaccaccagagcctcctgcccagccctggccagttcaaaggttcagccatccctgcccttgttctccctgcaacccaggccctgccattcttctgtctagcccttccccactggccaccttcccccactgtcccggtcctcttcccctgaggtcccctgatatcccctggctcagtcctaacaagactgagtcttaacaagatgagaagtcctccccttcttgcctcccacacttttctttgatgggaggtttcaataaacagcgataagaactctagccatgatgttcaggaatgggggtgggatgggagctggccaccgtgtggacacgtgagcatgcacatctgtccatccacacttcatgtacgacaggcctgtgtacaggcaccacaggtacatgcaagctggactgatgtgaacatgagcaagcacatgtgagtgctctgaggtgtgtacaccacgcctgtgcatgaaaatacatgtgtgtgtctacacgtcccagcatgcatatgagcagatgactgaccaagcccagacagaacagccaatccctccaccagcagccatccctttccctctggggtctctgcccattccctctgtcttggctgccgcccatcaccagttaaacaagcttaggcttctcccaacttaacaaaaatcaacacaaacacatgccaggatgttgtatctccttccaagggccacactggctctttctccccttcgaagccagacttcataaaggagctgtctgcctcccctgtatccaccttctagcctcatacatctcccccactgcactccggctcctaccccttccctccctggaaccgctttcaccaaggacgctcatcccctccctgtgctggatccataagtcactcttcagccctcctcttactggccttttggcaaatttggtcctactggtcactctcttcttccttagtttctgagaggccacgtgtttgcagctcccccccacacactggctactccttctcaggcccctctgcggtatcctataaatgctgcagtgttcactttgcctatcctgcccccaccccttttctaaggatctgcatccccggaatctgccaactgaacagttccataatctgccatctctggtggtgaccaactagaccacagggcactccagatccaaatctcatttatcacatactctctcctgggctaggatttgagatcttaagaggttcttatccatctctttgtccttgccctgggaaggcaggttagc

SEQ ID NO: 6540 - protein, 61 aa, Homo sapiens [sequence omitted]

SEQ ID NO: 6541 - DNA, 2492 bp, Homo sapiens
tgttccaggccccttccccagctcacatccctgccgctcagtgtccccatgctctccctctctgtcactgcccccctctgggtcagctctgccctctggaaccccacagagcaaggctagaccaatgggtttcagactcgaagacaaaaattatgtttatctcaagttttctcctctgtctgactttctcctgctccctgaaagccctttctgtgacctggtttctgcttcccatcctggccatttctttgtgaataggattcaatttgtccaggaacccttcaaagggatcccacagttcagagagaggaagggaaacatctgacccaggcatacagctcaatgctcacctcgccagtctggatgttaaactgctgcccaaccaggagagatcatttactgcctcctttggtctccgagattccctccagtcctgatcttctctagagtcagttattggcacctttgccaccacaccctggaccatgcccacgtcagacatgaccagtcaatcacagcactttctccctgagcccagacacgatctcagaaacctcaaaaggacactcaagcagcccctatcatcagttgcagttggcacaagaagtgaagctattcatcatcctggtgacccaatgaccagcatggggagtggcctctgcctggctgcaggtgctaaccaatccttctctgcctctcaggtttgctaccggttttgcctactatagtttggctatgggtgtggaagaatttggagtcaacctctacatcctccagatcatctttggtggggtcgatgtcccagccaagttcatcaccatcctctccttaagctacctgggccggcataccactcaggccgctgccctgctcctggcaggaggggccatcttggctctcacctttgtgcccttgggtgagagactggggctaccccagaaccctctggaagaggctgccaggttgggtgccagggacttcactgctggctctgcctctaagtcactgtgttaccttgagcaggtccctgcactctctggggctcagggtctctcttctagaaaataacgcaattgggctagatgacatgaaagctcctttccagatctgacttggactgggcaaaaagtatggtggtatctggatagtgtgaaaatttttgaggtattgagagtgtcctgagtgacatcactgtagagataagctgagatggtaaaacgacagagctcatgctcaagaaagaccccacaacctactccatcatgaccttggaaaagctacgtttattttatatgggtgttagttggttgataacacctatacccttccaaaagaacttgaggtattttaagacaagaacaagaacatatacaacaaaatataaatggaaatagaggatcagaggcaggggaaaacacaaacatagcaggacacaggcatgcaaagcattactcagctttaagtttggatctgagcttcttggaagccaaagcaaaaagggagacaagatcagctaaggagtgagaactcttaggtgctcctgaactccaaggcccaccacattttcttccctctgcagacttgcagaccgtgaggacagtattggctgtgtttgggaagggatgcctatccagctccttcagctgcctcttcctctacacaagtgaattataccccacagtcatcaggcaaacaggtatgggcgtaagtaacctgtggacccgcgtgggaagcatggtgtccccgctggtgaaaatcacgggtgaggtacagcccttcatccccaatatcatctacgggatcaccgccctcctcgggggcagtgctgccctcttcctgcctgagaccctgaatcagcccttgccagagactatcgaagacctggaaaactggtcagtcactgcctctggccccatcagtgctcctccctggggaagcaggtctgggcccagggcttttccttagctctctgtccctaggtccctgcgggcaaagaagccaaagcaggagccagaggtggaaaaggcctcccagaggatccctctacagcctcacggaccaggcctgggctccagctgaggacaacggaaccccctttccctgccctccagagactgatcctagccaggcaccttaggagtatagggaggccccatataggtccatcctcctaggatgaagccttctgagagcttggtgaaggtgtctccatcaccaccaccagagcctcctgcccagccctggccagttcaaaggttcagccatccctgcccttgttctccctgcaacccaggccctgccattcttctgtctagcccttccccactggccaccttcccccactgtcccggtcctcttcccctgaggtcccctgatatcccctggctcagtcctaacaagactgagtcttaacaagatgagaagtcctccccttcttgcctcccacacttttctttgatgggaggtttcaataaacagcgataagaactcta

SEQ ID NO: 6542 - protein, 110 aa, Homo sapiens
MGVEEFGVNLYILQIIFGGVDVPAKFITILSLSYLGRHTTQAAALLLAGGAILALTFVPLGERLGLPQNPLEEAARLGARDFTAGSASKSLCYLEQVPALSGAQGLSSRK

SEQ ID NO: 6543 - DNA, 2180 bp, Homo sapiens
acagcttgttagagctgagctgccctactacagcagctgccggcccctaggacagagcagggacctcaactacactgatcaccagccccatcggatccagacccggccaccagctctggctcgtcttgccccagtgccatgaccttctcggagatcctggaccgtgtgggaagcatgggccatttccagttcctgcatgtagccatactgggcctcccgatcctcaacatggccaaccacaacctgctgcagatcttcacagccgccacccctgtccaccactgtcgcccgccccacaatgcctccacagggccttgggtgctccccatgggcccaaatgggaagcctgagaggtgcctccgttttgtacatccgcccaatgccagcctgcccaatgacacccagagggccatggagccatgcctggatggctgggtctacaacagcaccaaggactccattgtgacagagtgggacttggtgtgcaactccaacaaactgaaggagatggcccagtctatcttcatggcaggtatactgattggagggctcgtgcttggagacctgtctgacaggtttggccgcaggcccatcctgacctgcagctacctgctgctggcagccagcggctccggtgcagccttcagccccaccttccccatctacatggtcttccgcttcctgtgtggctttggcatctcaggcattaccctgagcaccgtcatcttgaatgtggaatgggtgcctacccggatgcgggccatcatgtcgacagcactcgggtactgctacacctttggccagttcattctgcccggcctggcctacgccatcccccagtggcgttggctgcagttaactgtgtccattcccttcttcgtcttcttcctatcatcctggtggacaccagagtccatacgctggttggtcttgtctggaaagtcctcgaaggccctgaagatactccggcgggtggctgtcttcaatggcaagaaggaagagggagaaaggctcagcttggaggagctcaaactcaacctgcagaaggagatctccttggccaaggccaagtacaccgcaagtgacctgttccggatacccatgctgcgccgcatgaccttctgtctttccctggcctggtttgctaccggttttgcctactatagtttggctatgggtgtggaagaatttggagtcaacctctacatcctccagatcatctttggtggggtcgatgtcccagccaagttcatcaccatcctctccttaagctacctgggccggcataccactcaggccgctgccctgctcctggcaggaggggccatcttggctctcacctttgtgcccttggacttgcagaccgtgaggacagtattggctgtgtttgggaagggatgcctatccagctccttcagctgcctcttcctctacacaagtgaattataccccacagtcatcaggcaaacaggtatgggcgtaagtaacctgtggacccgcgtgggaagcatggtgtccccgctggtgaaaatcacgggtgaggtacagcccttcatccccaatatcatctacgggatcaccgccctcctcgggggcagtgctgccctcttcctgcctgagaccctgaatcagcccttgccagagactatcgaagacctggaaaactggtccctgcgggcaaagaagccaaagcaggagccagaggtggaaaaggcctcccagaggatccctctacagcctcacggaccaggcctgggctccagctgaggacaacggaaccccctttccctgccctccagagactgatcctagccaggcaccttaggagtatagggaggccccatataggtccatcctcctaggatgaagccttctgagagcttggtgaaggtgtctccatcaccaccaccagagcctcctgcccagccctggccagttcaaaggttcagccatccctgcccttgttctccctgcaacccaggccctgccattcttctgtctagcccttccccactggccaccttcccccactgtcccggtcctcttcccctgaggtcccctgatatcccctggctcagtcctaacaagactgagtcttaacaagatgagaagtcctccccttcttgcctcccacacttttctttgatgggaggtttcaataaacagcgataagaactcta

SEQ ID NO: 6544 - protein, 542 aa, Homo sapiens; identical to SEQ ID NO: 888

SEQ ID NO: 6545 - DNA, 491 bp, Homo sapiens
acagcttgttagagctgagctgccctactacagcagctgccggcccctaggacagagcagggacctcaactacactgatcaccagccccatcggatccagacccggccaccagcctgcccaatgacacccagagggccatggagccatgcctggatggctgggtctacaacagcaccaaggactccattgtgacagagtgggacttggtgtgcaactccaacaaactgaaggagatggcccagtctatcttcatggcaggtatactgattggagggctcgtgcttggagacctgtctgacaggtttggccgcaggcccatcctgacctgcagctacctgctgctggcagccagcggctccggtgcagccttcagccccaccttccccatctacatggtcttccgcttcctgtgtggctttggcatctcaggcattaccctgagcaccgtcatcttgaatgtggaatgggtgcctacccggatgcgggccat

SEQ ID NO: 6546 - protein, 116 aa, Homo sapiens
MEPCLDGWVYNSTKDSIVTEWDLVCNSNKLKEMAQSIFMAGILIGGLVLGDLSDRFGRRPILTCSYLLLAASGSGAAFSPTFPIYMVFRFLCGFGISGITLSTVILNVEWVPTRMR

SEQ ID NO: 6547 - DNA, 1659 bp, Homo sapiens
gcaattcactttggattttctaatatcccatttctaagaagaatggcagactattgaacaggtgtattttaggtcacgtggggactgcatccacctgaaaatccaccgttgacttatcaggaaactcagagatcaggatctttcacagagtagtcttttaagaagattcagttgtcaacagctagcagtctctttgccaaataattatatctgtgacttctgaaactatttggctgcctaaagttaaaggacttggggaaagtccttccactgctcttctgcagtagtgtcacaccactcagtgcagggcccaccaagaagaaagcagtgtcaggatccacatggcactatggtaactttgtgaaaggggacattttctccctctgaacttctcttcataaagtcattgtgcttcctcttggggatcacctgttcagtctcaatgggctttgatgtgctcctggatcaagtgggtggcatggggagattccagatttgtctgatagctttcttttgcatcaccaacatcctactgttccctaatattgtgttggagaacttcactgcattcacccctagtcatcgctgctgggtccccctcctggacaatgacactgtgtctgacaatgataccgggaccctcagcaaggatgacctcctgagaatctccatcccactggactcaaacctgaggccacagaagtgtcagcgctttatccatccccagtggcagctccttcacctgaacgggaccttccccaacacaaatgagccagacacggagccctgtgtggatggctgggtgtacgacagaagctctttcctctccaccatcgtgactgagtgggacctggtatgtgaatctcagtcactaaaatcaatggttcaatccctatttatggctgggtcacttctgggaggtctaatatatggccatctttcagacagggttggacggaagatcatatgcaaattgtgtttcctccagctggccatctctaacacctgtgcggccttcgctcccaccttccttgtttactgcatactgcgcttcttggcagggttctccaccatgactattttgggaaacacttttattctcagcttagagtggacattgccccggtcacgatctatgacaataatggtgctattatgttcctacagtgttgggcagatgctcctaggagggctggcttttgccattcaggactggcacatattgcaactgactgtgtctacacccataattgtcctcttcttgtcctcttggtatgaacaatctccacattctttgcctgtaagcgaggctatggtagacatagaaaggaaaattctgacacctgggatctgttcggtctctggcctagtcctgagccatgatgtccatagtacctattgtgtcacctgagaagcaaacaatggaataggatgacactatatgtggggaggctggcactttgcattcattattttagacatggaattatcatgaaattatttttcttaatagaaaaaatacccacttatttttgaagcaaatgtattatttatctaacttttggaatattatgtgatggagataatttgggggcttttgtcattgtaactgagattgaatataaggaaaacacaataaatttatctacataactattt

SEQ ID NO: 6548 - protein, 322 aa, Homo sapiens
MGFDVLLDQVGGMGRFQICLIAFFCITNILLFPNIVLENFTAFTPSHRCWVPLLDNDTVSDNDTGTLSKDDLLRISIPLDSNLRPQKCQRFIHPQWQLLHLNGTFPNTNEPDTEPCVDGWVYDRSSFLSTIVTEWDLVCESQSLKSMVQSLFMAGSLLGGLIYGHLSDRVGRKIICKLCFLQLAISNTCAAFAPTFLVYCILRFLAGFSTMTILGNTFILSLEWTLPRSRSMTIMVLLCSYSVGQMLLGGLAFAIQDWHILQLTVSTPIIVLFLSSWYEQSPHSLPVSEAMVDIERKILTPGICSVSGLVLSHDVHSTYCVT

SEQ ID NO: 6549 - DNA, 1696 bp, Homo sapiens
atggcctttcaggacctcctagatcaagttggaggcctggggagattccagatccttcagatggttttccttataatgttcaacgtcatagtataccatcaaactcagctggagaacttcgcagcattcatacttgatcatcgctgctgggttcatatactggacaatgacactatccctgacaatgaccctgggaccctcagccaggatgccctcctgagaatctccatcccattcgactcaaatctgaggccagagaagtgtcgtcgctttgtccatccccagtggaagctcattcatctgaatgggaccttccccaacacgagtgagccagatacagagccctgtgtggatggctgggtatatgaccaaagctccttcccttccaccattgtgactaagtgggatctggtatgcgaatctcaaccactgaattcagtagctaaatttctattcatggctggaatgatggtgggaggcaacctatatggccatttgtcagacaggtttgggagaaagttcgtgctcagatggtcttacctccagctcgccattgtaggcacctgtgcggcctttgctcccaccatcctcgtatactgctccctgcgcttcttggctggggctgctacatttagcatcattgtaaatactgttttgttaattgtagagtggataactcaccaattctgtgccatggcattgacattgacactttgtgctgctagtattggacatataaccctgggaagcctggcttttgtcattcgagaccagtgcatcctccagttggtgatgtctgcaccatgctttgtcttctttctgttctcaaggtggctggcagagtctgctcggtggctcattatcaacaacaaaccagaagagggcttaaaggaacttagaaaagctgcacacaggaatggaatgaagaatgctgaagacatcctaaccatggaggttttgaaatccaccatgaagcaagaactggaggcagcacagaaaaagcattctctttgtgaattgctccgcatacccaacatatgtaaaagaatctgtttcctgtcctttgtgagatttgcaagtaccatccctttttggggccttactttgcacctccagcatctgggaaacaatgttttcctgttgcagactctctttggtgcagtcaccctcctggccaattgtgttgcaccttgggcactgaatcacatgagccgtcgactaagccagatgcttctcatgttcctactggcaacctgccttctggccatcatatttgtgcctcaagaaatgcagaccctgcgtgtggttttggcaaccctgggtgtgggagctgcttctcttggcattacctgttctactgcccaagaaaatgaactaattccttccataatcaggggaagagctactggaatcactggaaactttgctaatattgggggagccctggcttccctcatgatgatcctaagcatatattctcgacccctgccctggatcatctatggagtctttgccatcctctctggccttgttgtcctcctccttcctgaaaccaggaaccagcctcttcttgacagcatccaggatgtggaaaatgagggagtaaatagcctagctgcccctcagaggagctctgtgctataggtctgtgctgaggaaagcaaaacaccatttagggctaccatcccccaaaaag

SEQ ID NO: 6550 - protein, 547 aa, Homo sapiens
MAFQDLLDQVGGLGRFQILQMVFLIMFNVIVYHQTQLENFAAFILDHRCWVHILDNDTIPDNDPGTLSQDALLRISIPFDSNLRPEKCRRFVHPQWKLIHLNGTFPNTSEPDTEPCVDGWVYDQSSFPSTIVTKWDLVCESQPLNSVAKFLFMAGMMVGGNLYGHLSDRFGRKFVLRWSYLQLAIVGTCAAFAPTILVYCSLRFLAGAATFSIIVNTVLLIVEWITHQFCAMALTLTLCAASIGHITLGSLAFVIRDQCILQLVMSAPCFVFFLFSRWLAESARWLIINNKPEEGLKELRKAAHRNGMKNAEDILTMEVLKSTMKQELEAAQKKHSLCELLRIPNICKRICFLSFVRFASTIPFWGLTLHLQHLGNNVFLLQTLFGAVTLLANCVAPWALNHMSRRLSQMLLMFLLATCLLAIIFVPQEMQTLRVVLATLGVGAASLGITCSTAQENELIPSIIRGRATGITGNFANIGGALASLMMILSIYSRPLPWIIYGVFAILSGLVVLLLPETRNQPLLDSIQDVENEGVNSLAAPQRSSVL

SEQ ID NO: 6551 - DNA, 3848 bp, Homo sapiens
attcatggctggaatgatggtgggaggcaacctatatggccatttgtcagacaggaaaccattatcatcgcccaaccatgtctccactgattgtgacgagggacttgaggtgcccattgccatccaccagcatcacgtcttctggtatctctcctgaaaccctgaatgaaaatggcctccatctgcatccatgttgctgcagaagacatgatttcattcttttttgtggctacatagtattccagtctaccattggtgggcattgaggttattccatgcctttgctactgtgaatagtgcttcaatgaacatgtttgggagaaagttcgtgctcagatggtcttacctccagctcgccattgtaggcacctgtgcggcctttgctcccaccatcctcgtatactgctccctgcgcttcttggctggggctgctacatttagcatcattgtaaatactgttttgttaattgtagagtggataactcaccaattctgtgccatggcattgacattgacactttgtgctgctagtattggacatataaccctgggaagcctggcttttgtcattcgagaccagtgcatcctccagttggtgatgtctgcaccatgctttgtcttctttctgttctcaaggtggctggcagagtctgctcggtggctcattatcaacaacaaaccagaagagggcttaaaggaacttagaaaagctgcacacaggaatggaatgaagaatgctgaagacatcctaaccatggaggttttgaaatccaccatgaagcaagaactggaggcagcacagaaaaagcattctctttgtgaattgctccgcatacccaacatatgtaaaagaatctgtttcctgtcctttgtgaggtctgctggagtttgctggaggtccactccagatcctgtttgcttgggtatcaccagcggaggttgcagaacagcaaagattcctgcctgctccttcctctggaagcttcattttagaggagcacctgcctgatgccagccagagctctcctgtatgaagtgtctgttgacccctgctgggaagtgtctcccagtcaggaggcacaggtgttagtgacccacttaaggaggcagtctatcccttagcagagctcaagcactgtgctgagagatccactgctctcttcagagctggcaagcaagaatgtttaagtccactgaagctgcacccacagccaccccttccccaaagtgctctgtcccaggtgatgggagttttatctataagcccttgactggggctgctgcctttctctcagagatgccctgcccagtgaggaggaatctagagaggcagtctggccacagttgctttgcagcactgcagtaagttccacacagtttgaacttcccaatggcttccttaacactgtgaggggaaaactgcctacacaagcctcagtaatggtggacattcctctcccaccaaggttgatcatcccagttcgacctcagactgatgtgctggcagtgagaatttcaagccagtggttcttagcttgctgggctccatgggagtgggacctgctgagcgagaccacttggctttctggcatcagccccttctccaggagagtgaatggttctggccctggtagcattggcacacaagggaatctcctggtctgcgtgttgcaaaaactatgggaaaagcataatttctgggctggatagcacagtccctatggcttccttgggtaggtgaggaagttccctggccctttggacttcctgggtgaggtgatgccccaccctgcttcagcttaccctccgtgggctgcacccacccgctgtctaaccagtcccagtgagatgaaccgggtacctcagttggaaatgcagaaatcactcaccttccgcattgctctcgctgggagctgcagaccagagctcttcctattcggccatcttgccagctgtctctatcgactacctcttattccaaaaaataaaaccataatgaagttagacaccattaaatatacataatataaaaataggttttcttattctaatctagatttgctacacaagaccatctacagaatgaatgccatgaatatacaatctgtacccaataagttgtacattttagtaaacattcctgattgtaagggtggcaaatggaaattttggcttcttagatctttactgtgagtttgactgacatcagtacatttttatttttaattgtatattttcattactgtgaatttttttgcagtgatttttgatgccatgtggctacattggttttagaatactaataaaatccattgcttttaaaataaataaataaaccccatagcacatcctccatacaacatctgttgtccctcaagatacaattgttaccactatcatctaaccattattttatgataactttaaaatatcaacttgcaagaaaatattccacaaaacacactctgcctttttactttaaagagtccttggctacctgggccaatattattctcatttgtaggatttaggttccacagattataatatgtgcctttttctgtgttccctgcagatttgcaagtaccatccctttttggggccttactttgcacctccagcatctgggaaacaatgttttcctgttgcagactctctttggtgcagtcaccctcctggccaattgtgttgcaccttgggcactgaatcacatgagccgtcgactaagccagatgcttctcatgttcctactggcaacctgccttctggccatcatatttgtgcctcaaggtgagaaaagttcacaggtggaagaaagaaaatgtctttccctcttttctcagggattgccctggtcacacctatctgaagccagaaggaaagggagaattgagttctcaggattccctgatagaaatctggggctttaggacagattttgccacacggaagttgctgggaaatgagtcaaagatgagtaagattggctcggatatatggttgtcttcagcacatttgagaagtagtaagaagttggtgccatttattcctgatagtttctctaggacagcaattgatcacttgccctttggccaatcaaactcttagtaagtgttgaggtgctgggcctttgtatcccaatatgagaacacaatactgctatttcctctgtctgggctctttcttaccactacagcttctgtgacaaagtactccctaatcactacatatccactgtgtgccttgtattaggtcaccataactgcaatcctggtttaggggagtcatcttgacttcaaagaaacaaaagtcccgtatctttatgtacagaaatgtccagtaggaaggagacaattgtcaattaagaccttctcttagaatcttagaattcataaattaaatgatcacaagcaataaataagggaacccaagttgtcatcaggcttcacctcactcccggtctagtaatgtacttaagagaataccaggttggtgtgctccagttctcctcttgaatgtcagcagtgataccagtctggtgcaatgcaacagaacccactccaatgacatgaggcaattatgatctttttgttttaattggatagaatcctgcctctgaaacttcacttcatttgtttccaaagtctgatatttttctccaataaatgtccttattcttcatccttgaaacattaatactgtccaatctgtcctttaacataggaaccctgtccttttatgactgccttttgcaaacatagccccatgtcaatattgtgtatatatctgggttttaaaatctatgaggacatggatgagtcttacactccctagtattgcccacatga

SEQ ID NO: 6552 - protein, 234 aa, Homo sapiens
MNMFGRKFVLRWSYLQLAIVGTCAAFAPTILVYCSLRFLAGAATFSIIVNTVLLIVEWITHQFCAMALTLTLCAASIGHITLGSLAFVIRDQCILQLVMSAPCFVFFLFSRWLAESARWLIINNKPEEGLKELRKAAHRNGMKNAEDILTMEVLKSTMKQELEAAQKKHSLCELLRIPNICKRICFLSFVRSAGVCWRSTPDPVCLGITSGGCRTAKIPACSFLWKLHFRGAPA

SEQ ID NO: 6553 - DNA, 4020 bp, Homo sapiens
attcatacttgatcatcgctgctgggttcatatactggacaatgacactatccctgacaatgaccctgggaccctcagccaggatgccctcctgagaatctccatcccattcgactcaaatctgaggccagagaagtgtcgtcgctttgtccatccccagtggaagctcattcatctgaatgggaccttccccaacacgagtgagccagatacagagccctgtgtggatggctgggtatatgaccaaagctccttcccttccaccattgtgactaagtgggatctggtatgcgaatctcaaccactgaattcagtagctaaatttctattcatggctggaatgatggtgggaggcaacctatatggccatttgtcagacaggtttgggagaaagttcgtgctcagatggtcttacctccagctcgccattgtaggcacctgtgcggcctttgctcccaccatcctcgtatactgctccctgcgcttcttggctggggctgctacatttagcatcattgtaaatactgttttgttaattgtagagtggataactcaccaattctgtgccatggcattgacattgacactttgtgctgctagtattggacatataaccctgggaagcctggcttttgtcattcgagaccagtgcatcctccagttggtgatgtctgcaccatgctttgtcttctttctgttctcaaggtggctggcagagtctgctcggtggctcattatcaacaacaaaccagaagagggcttaaaggaacttagaaaagctgcacacaggaatggaatgaagaatgctgaagacatcctaaccatggaggttttgaaatccaccatgaagcaagaactggaggcagcacagaaaaagcattctctttgtgaattgctccgcatacccaacatatgtaaaagaatctgtttcctgtcctttgtgaggtctgctggagtttgctggaggtccactccagatcctgtttgcttgggtatcaccagcggaggttgcagaacagcaaagattcctgcctgctccttcctctggaagcttcattttagaggagcacctgcctgatgccagccagagctctcctgtatgaagtgtctgttgacccctgctgggaagtgtctcccagtcaggaggcacaggtgttagtgacccacttaaggaggcagtctatcccttagcagagctcaagcactgtgctgagagatccactgctctcttcagagctggcaagcaagaatgtttaagtccactgaagctgcacccacagccaccccttccccaaagtgctctgtcccaggtgatgggagttttatctataagcccttgactggggctgctgcctttctctcagagatgccctgcccagtgaggaggaatctagagaggcagtctggccacagttgctttgcagcactgcagtaagttccacacagtttgaacttcccaatggcttccttaacactgtgaggggaaaactgcctacacaagcctcagtaatggtggacattcctctcccaccaaggttgatcatcccagttcgacctcagactgatgtgctggcagtgagaatttcaagccagtggttcttagcttgctgggctccatgggagtgggacctgctgagcgagaccacttggctttctggcatcagccccttctccaggagagtgaatggttctgtctcactgaggttccaggtcccactgggggaaaaaaaaaaaactcctgcagctagctcagtgtctccccaaacagccacctagttttgcacttgaaacccagggccctggtagcattggcacacaagggaatctcctggtctgcgtgttgcaaaaactatgggaaaagcataatttctgggctggatagcacagtccctatggcttccttgggtaggtgaggaagttccctggccctttggacttcctgggtgaggtgatgccccaccctgcttcagcttaccctccgtgggctgcacccacccgctgtctaaccagtcccagtgagatgaaccgggtacctcagttggaaatgcagaaatcactcaccttccgcattgctctcgctgggagctgcagaccagagctcttcctattcggccatcttgccagctgtctctatcgactacctcttattccaaaaaataaaaccataatgaagttagacaccattaaatatacataatataaaaataggttttcttattctaatctagatttgctacacaagaccatctacagaatgaatgccatgaatatacaatctgtacccaataagttgtacattttagtaaacattcctgattgtaagggtggcaaatggaaattttggcttcttagatctttactgtgagtttgactgacatcagtacatttttatttttaattgtatattttcattactgtgaatttttttgcagtgatttttgatgccatgtggctacattggttttagaatactaataaaatccattgcttttaaaataaataaataaaccccatagcacatcctccatacaacatctgttgtccctcaagatacaattgttaccactatcatctaaccattattttatgataactttaaaatatcaacttgcaagaaaatattccacaaaacacactctgcctttttactttaaagagtccttggctacctgggccaatattattctcatttgtaggatttaggttccacagattataatatgtgcctttttctgtgttccctgcagatttgcaagtaccatccctttttggggccttactttgcacctccagcatctgggaaacaatgttttcctgttgcagactctctttggtgcagtcaccctcctggccaattgtgttgcaccttgggcactgaatcacatgagccgtcgactaagccagatgcttctcatgttcctactggcaacctgccttctggccatcatatttgtgcctcaaggtgagaaaagttcacaggtggaagaaagaaaatgtctttccctcttttctcagggattgccctggtcacacctatctgaagccagaaggaaagggagaattgagttctcaggattccctgatagaaatctggggctttaggacagattttgccacacggaagttgctgggaaatgagtcaaagatgagtaagattggctcggatatatggttgtcttcagcacatttgagaagtagtaagaagttggtgccatttattcctgatagtttctctaggacagcaattgatcacttgccctttggccaatcaaactcttagtaagtgttgaggtgctgggcctttgtatcccaatatgagaacacaatactgctatttcctctgtctgggctctttcttaccactacagcttctgtgacaaagtactccctaatcactacatatccactgtgtgccttgtattaggtcaccataactgcaatcctggtttaggggagtcatcttgacttcaaagaaacaaaagtcccgtatctttatgtacagaaatgtccagtaggaaggagacaattgtcaattaagaccttctcttagaatcttagaattcataaattaaatgatcacaagcaataaataagggaacccaagttgtcatcaggcttcacctcactcccggtctagtaatgtacttaagagaataccaggttggtgtgctccagttctcctcttgaatgtcagcagtgataccagtctggtgcaatgcaacagaacccactccaatgacatgaggcaattatgatctttttgttttaattggatagaatcctgcctctgaaacttcacttcatttgtttccaaagtctgatatttttctccaataaatgtccttattcttcatccttgaaacattaatactgtccaatctgtcctttaacataggaaccctgtccttttatgactgccttttgcaaacatagccccatgtcaatattgtgtatatatctgggttttaaaatctatgaggacatggatgagtcttacactccctagtattgcccacatga

SEQ ID NO: 6554 - protein, 248 aa, Homo sapiens
MAGMMVGGNLYGHLSDRFGRKFVLRWSYLQLAIVGTCAAFAPTILVYCSLRFLAGAATFSIIVNTVLLIVEWITHQFCAMALTLTLCAASIGHITLGSLAFVIRDQCILQLVMSAPCFVFFLFSRWLAESARWLIINNKPEEGLKELRKAAHRNGMKNAEDILTMEVLKSTMKQELEAAQKKHSLCELLRIPNICKRICFLSFVRSAGVCWRSTPDPVCLGITSGGCRTAKIPACSFLWKLHFRGAPA

SEQ ID NO: 6555 - DNA, 1761 bp, Homo sapiens
aacatctacctcctgatagcaaaagaactgaggaagctctttccactacggctgtattgcactggtgagtccgggcccatggatgagaaattgatgcgaggatcaatacaagcttaatttgaattaataaaaggaaatattttctccctttgaacttatctccgtaaagccattgtgcctcctcttgggggtcacgtgttcacaatcaatggcctttgaggagctcttgagtcaagttggaggccttgggagatttcagatgcttcatctggtttttattcttccctctctcatgttattaatccctcatatactgctagagaactttgctgcagccattcctggtcatcgttgctgggtccacatgctggacaataatactggatctggtaatgaaactggaatcctcagtgaagatgccctcttgagaatctctatcccactagactcaaatctgaggccagagaagtgtcgtcgctttgtccatccccagtggcagcttcttcacctgaatgggactatccacagcacaagtgaggcagacacagaaccctgtgtggatggctgggtatatgatcaaagctacttcccttcgaccattgtgactaagtgggacctggtatgtgattatcagtcactgaaatcagtggttcaattcctacttctgactggaatgctggtgggaggcatcataggtggccatgtctcagacaggtggctggtggaatctgctcggtggttgataatcaccaataaactagatgagggcttaaaggcacttagaaaagttgcacgcacaaatggaataaagaatgctgaagaaaccctgaacatagaggttgtaagatccaccatgcaggaggagctggatgcagcacagaccaaaactactgtgtgtgacttgttccgcaaccccagtatgcgtaaaaggatctgtatcctggtatttttgagaaaaaaaaatctcaaggaaaaggcataaaaatgattgctacacaaaagtgaccaaattttaagaagccttcatgagctgattggtggggaaattcagaaaaaaaaatacaggaaaagaacacaccagaagggtttttttccctacaaccagcaagaacatatattagatacatgaatctcaattataattatggcattaatttgcattttatttcaaaattaacttgtggggacatgtaatctcttgagcaatctgatatttttgggaagtcctttaaaaagttacaaatttatcaataaattactagtagataagatgattcagaaacaaaagaaaatcacagaattaggatgtggctggctggtgtatgaagcaccatgtgatgaattcataaagttgcaaaagtcaaaacaatactgtacatgcaaccagaaatcaaaataaatccagaaatagagacctatataaatgcatttaatacatgatacttttgacataataagccattggaaaacggaaagattagatactaaataacattgactatctctttgtaaatacagtcactaaatgatgttagttacttttccatggtggaattttaattactttttctttgtaatttttctctctgtatattttaaacaaatagctggtatagtttacaatattataaagatattgttcaaattgaagggcaaaggccaggttcagcaattttcaaactgtatgtacatttaataaaataactataaattaaaaaattatatttcaaatgatgtgactaataaatgaaagtacatata

SEQ ID NO: 6556 - protein, 257 aa, Homo sapiens
MAFEELLSQVGGLGRFQMLHLVFILPSLMLLIPHILLENFAAAIPGHRCWVHMLDNNTGSGNETGILSEDALLRISIPLDSNLRPEKCRRFVHPQWQLLHLNGTIHSTSEADTEPCVDGWVYDQSYFPSTIVTKWDLVCDYQSLKSVVQFLLLTGMLVGGIIGGHVSDRWLVESARWLIITNKLDEGLKALRKVARTNGIKNAEETLNIEVVRSTMQEELDAAQTKTTVCDLFRNPSMRKRICILVFLRKKNLKEKA

SEQ ID NO: 6557 - DNA, 413 bp, Homo sapiens
ggaaggttttgtgtgaggatttccagagaaatccatgcttaagccaagacttgaatggtataggtaagaaaatgtagtaaaaagaggctagagagtgtgtccactgaaagctattgcagcaagtgaacaatgagaagtcaaaagctgctgtgaagctatgctgtattggcttccttctcttccagtgggacctggtatgtgattatcagtcactgaaatcagtggttcaattcctacttctgactggaatgctggtgggaggcatcataggtggccatgtctcagacaggtttgggcgaagatttattctcagatggtgtttgctccagcttgccattactgacacctgcgctgccttcgctcccaccttccctgtttactgtgtactacgcttcttggcaggtttttcttcc

SEQ ID NO: 6558 - protein, 54 aa, Homo sapiens
MLVGGIIGGHVSDRFGRRFILRWCLLQLAITDTCAAFAPTFPVYCVLRFLAGFS

SEQ ID NO: 6559 - DNA, 350 bp, Homo sapiens
cttccatgatcattatatcaaataattctttgcccattactgagtggataaggcccaactctaaagccctggtagtaatattgtcatctggtgcccttagtattggacagataatcctgggaggcttggcttatgtcttccgagactggcaaaccctgcacgtggtggcgtctgtacctttctttgtcttctttcttctttcaaggtggctggtggaatctgctcggtggttgataatcaccaataaactagatgagggcttaaaggcacttagaaaagttgtaagatccaccatgcaggaggagctggatgcagcacagaccaaaactactgtgtgtgacttgttccgc

SEQ ID NO: 6560 - protein, 114 aa, Homo sapiens
MIIISNNSLPITEWIRPNSKALVVILSSGALSIGQIILGGLAYVFRDWQTLHVVASVPFFVFFLLSRWLVESARWLIITNKLDEGLKALRKVVRSTMQEELDAAQTKTTVCDLF

SEQ ID NO: 6561 - DNA, 1007 bp, Homo sapiens
agagcttcaggaatagatttaacggctagtaggattggagcagcactggctcccctcttgatgaccttaacggtattttttaccactttgccatggatcatttatggaatcttccccatcattggtggccttattgtcttcctcctaccagaaaccaagaatctgcctttgcctgacaccatcaaggatgtggaaaatcaaaaaaaaaatctcaaggaaaaggcataaaaatgattgctacacaaaagtgaccaaattttaagaagccttcatgagctgattggtggggaaattcagaaaaaaaaatacaggaaaagaacacaccagaagggtttttttccctacaaccagcaagaacatatattagatacatgaatctcaattataattatggcattaatttgcattttatttcaaaattaacttgtggggacatgtaatctcttgagcaatctgatatttttgggaagtcctttaaaaagttacaaatttatcaataaattactagtagataagatgattcagaaacaaaagaaaatcacagaattaggatgtggctggctggtgtatgaagcaccatgtgatgaattcataaagttgcaaaagtcaaaacaatactgtacatgcaaccagaaatcaaaataaatccagaaatagagacctatataaatgcatttaatacatgatacttttgacataataagccattggaaaacggaaagattagatactaaataacattgactatctctttgtaaatacagtcactaaatgatgttagttacttttccatggtggaattttaattactttttctttgtaatttttctctctgtatattttaaacaaatagctggtatagtttacaatattataaagatattgttcaaattgaagggcaaaggccaggttcagcaattttcaaactgtatgtacatttaataaaataactataaattaaaaaattatatttcaaatgatgtgactaataaatgaaagtacatata

SEQ ID NO: 6562 - protein, 55 aa, Homo sapiens [sequence omitted]

SEQ ID NO: 6563 - DNA, 1546 bp, Homo sapiens
aaacacatttcattgtaaacgactgggagtatctgagcaaattatttcttacgtgactttagagaaaacggctacctatctgaccccaaaacgacttgaggaaactgtttccacggtcctgctgcagaggggaagcacagtcgtcaagaagagagtggggtcaggatcaaaacacatttagtgtgacttagggaaagaaaacattttccctctttgaacctctctggatacagtcattttgcctctacttgaggatcaactgttcaacctcaatggcctttcaggacctcctgggtcacgctggtgacctgtggagattccagatccttcagactgtttttctctcaatctttgctgttgctacataccttcattttatgctggagaacttcactgcattcatacctggccatcgctgctgggtccacatcctggacaatgacactgtctctgacaatgacactggggccctcagccaagatgcactcttgagaatctccatcccactggactcaaacatgaggccagagaagtgtcgtcgctttgttcatcctcagtggcagctccttcacctgaatgggaccttccccaacacaagtgacgcagacatggagccctgtgtggatggctgggtgtatgacagaatctccttctcatccaccatcgtgactgagtgggatctggtatgtgactctcaatcactgacttcagtggctaaatttgtattcatggctggaatgatggtgggaggcatcctaggcggtcatttatcagacagtagccgagtgggcaacacacagattccaggccatgggaattacattgggaatgtgcccttctggtattgcatttatgaccctggcaggcctggcttttgccattcgagactggcatatcctccagctggtggtgtctgtaccatactttgtgatctttctgacctcaagttggctgctagagtctgctcggtggctcattatcaacaataaaccagaggaaggcttaaaggaacttagaaaagctgcacacaggagtggaatgaagaatgccagagacaccctaaccctggagattttgaaatccaccatgaaaaaagaactggaggcagcacaaaaaaaaaaaccttctctgtgtgaaatgctccacatgcccaacatatgtaaaaggatctccctcctgtcctttacgagatttgcaaactttatggcctattttggccttaatctccatgtccagcatctggggaacaatgttttcctgttgcagactctctttggtgcagtcatcctcctggccaactgtgttgcaccttgggcactgaaatacatgaaccgtcgagcaagccagatgcttctcatgttcctactggcaatctgccttctggccatcatatttgtgccacaaggagaaaagaccccagagaaccaaagcaagaggatccgagagtggaagtgacgcagttttaaggaattccaggagctgactgccgatcaatgagccagatgaagggaacaatcaggactattcctagacactagcaaaatct

SEQ ID NO: 6564 - protein, 238 aa, Homo sapiens
MAFQDLLGHAGDLWRFQILQTVFLSIFAVATYLHFMLENFTAFIPGHRCWVHILDNDTVSDNDTGALSQDALLRISIPLDSNMRPEKCRRFVHPQWQLLHLNGTFPNTSDADMEPCVDGWVYDRISFSSTIVTEWDLVCDSQSLTSVAKFVFMAGMMVGGILGGHLSDSSRVGNTQIPGHGNYIGNVPFWYCIYDPGRPGFCHSRLAYPPAGGVCTILCDLSDLKLAARVCSVAHYQQ

SEQ ID NO: 6565 - DNA, 2173 bp, Homo sapiens
aaacacatttcattgtaaacgactgggagtatctgagcaaattatttcttacgtgactttagagaaaacggctacctatctgaccccaaaacgacttgaggaaactgtttccacggtcctgctgcagaggggaagcacagtcgtcaagaagagagtggggtcaggatcaaaacacatttagtgtgacttagggaaagaaaacattttccctctttgaacctctctggatacagtcattttgcctctacttgaggatcaactgttcaacctcaatggcctttcaggacctcctgggtcacgctggtgacctgtggagattccagatccttcagactgtttttctctcaatctttgctgttgctacataccttcattttatgctggagaacttcactgcattcatacctggccatcgctgctgggtccacatcctggacaatgacactgtctctgacaatgacactggggccctcagccaagatgcactcttgagaatctccatcccactggactcaaacatgaggccagagaagtgtcgtcgctttgttcatcctcagtggcagctccttcacctgaatgggaccttccccaacacaagtgacgcagacatggagccctgtgtggatggctgggtgtatgacagaatctccttctcatccaccatcgtgactgagtgggatctggtatgtgactctcaatcactgacttcagtggctaaatttgtattcatggctggaatgatggtgggaggcatcctaggcggtcatttatcagacaggtttgggagaaggttcgtgctcagatggtgttacctccaggttgccattgttggcacctgtgcagccttggctcccaccttcctcatttactgctcactacgcttcttgtctgggattgctgcaatgagcctcataacaaatactattatgttaatagccgagtgggcaacacacagattccaggccatgggaattacattgggaatgtgcccttctggtattgcatttatgaccctggcaggcctggcttttgccattcgagactggcatatcctccagctggtggtgtctgtaccatactttgtgatctttctgacctcaagttggctgctagagtctgctcggtggctcattatcaacaataaaccagaggaaggcttaaaggaacttagaaaagctgcacacaggagtggaatgaagaatgccagagacaccctaaccctggagattttgaaatccaccatgaaaaaagaactggaggcagcacaaaaaaaaaaaccttctctgtgtgaaatgctccacatgcccaacatatgtaaaaggatctccctcctgtcctttacgagatttgcaaactttatggcctattttggccttaatctccatgtccagcatctggggaacaatgttttcctgttgcagactctctttggtgcagtcatcctcctggccaactgtgttgcaccttgggcactgaaatacatgaaccgtcgagcaagccagatgcttctcatgttcctactggcaatctgccttctggccatcatatttgtgccacaagaaatgcagacgctgcgtgaggttttggcaacactgggcttaggagcgtctgctcttgccaatacccttgcttttgcccatggaaatgaagtaattcccaccataatcagggcaagagctatggggatcaatgcaacctttgctaatatagcaggagccctggctcccctcatgatgatcctaagtgtgtattctccacccctgccctggatcatctatggagtcttccccttcatctctggctttgctttcctcctccttcctgaaaccaggaacaagcctctgtttgacaccatccaggatgagaaaaatgagagaaaagaccccagagaaccaaagcaagaggatccgagagtggaagtgacgcagttttaaggaattccaggagctgactgccgatcaatgagccagatgaagggaacaatcaggactattcctagacactagcaaaatctagaaaataaataacaaggctgggtgcggtggctcacgcctgtaatcccagcaccttgggaggctgaggcgggcagatcatgaggtcagaagataaagaccaccctggccaacatggtgaaaccctgtctctactaaaacaaatacaaaacttcgctggg

SEQ ID NO: 6566 - protein, 553 aa, Homo sapiens; identical to SEQ ID NO: 894

SEQ ID NO: 6567 - DNA, 2341 bp, Homo sapiens
aaacacatttcattgtaaacgactgggagtatctgagcaaattatttcttacgtgactttagagaaaacggctacctatctgaccccaaaacgacttgaggaaactgtttccacggtcctgctgcagaggggaagcacagtcgtcaagaagagagtggggtcaggatcaaaacacatttagtgtgacttagggaaagaaaacattttccctctttgaacctctctggatacagtcattttgcctctacttgaggatcaactgttcaacctcaatggcctttcaggacctcctgggtcacgctggtgacctgtggagattccagatccttcagactgtttttctctcaatctttgctgttgctacataccttcattttatgctggagaacttcactgcattcatacctggccatcgctgctgggtccacatcctggacaatgacactgtctctgacaatgacactggggccctcagccaagatgcactcttgagaatctccatcccactggactcaaacatgaggccagagaagtgtcgtcgctttgttcatcctcagtggcagctccttcacctgaatgggaccttccccaacacaagtgacgcagacatggagccctgtgtggatggctgggtgtatgacagaatctccttctcatccaccatcgtgactgagtgggatctggtatgtgactctcaatcactgacttcagtggctaaatttgtattcatggctggaatgatggtgggaggcatcctaggcggtcatttatcagacaggtttgggagaaggttcgtgctcagatggtgttacctccaggttgccattgttggcacctgtgcagccttggctcccaccttcctcatttactgctcactacgcttcttgtctgggattgctgcaatgagcctcataacaaatactattatgttaatagccgagtgggcaacacacagattccaggccatgggaattacattgggaatgtgcccttctggtattgcatttatgaccctggcaggcctggcttttgccattcgagactggcatatcctccagctggtggtgtctgtaccatactttgtgatctttctgacctcaagttggctgctagagtctgctcggtggctcattatcaacaataaaccagaggaaggcttaaaggaacttagaaaagctgcacacaggagtggaatgaagaatgccagagacaccctaaccctggagattttgaaatccaccatgaaaaaagaactggaggcagcacaaaaaaaaaaaccttctctgtgtgaaatgctccacatgcccaacatatgtaaaaggatctccctcctgtcctttacgagatttgcaaactttatggcctattttggccttaatctccatgtccagcatctggggaacaatgttttcctgttgcagactctctttggtgcagtcatcctcctggccaactgtgttgcaccttgggcactgaaatacatgaaccgtcgagcaagccagatgcttctcatgttcctactggcaatctgccttctggccatcatatttgtgccacaagaaatgcagacgctgcgtgaggttttggcaacactgggcttaggagcgtctgctcttgccaatacccttgcttttgcccatggaaatgaagtaattcccaccataatcagggcaagagctatggggatcaatgcaacctttgctaatatagcaggagccctggctcccctcatgatgatcctaagtgtgtattctccacccctgccctggatcatctatggagtcttccccttcatctctggctttgctttcctcctccttcctgaaaccaggaacaagcctctgtttgacaccatccaggatgagaaaaatgagagaaaagaccccagagaaccaaagcaagaggatccgagagtggaagtgacgcagttttaaggaattccaggagctgactgccgatcaatgagccagatgaagggaacaatcaggactattcctagacactagcaaaatctagaaaataaataacaaggctgggtgcggtggctcacgcctgtaatcccagcaccttgggaggctgaggcgggcagatcatgaggtcagaagataaagaccaccctggccaacatggtgaaaccctgtctctactaaaacaaatacaaaacttcgctgggcacagtggcacaggcctttaattccagctacttgggaggctgaggcaggagaattacttgaacccaggaggtggaaattgcaatgagccaagattgggccactgcattccagcctggtgacagagcgagactgtctcaaaaaaaaaaaaaaaaaaaaaagaaagaagg

SEQ ID NO: 6568 - protein, 553 aa, Homo sapiens; identical to SEQ ID NO: 894

SEQ ID NO: 6569 - DNA, 966 bp, Homo sapiens; identical to SEQ ID NO: 895

SEQ ID NO: 6570 - protein, 321 aa, Homo sapiens; identical to SEQ ID NO: 896

SEQ ID NO: 6571 - DNA, 819 bp, Homo sapiens
ggttcctcttctgggtcttccagatcccggcccccttccccgagtacgtcactgacctgtgcatctgcatcaacagcagcgccaagcccatcgtctacttcctggccgggagggacaagtcgcagcggctgtgggagccgctcagggtggtcttccagcgggccctgcgggacggcgctgagctgggggaggccgggggcagcacgcccaacacagtcaccatggagatgcagtgtcccccggggaacgcctcctgagactccagcgcctggaggaggcaggggcaggaagcggcctccaagacccttcgccttgggacaggaatgggcacctgcttctgagtccatacaggagaagaaagatctgtttcctctcctcgggcctccttctccctgggctggggactccaggggtggctgggagactgggcagccaccagcaaacagaccctgtggcccctgcccggctcccccacccattctgctcccctagagacctcttgtacagaagttgcccccaggtggtggggcccctccttgccctaggctgccttttctgactccgggacgagccagtcctaggctgcctccgggagcacttgaggtatcccgcaggccatgaggacccactgggcagctcctggacagcctcttggctccagcccccacccgaaagtggacactggctccgccctggccacctggggactggcactgtggtgcacagtggcccaatgtggccaacggaagttttataaaagacaaaatgtatatcaataaacattttataacttgcagccaggaaggcttcatgcccaca

SEQ ID NO: 6572 - protein, 53 aa, Homo sapiens
MRTHWAAPGQPLGSSPHPKVDTGSALATWGLALWCTVAQCGQRKFYKRQNVYQ

SEQ ID NO: 6573 - DNA, 1893 bp, Homo sapiens
aaagccatctcttccagcaggagagggctctactctgagctcctattttccaaggctccgggccgcgctcggcgctggcctgctgccccggcggtcatgaactacatcttcctgctcctctgcctgtgtggcctggtgggcaacgggctggtcctctggtttttcggcttctccatcaagaggaaccccttctccatctacttcctgcacctggccagcgccgatgtgggctacctcttcagcaaggcggtgttctccatcctgaacacggggggcttcctgggcacgtttgccgactacatccgcagcgtgtgccgggtcctggggctctgcatgttccttaccggcgtgagcctcctgccggccgtcagcgccgagcgctgcgcctcggtcatcttccccgcctggtactggcgccggcggcccaagcgcctgtcggccgtggtgtgcgccctgctgtgggtcctgtccctcctggtcacctgcctgcacaactacttctgcgtgttcctgggccgcggggcccccggcgcggcctgcaggcacatggacatcttcctgggcatcctcctgttcctgctctgctgcccgctcatggtgctgccctgcctggccctcatcctgcacgtggagtgccgggcccgacggcgccagcgctctgccaagctcaaccacgtcatcctggccatggtctccgtcttcctggtgtcctccatctacttagggatcgactggttcctcttctgggtcttccagatcccggcccccttccccgagtacgtcactgacctgtgcatctgcatcaacagcagcgccaagcccatcgtctacttcctggccgggagggacaagtcgcagcggctgtgggagccgctcagggtggtcttccagcgggccctgcgggacggcgctgagctgggggaggccgggggcagcacgcccaacacagtcaccatggagatgcagtgtcccccggggaacgcctcctgagactccagcgcctggaggaggcaggggcaggaagcggcctccaagacccttcgccttgggacaggaatgggcacctgcttctgagtccatacaggagaagaaagatctgtttcctctcctcgggcctccttctccctgggctggggactccaggggtggctgggagactgggcagccaccagcaaacagaccctgtggcccctgcccggctcccccacccattctgctcccctagagacctcttgtacagaagttgcccccaggtggtggggcccctccttgccctaggctggttggtaaaagagaggaggtcaacacccagcctagccacctctgcctcttgggtcagccctccttgactgtgtcccagccagcaccaggccagcagcctcatccctgccattcagggctgttccagagattcgatcctcttaaggcattatcagtgagcaaatgtgaaggaaatggtgtctggaagaaagttctggttcacatgccttgtagctaagtctttctgcaaacaacctcccttccccccgtcgagtcatttggtgactttgatggggggatttctggttatgtcaaggctctggagacaggaagggcctttggccgccttgggtagttgacctgccttttctgactccgggacgagccagtcctaggctgcctccgggagcacttgaggtatcccgcaggccatgaggacccactgggcagctcctggacagcctcttggctccagcccccacccgaaagtggacactggctccgccctggccacctggggactggcactgtggtgcacagtggcccaatgtggccaacggaagttttataaaagacaaaatgtatatcaataaacattttataacttgcagccaggaaggcttcatgcccaca

SEQ ID NO: 6574 - protein, 297 aa, Homo sapiens [sequence omitted]

SEQ ID NO: 6575 - DNA, 2114 bp, Homo sapiens
ctcttccagcaggagagggctctactctgagctcctattttccaaggctccgggccgcgctcggcgctggcctgctgccccggcgggtccgccggccggaggcgggagtcacaggaagagccctccacaaaaggaggcctcggcggatcaggacagctgcaggtgggtgtgcagactggtgagctgccagcaggggcccagacgcgccaggcctggagatggctggaaactgctcctgggaggcccatcccggcaacaggaacaaggtaagtgccacaggcatcgagcagatcgcgatgctgccgcctccggccgtcatgaactacatcttcctgctcctctgcctgtgtggcctggtgggcaacgggctggtcctctggtttttcggcttctccatcaagaggaaccccttctccatctacttcctgcacctggccagcgccgatgtgggctacctcttcagcaaggcggtgttctccatcctgaacacggggggcttcctgggcacgtttgccgactacatccgcagcgtgtgccgggtcctggggctctgcatgttccttaccggcgtgagcctcctgccggccgtcagcgccgagcgctgcgcctcggtcatcttccccgcctggtactggcgccggcggcccaagcgcctgtcggccgtggtgtgcgccctgctgtgggtcctgtccctcctggtcacctgcctgcacaactacttctgcgtgttcctgggccgcggggcccccggcgcggcctgcaggcacatggacatcttcctgggcatcctcctgttcctgctctgctgcccgctcatggtgctgccctgcctggccctcatcctgcacgtggagtgccgggcccgacggcgccagcgctctgccaagctcaaccacgtcatcctggccatggtctccgtcttcctggtgtcctccatctacttagggatcgactggttcctcttctgggtcttccagatcccggcccccttccccgagtacgtcactgacctgtgcatctgcatcaacagcagcgccaagcccatcgtctacttcctggccgggagggacaagtcgcagcggctgtgggagccgctcagggtggtcttccagcgggccctgcgggacggcgctgagctgggggaggccgggggcagcacgcccaacacagtcaccatggagatgcagtgtcccccggggaacgcctcctgagactccagcgcctggaggaggcaggggcaggaagcggcctccaagacccttcgccttgggacaggaatgggcacctgcttctgagtccatacaggagaagaaagatctgtttcctctcctcgggcctccttctccctgggctggggactccaggggtggctgggagactgggcagccaccagcaaacagaccctgtggcccctgcccggctcccccacccattctgctcccctagagacctcttgtacagaagttgcccccaggtggtggggcccctccttgccctaggctggttggtaaaagagaggaggtcaacacccagcctagccacctctgcctcttgggtcagccctccttgactgtgtcccagccagcaccaggccagcagcctcatccctgccattcagggctgttccagagattcgatcctcttaaggcattatcagtgagcaaatgtgaaggaaatggtgtctggaagaaagttctggttcacatgccttgtagctaagtctttctgcaaacaacctcccttccccccgtcgagtcatttggtgactttgatggggggatttctggttatgtcaaggctctggagacaggaagggcctttggccgccttgggtagttgacctgccttttctgactccgggacgagccagtcctaggctgcctccgggagcacttgaggtatcccgcaggccatgaggacccactgggcagctcctggacagcctcttggctccagcccccacccgaaagtggacactggctccgccctggccacctggggactggcactgtggtgcacagtggcccaatgtggccaacggaagttttataaaagacaaaatgtatatcaataaacattttataacttgcagccaggaaggcttcatgcccaca

SEQ ID NO: 6576 - protein, 330 aa, Homo sapiens
MAGNCSWEAHPGNRNKVSATGIEQIAMLPPPAVMNYIFLLLCLCGLVGNGLVLWFFGFSIKRNPFSIYFLHLASADVGYLFSKAVFSILNTGGFLGTFADYIRSVCRVLGLCMFLTGVSLLPAVSAERCASVIFPAWYWRRRPKRLSAVVCALLWVLSLLVTCLHNYFCVFLGRGAPGAACRHMDIFLGILLFLLCCPLMVLPCLALILHVECRARRRQRSAKLNHVILAMVSVFLVSSIYLGIDWFLFWVFQIPAPFPEYVTDLCICINSSAKPIVYFLAGRDKSQRLWEPLRVVFQRALRDGAELGEAGGSTPNTVTMEMQCPPGNAS

SEQ ID NO: 6577 - DNA, 1643 bp, Homo sapiens
aaagccatctcttccagcaggagagggctctactctgagctcctattttccaaggctccgggccgcgctcggcgctggcctgctgccccggcgggtccgccggccggaggcgggagtcacaggaagagccctccacaaaaggaggcctcggcggatcaggacagctgcaggtgggtgtgcagactggtgagctgccagcaggggcccagacgcgccaggcctggagatggctggaaactgctcctgggaggcccatcccggcaacaggaacaagatgtgccctggcctgagcgaggccccggaactctacagccggggcttcctgaccatcgagcagatcgcgatgctgccgcctccggccgtcatgaactacatcttcctgctcctctgcctgtgtggcctggtgggcaacgggctggtcctctggtttttcggcttctccatcaagaggaaccccttctccatctacttcctggatcgactggttcctcttctgggtcttccagatcccggcccccttccccgagtacgtcactgacctgtgcatctgcatcaacagcagcgccaagcccatcgtctacttcctggccgggagggacaagtcgcagcggctgtgggagccgctcagggtggtcttccagcgggccctgcgggacggcgctgagctgggggaggccgggggcagcacgcccaacacagtcaccatggagatgcagtgtcccccggggaacgcctcctgagactccagcgcctggaggaggcaggggcaggaagcggcctccaagacccttcgccttgggacaggaatgggcacctgcttctgagtccatacaggagaagaaagatctgtttcctctcctcgggcctccttctccctgggctggggactccaggggtggctgggagactgggcagccaccagcaaacagaccctgtggcccctgcccggctcccccacccattctgctcccctagagacctcttgtacagaagttgcccccaggtggtggggcccctccttgccctaggctggttggtaaaagagaggaggtcaacacccagcctagccacctctgcctcttgggtcagccctccttgactgtgtcccagccagcaccaggccagcagcctcatccctgccattcagggctgttccagagattcgatcctcttaaggcattatcagtgagcaaatgtgaaggaaatggtgtctggaagaaagttctggttcacatgccttgtagctaagtctttctgcaaacaacctcccttccccccgtcgagtcatttggtgactttgatggggggatttctggttatgtcaaggctctggagacaggaagggcctttggccgccttgggtagttgacctgccttttctgactccgggacgagccagtcctaggctgcctccgggagcacttgaggtatcccgcaggccatgaggacccactgggcagctcctggacagcctcttggctccagcccccacccgaaagtggacactggctccgccctggccacctggggactggcactgtggtgcacagtggcccaatgtggccaacggaagttttataaaagacaaaatgtatatcaataaacattttataacttgcagccaggaaggcttcatgcccaca

SEQ ID NO: 6578 - protein, 103 aa, Homo sapiens
MAGNCSWEAHPGNRNKMCPGLSEAPELYSRGFLTIEQIAMLPPPAVMNYIFLLLCLCGLVGNGLVLWFFGFSIKRNPFSIYFLDRLVPLLGLPDPGPLPRVRH

SEQ ID NO: 6579 - DNA, 2318 bp, Homo sapiens
gatgagttcccggtggggctctggggggggctcctgagcggggcattccttcctgaagcctcatccccgctcagccctgctcagcccctcctcctactcccctccccctccccctcctgccgggccaggaattgggtttggggcgggttctgcttccaaagccatctcttccagcaggagagggctctactctgagctcctattttccaaggctccgggccgcgctcggcgctggcctgctgccccggcgggtccgccggccggaggcgggagtcacaggaagagccctccacaaaaggaggcctcggcggatcaggacagctgcaggtgggtgtgcagactggtgagctgccagcaggggcccagacgcgccaggcctggagatggctggaaactgctcctgggaggcccatcccggcaacaggaacaagatgtgccctggcctgagcgaggccccggaactctacagccggggcttcctgaccatcgagcagatcgcgatgctgccgcctccggccgtcatgaactacatcttcctgctcctctgcctgtgtggcctggtgggcaacgggctggtcctctggtttttcggcttctccatcaagaggaaccccttctccatctacttcctgcacctggccagcgccgatgtgggctacctcttcagcaaggcggtgttctccatcctgaacacggggggcttcctgggcacgtttgccgactacatccgcagcgtgtgccgggtcctggggctctgcatgttccttaccggcgtgagcctcctgccggccgtcagcgccgagcgctgcgcctcggtcatcttccccgcctggtactggcgccggcggcccaagcgcctgtcggccgtggtgtgcgccctgctgtgggtcctgtccctcctggtcacctgcctgcacaactacttctgcgtgttcctgggccgcggggcccccggcgcggcctgcaggcacatggacatcttcctgggcatcctcctgttcctgctctgctgcccgctcatggtgctgccctgcctggccctcatcctgcacgtggagtgccgggcccgacggcgccagcgctctgccaagctcaaccacgtcatcctggccatggtctccgtcttcctggtgtcctccatctacttagggatcgactggttcctcttctgggtcttccagatcccggcccccttccccgagtacgtcactgacctgtgcatctgcatcaacagcagcgccaagcccatcgtctacttcctggccgggagggacaagtcgcagcggctgtgggagccgctcagggtggtcttccagcgggccctgcgggacggcgctgagctgggggaggccgggggcagcacgcccaacacagtcaccatggagatgcagtgtcccccggggaacgcctcctgagactccagcgcctggaggaggcaggggcaggaagcggcctccaagacccttcgccttgggacaggaatgggcacctgcttctgagtccatacaggagaagaaagatctgtttcctctcctcgggcctccttctccctgggctggggactccaggggtggctgggagactgggcagccaccagcaaacagaccctgtggcccctgcccggctcccccacccattctgctcccctagagacctcttgtacagaagttgcccccaggtggtggggcccctccttgccctaggctggttggtaaaagagaggaggtcaacacccagcctagccacctctgcctcttgggtcagccctccttgactgtgtcccagccagcaccaggccagcagcctcatccctgccattcagggctgttccagagattcgatcctcttaaggcattatcagtgagcaaatgtgaaggaaatggtgtctggaagaaagttctggttcacatgccttgtagctaagtctttctgcaaacaacctcccttccccccgtcgagtcatttggtgactttgatggggggatttctggttatgtcaaggctctggagacaggaagggcctttggccgccttgggtagttgacctgccttttctgactccgggacgagccagtcctaggctgcctccgggagcacttgaggtatcccgcaggccatgaggacccactgggcagctcctggacagcctcttggctccagcccccacccgaaagtggacactggctccgccctggccacctggggactggcactgtggtgcacagtggcccaatgtggccaacggaagttttataaaagacaaaatgtatatcaataaacattttataacttgcagccaggaaggcttcatgcccaca

SEQ ID NO: 6580 - protein, 343 aa, Homo sapiens
MAGNCSWEAHPGNRNKMCPGLSEAPELYSRGFLTIEQIAMLPPPAVMNYIFLLLCLCGLVGNGLVLWFFGFSIKRNPFSIYFLHLASADVGYLFSKAVFSILNTGGFLGTFADYIRSVCRVLGLCMFLTGVSLLPAVSAERCASVIFPAWYWRRRPKRLSAVVCALLWVLSLLVTCLHNYFCVFLGRGAPGAACRHMDIFLGILLFLLCCPLMVLPCLALILHVECRARRRQRSAKLNHVILAMVSVFLVSSIYLGIDWFLFWVFQIPAPFPEYVTDLCICINSSAKPIVYFLAGRDKSQRLWEPLRVVFQRALRDGAELGEAGGSTPNTVTMEMQCPPGNAS

SEQ ID NO: 6581 - DNA, 639 bp, Homo sapiens
cgctggcctgctgccccggcgggtccgccggccggaggcgggagtcacaggaagagccctccacaaaaggaggcctcggcggatcaggacagctgcaggtgggtgtgcagactggtgagctgccagcaggggcccagacgcgccaggcctggagatggctggaaactgctcctgggaggcccatcccggcaacaggaacaaggtaagtgccacaggcggagggccctggtcttgcccagacgggtgtgggtgggaggggcagacccagcccagcatctcctcccccatcccccccttcctggccccactttccagctctggacccaccgtgggcagtgggctcctctgggctatgtggccgggcacaagttccctggaccctcctaccctcctgtcctcatcagtgaggcaagcaccaggactggacctcaaggtccctcgctgtgctgacactgtggtcgccttgtagcatccttgcaaggtcttgtttcatctcttccctgcagaggtggggcagtcagctacttactacagccaggcgggccaggaagccctgggacgctgactccaaggtggccctgatgtcatgtgctccatggagcctagggggtcctgggccaccccgagagtgttgcccca

SEQ ID NO: 6582 - protein, 104 aa, Homo sapiens
MAGNCSWEAHPGNRNKVSATGGGPWSCPDGCGWEGQTQPSISSPIPPFLAPLSSSGPTVGSGLLWAMWPGTSSLDPPTLLSSSVRQAPGLDLKVPRCADTVVAL

SEQ ID NO: 6583 - DNA, 1488 bp, Homo sapiens
ctgcttaacagcttggattgaagaggcttgtctggggggactgagaccttgcagatcattccaggagccgcctccatccaaggccaacagcttcatcaggccgcaggcctgggagaagccctaatagcaatcagatggcgcaagtggaaaatcacggcgctcggcaagcaagctggaaattggcgggctgtggtgcctggtgcctgcgctgctcagcgggaggatgagtcaggagtgtagtgcccagactgggagagatgtgcctctgtgggcatcttgaagggaaatgagaagcggagctgcccctgcacctgcgctgggagctgcctgcctcctgcttgtcctggccatgtgcgaacctcagcgtggaagagggactctcgcactgctccctgcgcggctcagctggcctcctgggggcagccagctggggcccagctggaacgcttgtttacatggggaggccgggggaggctgaatcccggcgagttccaagtgtaattgcgtttggacacttaaaaggaattgtgtgaagtgggcagaggctctgaagtccaccgccttatttggtgcttctgtggcctatggttgccctgctgctccctggacgagggggtgggtgtggaccagccctcgtggcccctctgcagccagcaccatcctcagtaaagactacagaagccacaagaaactaatccatggggatggccaggcctgattagctggggtggggctggaggctcctctacagagatgatgcttacactgagacctgaaggagaaggaggaggtggctgctcacgcaacccacaggaaagtgttccaggatcaagaacagcaggtgcaaaggccccgtgatggaaaggattggtgcactaggagaacaaagtgggtggctgcagggcaggaggggagggtgcatgtgcaggctgggcaggagggtagggccttgaggcaccctacaggcccctgtaagtccaggcacagagctgctgccttgagccctgaggtctggacattccagtttcccatctttccaatgtgggactctctgccttttccaattccccacttccctgatgccagatactgcctgactgtgtccatctctcccccgtcccctgggccacctccctgctgagacccctcactggtgcctcccaggtgcattctcctcgctgcccccagcagagtccttcccacacacccagctcctcggtgtggtgcctgcccgtgggtgggtggtgcaccccactggcatccctcctctgccctgtccacctcaacttccagggcagcctggacaccaggtttggtctacctcgtccacacccgcctgcttctgtcccgccttaagcggatccgtgatgtcccgtcattagaccttcaatttcagcacaggactgaataactaaccttcaaaaagtttgcagtagccttgtcactcctaaaaataacaaataattccttaaacatcattcaacatcc

SEQ ID NO: 6584 - protein, 63 aa, Homo sapiens
MRSGAAPAPALGAACLLLVLAMCEPQRGRGTLALLPARLSWPPGGSQLGPSWNACLHGEAGGG

SEQ ID NO: 6585 - DNA, 2273 bp, Homo sapiens
agcaaaaacgccagggacggggtctccgcgcctgcgcagtgaagctgggcgccttcggggcttgagcttctgagggtcgggtccagcgcgtgggctgctggatggcggaaccccaggcggagtcggagcccctgctgggcggggcccgcggcggtggcggcgactggccggcggggctgaccacttaccgcagcatccaagtcggccctggtgccgcggccaggtgggacctctgcattgatcaggctgtggtcttcatcgaagatgctattcagtaccgctccatcaaccaccgggtggatgccagctcgatgtggctttaccgacggtattactcgaacgtatgccaacggactttgagcttcaccatcttcttgatcctgtttttggcttttatcgagaccccatcctcactcaccagcacggcggacgtgcgctaccgcgctgctccctgggagccgccctgcggcctgaccgagagtgtcgaggtgctctgcctgctggtctttgcggccgacctctctgtgaagggttacctgttcgggtgggcccatttccagaaaaacctttggctgctgggctacctcgtggtgctggtggtgtctctggtggactggaccgtgtccctgagtctcgtgtgtcatgagcccctgcggatccgccggcttctccgtcccttcttcctgctgcagaactcctctatgatgaagaagaccttgaaatgcatccgctggtcgctgccggaaatggccagcgtcgggctgctgctggccatccacctgtgcctcttcaccatgttcggaatgctgctgttcgctggtgggaagtgatgattcctgcgtattccaagaaccgggcctatgccatcttcttcatagtcttcactgtgataggaagcctgtttctgatgaacctgctgacagccatcatctacagtcagttccggggctacctgatgaaatctctccagacctcgctgtttcggaggcggctgggaacccgggctgcctttgaagtcctatcctccatggtgggggagggaggagccttccctcaggcagttggggtgaagccccagaacttgctgcaggtgcttcagaaggtccagctggacagctcccacaaacaggccatgatggagaaggtgcgttcctatggcagtgttctgctctcagctgaggagtttcagaagctcttcaacgagcttgacagaagtgtggttaaagagcacccgccgaggcccgagtaccagtctccgtttctgcagagcgcccagttcctcttcggccactactactttgactacctggggaacctcatcgccctggcaaacctggtgtccatttgcgtgttcctggtgctggatgcagatgtgctgcctgctgagcgtgatgacttcatcctggggaacttgatggtggtgaacaactggcaggtgtttctggatgcatatcggcgctactcaggcccgtggtccaagatctattttgtattgtggtggctggtgtcgtctgtcatctgggtcaacctgtttctggccctgattctggagaacttccttcacaagtgggacccccgcagccacctgcagccccttgctgggaccccagaggccacctaccagatgactgtggagctcctgttcagggatattctggaggagcccggggaggatgagctcacagagaggctgagccagcacccgcacctgtggctgtgcaggtgacgtccgggctgccgtcccagcaggggcggcaggagagagaggctggcctacacaggtgcccgtcatggaagaggcggccatgctgtggccagccaggcaggaagagacctttcctctgacggaccactaagctggggacaggaaccaagtcctttgcgtgtggcccaacaaccatctacagaacagctgctggtgcttcagggaggcgccgtgccctccgctttcttttatagctgcttcagtgagaattccctcgtcgactccacagggacctttcagacaaaaatgcaagaagcagcggcctcccctgtcccctgcagcttccgtggtgcctttgctgccggcagcccttggggaccacaggcctgaccagggcctgcacaggttaaccgtcagacttccggggcattcaggtggggatgctggtggtttgacatggagagaaccttgactgtgttttattatttcatggcttgtatgagtgtgactgggtgtgtttctttagggttctgattgccagttattttcatcaataagtcttgcaaag

SEQ ID NO: 6586 - protein, 334 aa, Homo sapiens
MHPLVAAGNGQRRAAAGHPPVPLHHVRNAAVRWWEVMIPAYSKNRAYAIFFIVFTVIGSLFLMNLLTAIIYSQFRGYLMKSLQTSLFRRRLGTRAAFEVLSSMVGEGGAFPQAVGVKPQNLLQVLQKVQLDSSHKQAMMEKVRSYGSVLLSAEEFQKLFNELDRSVVKEHPPRPEYQSPFLQSAQFLFGHYYFDYLGNLIALANLVSICVFLVLDADVLPAERDDFILGNLMVVNNWQVFLDAYRRYSGPWSKIYFVLWWLVSSVIWVNLFLALILENFLHKWDPRSHLQPLAGTPEATYQMTVELLFRDILEEPGEDELTERLSQHPHLWLCR

SEQ ID NO: 6587 - DNA, 2907 bp, Homo sapiens
agcaaaaacgccagggacggggtctccgcgcctgcgcagtgaagctgggcgccttcggggcttgagcttctgagggtcgggtccagcgcgtgggctgctggatggcggaaccccaggcggagtcggagcccctgctgggcggggcccgcggcggtggcggcgactggccggcggggctgaccacttaccgcagcatccaagtcggccctggtgccgcggccaggtgggacctctgcattgatcaggctgtggtcttcatcgaagatgctattcagtaccgctccatcaaccaccgggtggatgccagctcgatgtggctttaccgacggtattactcgaacgtatgccaacggactttgagcttcaccatcttcttgatcctgtttttggcttttatcgagaccccatcctcactcaccagcacggcggacgtgcgctaccgcgctgctccctgggagccgccctgcggcctgaccgagagtgtcgaggtgctctgcctgctggtctttgcggccgacctctctgtgaagggttacctgttcgggtgggcccatttccagaaaaacctttggctgctgggctacctcgtggtgctggtggtgtctctggtggactggaccgtgtccctgagtctcgtgtgtcatgagcccctgcggatccgccggcttctccgtcccttcttcctgctgcagaactcctctatgatgaagaagaccttgaaatgcatccgctggtcgctgccggaaatggccagcgtcgggctgctgctggccatccacctgtgcctcttcaccatgttcggaatgctgctgttcgctggtgggaagcaggatgatgggcaggacagggagaggctgacctacttccagaacctgcctgagtctctgacttccctcctggtgctgctgaccacggccaacaaccccgatgtgatgattcctgcgtattccaagaaccgggcctatgccatcttcttcatagtcttcactgtgataggaagcctgtttctgatgaacctgctgacagccatcatctacagtcagttccggggctacctgatgaaatctctccagacctcgctgtttcggaggcggctgggaacccgggctgcctttgaagtcctatcctccatggtgggggagggaggagccttccctcaggcagttggggtgaagccccagaacttgctgcaggtgcttcagaaggtccagctggacagctcccacaaacaggccatgatggagaaggtgcgttcctatggcagtgttctgctctcagctgaggagtttcagaagctcttcaacgagcttgacagaagtgtggttaaagagcacccgccgaggcccgagtaccagtctccgtttctgcagagcgcccagttcctcttcggccactactactttgactacctggggaacctcatcgccctggcaaacctggtgtccatttgcgtgttcctggtgctggatgcagatgtgctgcctgctgagcgtgatgacttcatcctggggattctcaactgcgtcttcattgtgtactacctgttggagatgctgctcaaggtctttgccctgggcctgcgagggtacctgtcctaccccagcaacgtgtttgacgggctcctcaccgttgtcctgctggttttggagatctcaactctggctgtgtaccgattgccacacccaggctggaggccggagatggtgggcctgctgtcgctgtgggacatgacccgcatgctgaacatgctcatcgtgttccgcttcctgcgtatcatccccagcatgaagctgatggccgtggtggccagtaccgtcctgggcctggtgcagaacatgcgtgcgtttggcgggatcctggtggtggtctactacgtatttgccatcattgggatcaacttgtttagaggcgtcattgtggctcttcctggaaacagcagcctggcccctgccaatggctcggcgccctgtgggagcttcgagcagctggagtactgggccaacaacttcgatgactttgcggctgccctggtcactctgtggaacttgatggtggtgaacaactggcaggtgtttctggatgcatatcggcgctactcaggcccgtggtccaagatctattttgtattgtggtggctggtgtcgtctgtcatctgggtcaacctgtttctggccctgattctggagaacttccttcacaagtgggacccccgcagccacctgcagccccttgctgggaccccagaggccacctaccagatgactgtggagctcctgttcagggatattctggaggagcccggggaggatgagctcacagagaggctgagccagcacccgcacctgtggctgtgcaggtgacgtccgggctgccgtcccagcaggggcggcaggagagagaggctggcctacacaggtgcccgtcatggaagaggcggccatgctgtggccagccaggcaggaagagacctttcctctgacggaccactaagctggggacaggaaccaagtcctttgcgtgtggcccaacaaccatctacagaacagctgctggtgcttcagggaggcgccgtgccctccgctttcttttatagctgcttcagtgagaattccctcgtcgactccacagggacctttcagacaaaaatgcaagaagcagcggcctcccctgtcccctgcagcttccgtggtgcctttgctgccggcagcccttggggaccacaggcctgaccagggcctgcacaggttaaccgtcagacttccggggcattcaggtggggatgctggtggtttgacatggagagaaccttgactgtgttttattatttcatggcttgtatgagtgtgactgggtgtgtttctttagggttctgattgccagttattttcatcaataagtcttgcaaag

SEQ ID NO: 6588 - protein, 752 aa, Homo sapiens
MAEPQAESEPLLGGARGGGGDWPAGLTTYRSIQVGPGAAARWDLCIDQAVVFIEDAIQYRSINHRVDASSMWLYRRYYSNVCQRTLSFTIFLILFLAFIETPSSLTSTADVRYRAAPWEPPCGLTESVEVLCLLVFAADLSVKGYLFGWAHFQKNLWLLGYLVVLVVSLVDWTVSLSLVCHEPLRIRRLLRPFFLLQNSSMMKKTLKCIRWSLPEMASVGLLLAIHLCLFTMFGMLLFAGGKQDDGQDRERLTYFQNLPESLTSLLVLLTTANNPDVMIPAYSKNRAYAIFFIVFTVIGSLFLMNLLTAIIYSQFRGYLMKSLQTSLFRRRLGTRAAFEVLSSMVGEGGAFPQAVGVKPQNLLQVLQKVQLDSSHKQAMMEKVRSYGSVLLSAEEFQKLFNELDRSVVKEHPPRPEYQSPFLQSAQFLFGHYYFDYLGNLIALANLVSICVFLVLDADVLPAERDDFILGILNCVFIVYYLLEMLLKVFALGLRGYLSYPSNVFDGLLTVVLLVLEISTLAVYRLPHPGWRPEMVGLLSLWDMTRMLNMLIVFRFLRIIPSMKLMAVVASTVLGLVQNMRAFGGILVVVYYVFAIIGINLFRGVIVALPGNSSLAPANGSAPCGSFEQLEYWANNFDDFAAALVTLWNLMVVNNWQVFLDAYRRYSGPWSKIYFVLWWLVSSVIWVNLFLALILENFLHKWDPRSHLQPLAGTPEATYQMTVELLFRDILEEPGEDELTERLSQHPHLWLCR

SEQ ID NO: 6589 - DNA, 2439 bp, Homo sapiens
agcaaaaacgccagggacggggtctccgcgcctgcgcagtgaagctgggcgccttcggggcttgagcttctgagggtcgggtccagcgcgtgggctgctggatggcggaaccccaggcggagtcggagcccctgctgggcggggcccgcggcggtggcggcgactggccggcggggctgaccacttaccgcagcatccaagtcggccctggtgccgcggccaggtgggacctctgcattgatcaggctgtggtcttcatcgaagatgctattcagtaccgctccatcaaccaccgggtggatgccagctcgatgtggctttaccgacggtattactcgaacgtatgccaacggactttgagcttcaccatcttcttgatcctgtttttggcttttatcgagaccccatcctcactcaccagcacggcggacgtgcgctaccgcgctgctccctgggagccgccctgcggcctgaccgagagtgtcgaggtgctctgcctgctggtctttgcggccgacctctctgtgaagggttacctgttcgggtgggcccatttccagaaaaacctttggctgctgggctacctcgtggtgctggtggtgtctctggtggactggaccgtgtccctgagtctcgtgtgtcatgagcccctgcggatccgccggcttctccgtcccttcttcctgctgcagaactcctctatgatgaagaagaccttgaaatgcatccgctggtcgctgccggaaatggccagcgtcgggctgctgctggccatccacctgtgcctcttcaccatgttcggaatgctgctgttcgctggtgggaagtgatgattcctgcgtattccaagaaccgggcctatgccatcttcttcatagtcttcactgtgataggaagcctgtttctgatgaacctgctgacagccatcatctacagtcagttccggggctacctgatgaaatctctccagacctcgctgtttcggaggcggctgggaacccgggctgcctttgaagtcctatcctccatggtgggggagggaggagccttccctcaggcagttggggtgaagccccagaacttgctgcaggtgcttcagaaggtccagctggacagctcccacaaacaggccatgatggagaaggtgcgttcctatggcagtgttctgctctcagctgaggagtttcagaagctcttcaacgagcttgacagaagtgtggttaaagagcacccgccgaggcccgagtaccagtctccgtttctgcagagcgcccagttcctcttcggccactactactttgactacctggggaacctcatcgccctggcaaacctggtgtccatttgcgtgttcctggtgctggatgcagatgtgctgcctgctgagcgtgatgacttcatcctggggaacttgatggtggtgaacaactggcaggtgtttctggatgcatatcggcgctactcaggcccgtggtccaagatctattttgtattgtggtggctggtgtcgtctgtcatctgggtcaacctgtttctggccctgattctggagaacttccttcacaagtgggacccccgcagccacctgcagccccttgctgggaccccagaggccacctaccagatgactgtggagctcctgttcagggatattctggaggagcccggggaggatgagctcacagagaggctgagccagcacccgcacctgtggctgtgcaggtgacgtccgggctgccgtcccagcaggggcggcaggagagagaggctggcctacacaggtgcccgtcatggaagaggcggccatgctgtggccagccaggcaggaagagacctttcctctgacggaccactaagctggggacaggaaccaagtcctttgcgtgtggcccaacaaccatctacagaacagctgctggtgcttcagggaggcgccgtgccctccgctttcttttatagctgcttcagtgagaattccctcgtcgactccacagggacctttcagacaaaaatgcaagaagcagcggcctcccctgtcccctgcagcttccgtggtgcctttgctgccggcagcccttggggaccacaggcctgaccagggcctgcacaggttaaccgtcagacttccggggcattcaggtggggatgctggtggtttgacatggagagaaccttgactgtgttttattatttcatggcttgtatgagtgtgactgggtgtgtttctttagggttctgattgccagttattttcatcaataagtcttgcaaagaatgggattgtcattcttcacttcagcacagttctagtcctgcttctctggagtagggttgttgagtaaggttgcttgggttgtgcattgcacaagggcacatggctgtgaggtgtatcctggcggggggctgtctacctgcagtgaggggcaccttttctgtttt

SEQ ID NO: 6590 - protein, 334 aa, Homo sapiens; identical to SEQ ID NO: 6586

SEQ ID NO: 6591 - DNA, 3073 bp, Homo sapiens
agcaaaaacgccagggacggggtctccgcgcctgcgcagtgaagctgggcgccttcggggcttgagcttctgagggtcgggtccagcgcgtgggctgctggatggcggaaccccaggcggagtcggagcccctgctgggcggggcccgcggcggtggcggcgactggccggcggggctgaccacttaccgcagcatccaagtcggccctggtgccgcggccaggtgggacctctgcattgatcaggctgtggtcttcatcgaagatgctattcagtaccgctccatcaaccaccgggtggatgccagctcgatgtggctttaccgacggtattactcgaacgtatgccaacggactttgagcttcaccatcttcttgatcctgtttttggcttttatcgagaccccatcctcactcaccagcacggcggacgtgcgctaccgcgctgctccctgggagccgccctgcggcctgaccgagagtgtcgaggtgctctgcctgctggtctttgcggccgacctctctgtgaagggttacctgttcgggtgggcccatttccagaaaaacctttggctgctgggctacctcgtggtgctggtggtgtctctggtggactggaccgtgtccctgagtctcgtgtgtcatgagcccctgcggatccgccggcttctccgtcccttcttcctgctgcagaactcctctatgatgaagaagaccttgaaatgcatccgctggtcgctgccggaaatggccagcgtcgggctgctgctggccatccacctgtgcctcttcaccatgttcggaatgctgctgttcgctggtgggaagcaggatgatgggcaggacagggagaggctgacctacttccagaacctgcctgagtctctgacttccctcctggtgctgctgaccacggccaacaaccccgatgtgatgattcctgcgtattccaagaaccgggcctatgccatcttcttcatagtcttcactgtgataggaagcctgtttctgatgaacctgctgacagccatcatctacagtcagttccggggctacctgatgaaatctctccagacctcgctgtttcggaggcggctgggaacccgggctgcctttgaagtcctatcctccatggtgggggagggaggagccttccctcaggcagttggggtgaagccccagaacttgctgcaggtgcttcagaaggtccagctggacagctcccacaaacaggccatgatggagaaggtgcgttcctatggcagtgttctgctctcagctgaggagtttcagaagctcttcaacgagcttgacagaagtgtggttaaagagcacccgccgaggcccgagtaccagtctccgtttctgcagagcgcccagttcctcttcggccactactactttgactacctggggaacctcatcgccctggcaaacctggtgtccatttgcgtgttcctggtgctggatgcagatgtgctgcctgctgagcgtgatgacttcatcctggggattctcaactgcgtcttcattgtgtactacctgttggagatgctgctcaaggtctttgccctgggcctgcgagggtacctgtcctaccccagcaacgtgtttgacgggctcctcaccgttgtcctgctggttttggagatctcaactctggctgtgtaccgattgccacacccaggctggaggccggagatggtgggcctgctgtcgctgtgggacatgacccgcatgctgaacatgctcatcgtgttccgcttcctgcgtatcatccccagcatgaagctgatggccgtggtggccagtaccgtcctgggcctggtgcagaacatgcgtgcgtttggcgggatcctggtggtggtctactacgtatttgccatcattgggatcaacttgtttagaggcgtcattgtggctcttcctggaaacagcagcctggcccctgccaatggctcggcgccctgtgggagcttcgagcagctggagtactgggccaacaacttcgatgactttgcggctgccctggtcactctgtggaacttgatggtggtgaacaactggcaggtgtttctggatgcatatcggcgctactcaggcccgtggtccaagatctattttgtattgtggtggctggtgtcgtctgtcatctgggtcaacctgtttctggccctgattctggagaacttccttcacaagtgggacccccgcagccacctgcagccccttgctgggaccccagaggccacctaccagatgactgtggagctcctgttcagggatattctggaggagcccggggaggatgagctcacagagaggctgagccagcacccgcacctgtggctgtgcaggtgacgtccgggctgccgtcccagcaggggcggcaggagagagaggctggcctacacaggtgcccgtcatggaagaggcggccatgctgtggccagccaggcaggaagagacctttcctctgacggaccactaagctggggacaggaaccaagtcctttgcgtgtggcccaacaaccatctacagaacagctgctggtgcttcagggaggcgccgtgccctccgctttcttttatagctgcttcagtgagaattccctcgtcgactccacagggacctttcagacaaaaatgcaagaagcagcggcctcccctgtcccctgcagcttccgtggtgcctttgctgccggcagcccttggggaccacaggcctgaccagggcctgcacaggttaaccgtcagacttccggggcattcaggtggggatgctggtggtttgacatggagagaaccttgactgtgttttattatttcatggcttgtatgagtgtgactgggtgtgtttctttagggttctgattgccagttattttcatcaataagtcttgcaaagaatgggattgtcattcttcacttcagcacagttctagtcctgcttctctggagtagggttgttgagtaaggttgcttgggttgtgcattgcacaagggcacatggctgtgaggtgtatcctggcggggggctgtctacctgcagtgaggggcaccttttctgtttt

SEQ ID NO: 6592 - protein, 752 aa, Homo sapiens; identical to SEQ ID NO: 6588

SEQ ID NO: 6593 - DNA, 2175 bp, Homo sapiens
agtgaagctgggcgccttcggggcttgagcttctgagggtcgggtccagcgcgtgggctgctggatggcggaaccccaggcggagtcggagcccctgctgggcggggcccgcggcggtggcggcgactggccggcggggctgaccacttaccgcagcatccaagtcggccctggtgccgcggccaggtgggacctctgcattgatcaggctgtggtcttcatcgaagatgctattcagggttacctgttcgggtgggcccatttccagaaaaacctttggctgctgggctacctcgtggtgctggtggtgtctctggtggactggaccgtgtccctgagtctcgtgtgtcatgagcccctgcggatccgccggcttctccgtcccttcttcctgctgcagaactcctctatgatgaagaagaccttgaaatgcatccgctggtcgctgccggaaatggccagcgtcgggctgctgctggccatccacctgtgcctcttcaccatgttcggaatgctgctgttcgctggtgggaagcaggatgatgggcaggacagggagaggctgacctacttccagaacctgcctgagtctctgacttccctcctggtgctgctgaccacggccaacaaccccgatgtgatgattcctgcgtattccaagaaccgggcctatgccatcttcttcatagtcttcactgtgataggaagcctgtttctgatgaacctgctgacagccatcatctacagtcagttccggggctacctgatgaaatctctccagacctcgctgtttcggaggcggctgggaacccgggctgcctttgaagtcctatcctccatggtgggggagggaggagccttccctcaggcagttggggtgaagccccagaacttgctgcaggtgcttcagaaggtccagctggacagctcccacaaacaggccatgatggagaaggtgcgttcctatggcagtgttctgctctcagctgaggagtttcagaagctcttcaacgagcttgacagaagtgtggttaaagagcacccgccgaggcccgagtaccagtctccgtttctgcagagcgcccagttcctcttcggccactactactttgactacctggggaacctcatcgccctggcaaacctggtgtccatttgcgtgttcctggtgctggatgcagatgtgctgcctgctgagcgtgatgacttcatcctggggattctcaactgcgtcttcattgtgtactacctgttggagatgctgctcaaggtctttgccctgggcctgcgagggtacctgtcctaccccagcaacgtgtttgacgggctcctcaccgttgtcctgctggtaaagtaggcgcatccgaggccggcctctactgggcgggtgggtgagcgccacctgggctctgtgctggcccatctcaggcctcccctgaggactagaggctgtaggaaggtgggcttctgctctcagtggtgagggctggcttccctgctggccgagttgctcagtgggcagccggtgaggtctttaggaggctgggtttctactgcatccgagtgtcatggggggcaggctgcccctcccgacccccaggggaagccctgaaggacttgtagccctggccagcgactccagcccggggaacagcctcttaaacgtcactgatagacggtgtgacctcagcatgggtggagcgaggggccagggggctctcaggcaccagggtgttcttgggaaatgcttacacttcctttccccagacccagtgggagtgagggcatgccacacttggtgtgtgtgtcacaagcagccacatgagagtgacgtttgctgtagccagcaggcccctcggcacataggtgaagagaaatttgaaaagggccctgcagtctgtccttgactcagtatcttctctgccacctctgccaccccaatctgtgcagtcccccgattcctgaggccagggtgtctttccagctgaaagaagtcctgacatctggaaccaacccgtggggtccaggaccaagctctgatttctccccaaaagccccttttggggagaatgtgttagagatgagctttataataattcctttaagggccgcccagattagtgttgctgtagcgaagccttcttttcttttgtaattaaaggttttggagatctc

SEQ ID NO: 6594 - protein, 430 aa, Homo sapiens
MAEPQAESEPLLGGARGGGGDWPAGLTTYRSIQVGPGAAARWDLCIDQAVVFIEDAIQGYLFGWAHFQKNLWLLGYLVVLVVSLVDWTVSLSLVCHEPLRIRRLLRPFFLLQNSSMMKKTLKCIRWSLPEMASVGLLLAIHLCLFTMFGMLLFAGGKQDDGQDRERLTYFQNLPESLTSLLVLLTTANNPDVMIPAYSKNRAYAIFFIVFTVIGSLFLMNLLTAIIYSQFRGYLMKSLQTSLFRRRLGTRAAFEVLSSMVGEGGAFPQAVGVKPQNLLQVLQKVQLDSSHKQAMMEKVRSYGSVLLSAEEFQKLFNELDRSVVKEHPPRPEYQSPFLQSAQFLFGHYYFDYLGNLIALANLVSICVFLVLDADVLPAERDDFILGILNCVFIVYYLLEMLLKVFALGLRGYLSYPSNVFDGLLTVVLLVK

SEQ ID NO: 6595 - DNA, 843 bp, Homo sapiens
gctgggcgccttcggggcttgagcttctgagggtcgggtccagcgcgtgggctgctggatggcggaaccccaggcggagtcggagcccctgctgggcggggcccgcggcggtggcggcgactggccggcggggctgaccacttaccgcagcatccaagtcggccctggtgccgcggccaggtgggacctctgcattgatcaggctgtggtcttcatcgaagatgctattcagggttacctgttcgggtgggcccatttccagaaaaacctttggctgctgggctacctcgtggtgctggtggtgtctctggtggactggaccgtgtccctgagtctcgtgtgtcatgagcccctgcggatccgccggcttctccgtcccttcttcctgctgcagaactcctctatgatgaagaagaccttgaaatgcatccgctggtcgctgccggaaatggccagcgtcgggctgctgctggccatccacctgtgcctcttcaccatgttcggaatgctgctgttcgctggtgggaaggtagggcacccgtggtcagggtctgggaatggggctgccctgtgctgtgactaacagagggggctgggctggtgtctgctgccctggcctaacccatgtgcggactctgtccagtaatagcagtggcccatctggggtccaggagtctgcctttgggtggccacagtgctccaccaccccactgcccagacacctgtctgccctggggtctcctgggctcagggccacttgtcctttgtcctggctgtccgctcccaccctcctctgctccctcccatcctgactcagttcccctatcctccttcccacttccc

SEQ ID NO: 6596 - protein, 174 aa, Homo sapiens
MAEPQAESEPLLGGARGGGGDWPAGLTTYRSIQVGPGAAARWDLCIDQAVVFIEDAIQGYLFGWAHFQKNLWLLGYLVVLVVSLVDWTVSLSLVCHEPLRIRRLLRPFFLLQNSSMMKKTLKCIRWSLPEMASVGLLLAIHLCLFTMFGMLLFAGGKVGHPWSGSGNGAALCCD

SEQ ID NO: 6597 - DNA, 904 bp, Homo sapiens
atggggcctccactgctcaggtgcaggtgtggccaggatggaggccacggtcctgggcttggctgtggcccagccaccctggctggtgcctttcatcttgcggaccctgagtgctgtctcttgtgtcctctgagtcctaggaagtgaccgcagtgggagcaggaccgtctgagtcctaggaagtgaccgcactgggagcagggccgtctgagtcctaggaagtgaccgcactgggagcaggaccgtctgagtcctaggaagtgaccgcagtgggagcaggaccgtctgagtcctaggaagtgaccgcactgggagcaggaccgtctgagtcctaggaagtgaccgcagtgggagcaggaccgtctgagtcctaggaagtgaccgcagtgggagcaggaccgtctgagtcctaggaagtgaccgcactgggagcaggaccgtctgagtcctaggaagtgaccgcagtgggagcaggaccgtctgagtcctaggaagtgaccgcagtgggagcaggaccgtctgagtcctaggaagtgaccgcagtgggaacaggaccgtctgagtcctaggaagtgaccgcagtgggagcaggaccgtctgagtcctaggaagtgaccgcagtgggagcaggaccgtctgagtcctaggaagtgaccacagggggagcaggaccgtctgagtcctaggaagtgaccgcagtgggagcaggaccgtctgagtcctaggaagtgaccgcactgggagcaggaccgtctgagtcctaggaatgaccgcagtgggagcaggactgtctgagtcctagcaagtgacacagggggagcaggaccgtctgagtcctaggaagtgaccgcagtgggagcaggaccgtctgagtcctaggaagtgaccgcactgggagcaggac

SEQ ID NO: 6598 - protein, 48 aa, Homo sapiens
MGPPLLRCRCGQDGGHGPGLGCGPATLAGAFHLADPECCLLCPLSPRK

SEQ ID NO: 6599 - DNA, 1686 bp, Homo sapiens
gtttctttttactcgtgttgaataataacaataacaataacaataacaatatggaaaccaccgcaaacttggagaaaagttgtaagcacagtaaagagaagcttccttctgagtcacttgagtggttgccgttctggccctgcaccctctgtgctttgggacggcgtccaacccgcattcatgtcaggagtgagtcgcacgtggctttgtggtcatggcgacttaatccgcctggacggtggctccgtctccctgggcttagacgaccttggcacttctggagataagcccatggctcccaggttgtgttcatgtgacgtttccttgtggtaggttctgggtctgcgtttcgtctaggagtgtcacaggatggacactgcctcctggcaggggctgcccaatgcagttagcctcctgctggtgttctctcttgttgcttggtgaaggtggccctggtcagcttctccactgcccagtgaacgacccctttgtaatgaatgagtggggaggtagtgtgaagcgatgccaatatcccatccctgtcaaactgcctttactttttccttccttccttgctcccacctgtgtggatcctggtcccttcttgtattcagggctgtggtctgttatgacatttactctcaggctcaggtcctgcttgtttggcccgtgggagccccttcttctgccttttgtgttttttttgttatgtacctacagttctttagctgtttctttactttctggtgcaaaaagatgttcaagccttattttatacttgcctgcccctttctctttcatttattggagtgagctgcagctctaagaagacctgttcttttgaatggagagtagcatcaggaaccaggatgtgggtgcgaggcgtgctcctggctgttgcagattgctgcacccgggagctcttagtggacagagctagaggatatgtgcacgtacttccatctctctctctgtctccgattttagcccagcaccacagggtacgttccagtttttctctctttccatagctgtaaggccctttctgggaatggttctcattctccttaatctattattgggtcagttttcctgcatgtccccagcctcccatcactgccacccactccccacagagatgccctgctcatccgactggggctttgactcccacactgtgtacccctcttgtgtggacgccctgctgccaaaaccttcagcaaacagctttccaaatggaagttgtcactgtcagggcctttacaatcagcaacagcaaaatctacatgctgctgagggtcctgcctcattaagatgcaataaatatgtaagtacataaaaacagcaatagaagaaacgtaatgctttattctcaaatatgatgtctacatagaaaagccaaaattattaagaatagtaagaattcacccagcactttgggaggccgaggcgggtggatcatgaggtcaggagatcgagaccatcctggctaacaaggtgaaaccccgtctctactaaaaatacaaaaaattagccgggcgcagtggcgggcgcctgtagtcccagctactggggaggctgaggcaggagaatggcgtgaacccgggaagcggagcttgcagtgagccgagattgcgccactgcagtccgcagtccagcctgggcgacagagcgagactccgtctc

SEQ ID NO: 6600 - protein, 53 aa, Homo sapiens [sequence omitted]

SEQ ID NO: 6601 - DNA, 621 bp, Homo sapiens
gtagaggttacagaggggccacccacttggctggggcaagcaggaatgctttccagagaggccacacttccaggctgtggggacccgagcacaggggtggcgagttctggcatttattattattatttgttccagaacaaaattcaactcccatcctcagttggccaataatgtggtaggaacaggtgggagctgacccccagatgcagggtgctgggtgctgtgctgattttctggggctgctgtgcaaagtaccacagcctgagtggctttagaccatggagatgtgctgtgttgcagttctggaggccagaagtcccaggtgcaggtgccagcaggactgggcaccctctgaaggccctagggaagcgtccctccttgagctccttggtgcccatccaagcacctgcccctgcccctttgggagccccaccacagtctatgatcatgcatttattgatcacttattaacttatttattggctaattacacatttgttgactattgaaaatgcgaactatgtctggtttacctttgaatcccagcatctgtgaagagccggctcctgctattattattgttaatcagtattagtattagcattaaatgaatgaacaggt

SEQ ID NO: 6602 - protein, 76 aa, Homo sapiens
MEMCCVAVLEARSPRCRCQQDWAPSEGPREASLLELLGAHPSTCPCPFGSPTTVYDHAFIDHLLTYLLANYTFVDY

SEQ ID NO: 6603 - DNA, 990 bp, Homo sapiens
atggcatcggttctcctcactctccagcctgttggctcatcctgtggattttggacttgccagttccaacatggttcaagccaattccttatcacaaatctctgtctgtatatcagcacatcctgtgggttcagcttctcttgagaacactgaccaatccaatcaccgttactcccgatgacttgtaggtgaagccccttaaggaaaatttctttcacaaatgagagctagggaaagatttactcttcctgagcagctaaagtattttctccaatggccacgagaaccttaaacctttccttctttccacgctcccattggccgccaggaacttgcagcttggctacagcaatcatgaaggacctgactgggctcagcacatgtgcccaggccacccaggtagaggtggagggcatgggattcaagcccaggccatcgttggctctgaacatatacctgaaacaacctccctaccaggaaggaggctgccctgcctggagtgaagagtgcatggagcagtctcagccgacccaggtgggatgcgtaacatggccgagaaatccacccatgctgctgagagctactgcgccatggggtcatgtgtcacctaactgacttagcccagcctgactgatcccccgtgtgtgaccagacatcagcacattcagaggacctcatactgagaattggtggacctttcagaatggacatgaccactcaaagtagggacattactcgctatttgatggcccatgtgggatcaaaggccactggggttccctcaaggcacagcacacttagaatcccataagtcctcagttctaaggcatgtatttttcatactttgataattctgaaatcaagtatagcttctagtagatattaaaactcattttcagatcctgcagaaaggaggagacagaaataaagttgccattccctgcttttgtatgaacccagctgagcataaaccgtaatctattcaacctc

SEQ ID NO: 6604 - protein, 113 aa, Homo sapiens
MATRTLNLSFFPRSHWPPGTCSLATAIMKDLTGLSTCAQATQVEVEGMGFKPRPSLALNIYLKQPPYQEGGCPAWSEECMEQSQPTQVGCVTWPRNPPMLLRATAPWGHVSPN

SEQ ID NO: 6605 - DNA, 2350 bp, Homo sapiens
taccttggctatccccctctgagttcttgccttgattctcctgttactgtcccgcgaacccacatccctacaaagcaggaaagtatgcttgggagaggccaagtgagtggggaatcagcccaaagccaggcgtccagggtctccctcacctgaagctgactttttccccaccttggacagagggcgggagatgccatccccactgaacccagtgctttcaccagccatattagctcccactcaccccccgtcgtggaagcctcggccgtcacacctgcagggccggggcgtgcatggcctcagggatggcctgttcagctgctgggtgactcgggtccaggtgcctcaccacctgctgagctctgtgtgatttctggacacttctgctcgttgcctttgggctcagtgaagagtctggagtttatctggagtgaggtggccggttcttggtgggatctgagcaggtctctgcactcgctgttgcctctgcctggaacagtctccctcctggtgtcattgtctccgtggtgtgtccttcctgaccttccacctccaccaggtgccgacacttccctgaccccagtaacctcttctcttgggtgggtgaatgccacctgctgatgtctgatttattcatcggttttcttgtctgtagtctgtcccccttggggacagggactcgttgctcatgttcacccggcaggctggacacttcgtggagggctccaaagccggcagatcccggggccgcctctgtctctcccaggccctgcgtgttgcggtgagaggagcatttgtgtctctgtggtttgctgctggagctggtgaccgggagagaaacaagggagacaagggtgcccagacaggtgcggggctcagccaggaggcagaagacgtggacgtgtcccgggccaggagggtcacagatgcaccacaaggcactctgtgtggcactgggaacaggaattctgggagtcagtctgcaagggtggtgggcgttgctcacctgggagaagcctttagagtgggcgttgagcaggccattagctcgtgccctgaggaggtgcatgggcggcatgggctctccatggaaattatgtgggcgcgaatggatgtggctctgcgctcacctgggcgaggacttctggccggtgccggggcactctgcatgaccctggcagaatcgagctgccctgactatgaaaggggaagaagagcatgcctgaccctccaccggcaccccacccctcactgctccacctggggcctgcctctgcgggtggctgggtcctggctgactgttgtgactgttgaggccctgggggggtggcgcatgggagttaggaggactggccaggtggggcccactatgcacccacccccagtgtcaggtgcttctcctctcctcctccaccacctcctcctcctcctcctcatcatcatcctcacttgttgaggacgtcctgtgtgccaagtggtttatatgcccagcctcatttaatcctcagaatgactccatgaggtagctactaaaaccccccacttaacagatgaggaaactgaggcctagagaagctcaacaagttgcctaagttccaagtttcctctcccaactctcctaccctctcctcttccttctcctttctcccattcttccctgcctcttccctaactagacaattttttattgagtgtctcccaggtgcaggcatgagccaggtgctgggaaaatcatgataacccagctccttctggtcattttctcagctggttagaggctgggaggacacgcaagttcagctccagccgactggggcattggtggtagcccctggagacattgtgcaatggggctacgaggctgcatctggctccagggaagcgtgttgcaatccatgagtgatgtctgccatgcgtacaggcatggagagtgaggcgcctgtactgtctttctgtagaccctagactggtggggcctctgaaatgcatccagacactgtgctgggtgtgttgcatggccctcccaaccaattcagtatttttctccccattttccagggagaaatctaaggcgtcagaatgtaaggttcttattggaacccaggctccagggtccctggttttctgtgacatcatgctgcaggaccctgtttctctctttgctttggctgctggggagctcagaagggagctttaggcttgctctcagtcaccacattagctcaggggtttgggcatttttgtcgccgtctcctttgggctctgtctcctccctgctgtgcttcctgaggagcaggccggatgtaagttatcaactataaataaaaccaagacttccgttctggctctc

SEQ ID NO: 6606 - protein, 255 aa, Homo sapiens
MFTRQAGHFVEGSKAGRSRGRLCLSQALRVAVRGAFVSLWFAAGAGDRERNKGDKGAQTGAGLSQEAEDVDVSRARRVTDAPQGTLCGTGNRNSGSQSARVVGVAHLGEAFRVGVEQAISSCPEEVHGRHGLSMEIMWARMDVALRSPGRGLLAGAGALCMTLAESSCPDYERGRRACLTLHRHPTPHCSTWGLPLRVAGSWLTVVTVEALGGWRMGVRRTGQVGPTMHPPPVSGASPLLLHHLLLLLLIIILTC

SEQ ID NO: 6607 - DNA, 2591 bp, Homo sapiens
taccttggctatccccctctgagttcttgccttgattctcctgttactgtcccgcgaacccacatccctacaaagcaggaaagtatgcttgggagaggccaagtgagtggggaatcagcccaaagccaggcgtccagggtctccctcacctgaagctgactttttccccaccttggacagagggcgggagatgccatccccactgaacccagtgctttcaccagccatattagctcccactcaccccccgtcgtggaagcctcggccgtcacacctgcagggccggggcgtgcatggcctcagggatggcctgttcagctgctgggtgactcgggtccaggtgcctcaccacctgctgagctctgtgtgatttctggacacttctgctcgttgcctttgggctcagtgaagagtctggagtttatctggagtgaggtggccggttcttggtgggatctgagcaggacagcgtctggctccttccctcggctcatggccctcagaatctgcgtcacatacaccccagctctcccgataggtctctgcactcgctgttgcctctgcctggaacagtctccctcctggtgtcattgtctccgtggtgtgtccttcctgaccttccacctccaccaggtgccgacacttccctgaccccagtaacctcttctcttgggtgggtgaatgccacctgctgatgtctgatttattcatcggttttcttgtctgtagtctgtcccccttggggacagggactcgttgctcatgttcacccggcaggctggacacttcgtggagggctccaaagccggcagatcccggggccgcctctgtctctcccaggccctgcgtgttgcggtgagaggagcatttgtgtctctgtggtttgctgctggagctggtgaccgggagagaaacaagggagacaagggtgcccagacaggtgcggggctcagccaggaggcagaagacgtggacgtgtcccgggccaggagggtcacagatgcaccacaaggcactctgtgtggcactgggaacaggaattctgggagtcagtctgcaagggtggtgggcgttgctcacctgggagaagcctttagagtgggcgttgagcaggccattagctcgtgccctgaggaggtgcatgggcggcatgggctctccatggaaattatgtgggcgcgaatggatgtggctctgcgctcacctgggcgaggacttctggccggtgccggggcactctgcatgaccctggcagaatcgagctgccctgactatgaaaggggaagaagagcatgcctgaccctccaccggcaccccacccctcactgctccacctggggcctgcctctgcgggtggctgggtcctggctgactgttgtgactgttgaggccctgggggggtggcgcatgggagttaggaggactggccaggtggggcccactatgcacccacccccagtgtcaggtgcttctcctctcctcctccaccacctcctcctcctcctcctcatcatcatcctcacttgttgaggacgtcctgtgtgccaagtggtttatatgcccagcctcatttaatcctcagaatgactccatgaggtagctactaaaaccccccacttaacagatgaggaaactgaggcctagagaagctcaacaagttgcctaagttccaagtttcctctcccaactctcctaccctctcctcttccttctcctttctcccattcttccctgcctcttccctaactagacaattttttattgagtgtctcccaggtgcaggcatgagccaggtgctgggaaaatcatgataacccagctccttctggtcattttctcagctggttagaggctgggaggacacgcaagttcagctccagccgactggggcattggtggtagcccctggagacattgtgcaatggggctacgaggctgcatctggctccagggaagcgtgttgcaatccatgagtgatgtctgccatgcgtacaggcatggagagtgaggcgcctgtactgtctttctgtagaccctagactggtggggcctctgaaatgcatccagacactgtgctgggtgtgttgcatggccctcccaaccaattcagtatttttctccccattttccagggagaaatctaaggcgtcagaatgtaaggttcttattggaacccaggctccagggtccctggttttctgtgacatcatgctgcaggaccctgtttctctctttgctttggctgctggggagctcagaagggagctttaggcttgctctcagtcaccacattagctcaggggtttgggcatttttgtcgccgtctcctttgggctctgtctcctccctgctgtgcttcctgaggagcaggccggatgtaagttatcaactataaataaaaccaagacttccgttctggctctcactctagtttcctggtgcattttttttttttaaagttcttaatcaagggaggggatactcctaactgaagatgacatcagcatcagctggccccggggggcaggcccccagcccccaggcccgtgtgggccctgaatgcccccattatgaggggtaacctcattaca

SEQ ID NO: 6608 - protein, 255 aa, Homo sapiens; identical to SEQ ID NO: 6606

SEQ ID NO: 6609 - DNA, 633 bp, Homo sapiens
taccttggctatccccctctgagttcttgccttgattctcctgttactgtcccgcgaacccacatccctacaaagcaggaaagtatgcttgggagaggccaagtgagtggggaatcagcccaaagccaggcgtccagggtctccctcacctgaagctgactttttccccaccttggacagagggcgggagatgccatccccactgaacccagtgctttcaccagccatattagctcccactcaccccccgtcgtggaagcctcggccgtcacacctgcagggccggggcgtgcatggcctcagggatggcctgttcagctgctgggtgactcgggtccaggtgcctcaccacctgctgagctctgtgtgatttctggacacttctgctcgttgcctttgggctcagtgaagagtctggagtttatctggagtgaggtggccggttcttggtgggatctgagcaggtggaggcaatgcccagagctgtggcagccaccttgcagccgtgaagcaccagtgggaatgacagtcaagagaaccacggagatgccagcccctggacccacagcagcagcacctgcttccagactcagagtgtgagaaaaaaataaactcctatttgtttatggcaag

SEQ ID NO: 6610 - protein, 59 aa, Homo sapiens
MPSPLNPVLSPAILAPTHPPSWKPRPSHLQGRGVHGLRDGLFSCWVTRVQVPHHLLSSV

SEQ ID NO: 6611 - DNA, 2111 bp, Homo sapiens
taccttggctatccccctctgagttcttgccttgattctcctgttactgtcccgcgaacccacatccctacaaagcaggaaagtatgcttgggagaggccaagtgagtggggaatcagcccaaagccaggcgtccagggtctccctcacctgaagctgactttttccccaccttggacagagggcgggagatgccatccccactgaacccagtgctttcaccagccatattagctcccactcaccccccgtcgtggaagcctcggccgtcacacctgcagggccggggcgtgcatggcctcagggatggcctgttcagctgctgggtgactcgggtccaggtgcctcaccacctgctgagctctgtgtgatttctggacacttctgctcgttgcctttgggctcagtgaagagtctggagtttatctggagtgaggtggccggttcttggtgggatctgagcaggctggacacttcgtggagggctccaaagccggcagatcccggggccgcctctgtctctcccaggccctgcgtgttgcggtgagaggagcatttgtgtctctgtggtttgctgctggagctggtgaccgggagagaaacaagggagacaagggtgcccagacaggtgcggggctcagccaggaggcagaagacgtggacgtgtcccgggccaggagggtcacagatgcaccacaaggcactctgtgtggcactgggaacaggaattctgggagtcagtctgcaagggtggtgggcgttgctcacctgggagaagcctttagagtgggcgttgagcaggccattagctcgtgccctgaggaggtgcatgggcggcatgggctctccatggaaattatgtgggcgcgaatggatgtggctctgcgctcacctgggcgaggacttctggccggtgccggggcactctgcatgaccctggcagaatcgagctgccctgactatgaaaggggaagaagagcatgcctgaccctccaccggcaccccacccctcactgctccacctggggcctgcctctgcgggtggctgggtcctggctgactgttgtgactgttgaggccctgggggggtggcgcatgggagttaggaggactggccaggtggggcccactatgcacccacccccagtgtcaggtgcttctcctctcctcctccaccacctcctcctcctcctcctcatcatcatcctcacttgttgaggacgtcctgtgtgccaagtggtttatatgcccagcctcatttaatcctcagaatgactccatgaggtagctactaaaaccccccacttaacagatgaggaaactgaggcctagagaagctcaacaagttgcctaagttccaagtttcctctcccaactctcctaccctctcctcttccttctcctttctcccattcttccctgcctcttccctaactagacaattttttattgagtgtctcccaggtgcaggcatgagccaggtgctgggaaaatcatgataacccagctccttctggtcattttctcagctggttagaggctgggaggacacgcaagttcagctccagccgactggggcattggtggtagcccctggagacattgtgcaatggggctacgaggctgcatctggctccagggaagcgtgttgcaatccatgagtgatgtctgccatgcgtacaggcatggagagtgaggcgcctgtactgtctttctgtagaccctagactggtggggcctctgaaatgcatccagacactgtgctgggtgtgttgcatggccctcccaaccaattcagtatttttctccccattttccagggagaaatctaaggcgtcagaatgtaaggttcttattggaacccaggctccagggtccctggttttctgtgacatcatgctgcaggaccctgtttctctctttgctttggctgctggggagctcagaagggagctttaggcttgctctcagtcaccacattagctcaggggtttgggcatttttgtcgccgtctcctttgggctctgtctcctccctgctgtgcttcctgaggagcaggccggatgtaagttatcaactataaataaaaccaagacttccgttctggctctc

SEQ ID NO: 6612 - protein, 122 aa, Homo sapiens
MEIMWARMDVALRSPGRGLLAGAGALCMTLAESSCPDYERGRRACLTLHRHPTPHCSTWGLPLRVAGSWLTVVTVEALGGWRMGVRRTGQVGPTMHPPPVSGASPLLLHHLLLLLLIIILTC

SEQ ID NO: 6613 - DNA, 2328 bp, Homo sapiens
taccttggctatccccctctgagttcttgccttgattctcctgttactgtcccgcgaacccacatccctacaaagcaggaaagtatgcttgggagaggccaagtgagtggggaatcagcccaaagccaggcgtccagggtctccctcacctgaagctgactttttccccaccttggacagagggcgggagatgccatccccactgaacccagtgctttcaccagccatattagctcccactcaccccccgtcgtggaagcctcggccgtcacacctgcagggccggggcgtgcatggcctcagggatggcctgttcagctgctgggtgactcgggtccaggtgcctcaccacctgctgagctctgtgtgatttctggacacttctgctcgttgcctttgggctcagtgaagagtctggagtttatctggagtgaggtggccggttcttggtgggatctgagcaggacagcgtctggctccttccctcggctcatggccctcagaatctgcgtcacatacaccccagctctcccgataggtctctgcactcgctgttgcctctgcctggaacagtctccctcctggtgtcattgtctccgtggtgtgtccttcctgaccttccacctccaccagtctgtcccccttggggacagggactcgttgctcatgttcacccggcaggctggacacttcgtggagggctccaaagccggcagatcccggggccgcctctgtctctcccaggccctgcgtgttgcggtgagaggagcatttgtgtctctgtggtttgctgctggagctggtgaccgggagagaaacaagggagacaagggtgcccagacaggtgcggggctcagccaggaggcagaagacgtggacgtgtcccgggccaggagggtcacagatgcaccacaaggcactctgtgtggcactgggaacaggaattctgggagtcagtctgcaagggtggtgggcgttgctcacctgggagaagcctttagagtgggcgttgagcaggccattagctcgtgccctgaggaggtgcatgggcggcatgggctctccatggaaattatgtgggcgcgaatggatgtggctctgcgctcacctgggcgaggacttctggccggtgccggggcactctgcatgaccctggcagaatcgagctgccctgactatgaaaggggaagaagagcatgcctgaccctccaccggcaccccacccctcactgctccacctggggcctgcctctgcgggtggctgggtcctggctgactgttgtgactgttgaggccctgggggggtggcgcatgggagttaggaggactggccaggtggggcccactatgcacccacccccagtgtcaggtgcttctcctctcctcctccaccacctcctcctcctcctcctcatcatcatcctcacttgttgaggacgtcctgtgtgccaagtggtttatatgcccagcctcatttaatcctcagaatgactccatgaggtagctactaaaaccccccacttaacagatgaggaaactgaggcctagagaagctcaacaagttgcctaagttccaagtttcctctcccaactctcctaccctctcctcttccttctcctttctcccattcttccctgcctcttccctaactagacaattttttattgagtgtctcccaggtgcaggcatgagccaggtgctgggaaaatcatgataacccagctccttctggtcattttctcagctggttagaggctgggaggacacgcaagttcagctccagccgactggggcattggtggtagcccctggagacattgtgcaatggggctacgaggctgcatctggctccagggaagcgtgttgcaatccatgagtgatgtctgccatgcgtacaggcatggagagtgaggcgcctgtactgtctttctgtagaccctagactggtggggcctctgaaatgcatccagacactgtgctgggtgtgttgcatggccctcccaaccaattcagtatttttctccccattttccagggagaaatctaaggcgtcagaatgtaaggttcttattggaacccaggctccagggtccctggttttctgtgacatcatgctgcaggaccctgtttctctctttgctttggctgctggggagctcagaagggagctttaggcttgctctcagtcaccacattagctcaggggtttgggcatttttgtcgccgtctcctttgggctctgtctcctccctgctgtgcttcctgaggagcaggccggatgtaagttatcaactataaataaaaccaagacttccgttctggctctc

SEQ ID NO: 6614 - protein, 313 aa, Homo sapiens; identical to SEQ ID NO: 902

SEQ ID NO: 6615 - DNA, 2422 bp, Homo sapiens
taccttggctatccccctctgagttcttgccttgattctcctgttactgtcccgcgaacccacatccctacaaagcaggaaagtatgcttgggagaggccaagtgagtggggaatcagcccaaagccaggcgtccagggtctccctcacctgaagctgactttttccccaccttggacagagggcgggagatgccatccccactgaacccagtgctttcaccagccatattagctcccactcaccccccgtcgtggaagcctcggccgtcacacctgcagggccggggcgtgcatggcctcagggatggcctgttcagctgctgggtgactcgggtccaggtgcctcaccacctgctgagctctgtgtgatttctggacacttctgctcgttgcctttgggctcagtgaagagtctggagtttatctggagtgaggtggccggttcttggtgggatctgagcagagtccattcaggagcaggaaagttcatctcagaccctaaatccagccacgtcatgccacgcttaacacctctaacaacttcccctggcacttaggacagcgtctggctccttccctcggctcatggccctcagaatctgcgtcacatacaccccagctctcccgataggtctctgcactcgctgttgcctctgcctggaacagtctccctcctggtgtcattgtctccgtggtgtgtccttcctgaccttccacctccaccagtctgtcccccttggggacagggactcgttgctcatgttcacccggcaggctggacacttcgtggagggctccaaagccggcagatcccggggccgcctctgtctctcccaggccctgcgtgttgcggtgagaggagcatttgtgtctctgtggtttgctgctggagctggtgaccgggagagaaacaagggagacaagggtgcccagacaggtgcggggctcagccaggaggcagaagacgtggacgtgtcccgggccaggagggtcacagatgcaccacaaggcactctgtgtggcactgggaacaggaattctgggagtcagtctgcaagggtggtgggcgttgctcacctgggagaagcctttagagtgggcgttgagcaggccattagctcgtgccctgaggaggtgcatgggcggcatgggctctccatggaaattatgtgggcgcgaatggatgtggctctgcgctcacctgggcgaggacttctggccggtgccggggcactctgcatgaccctggcagaatcgagctgccctgactatgaaaggggaagaagagcatgcctgaccctccaccggcaccccacccctcactgctccacctggggcctgcctctgcgggtggctgggtcctggctgactgttgtgactgttgaggccctgggggggtggcgcatgggagttaggaggactggccaggtggggcccactatgcacccacccccagtgtcaggtgcttctcctctcctcctccaccacctcctcctcctcctcctcatcatcatcctcacttgttgaggacgtcctgtgtgccaagtggtttatatgcccagcctcatttaatcctcagaatgactccatgaggtagctactaaaaccccccacttaacagatgaggaaactgaggcctagagaagctcaacaagttgcctaagttccaagtttcctctcccaactctcctaccctctcctcttccttctcctttctcccattcttccctgcctcttccctaactagacaattttttattgagtgtctcccaggtgcaggcatgagccaggtgctgggaaaatcatgataacccagctccttctggtcattttctcagctggttagaggctgggaggacacgcaagttcagctccagccgactggggcattggtggtagcccctggagacattgtgcaatggggctacgaggctgcatctggctccagggaagcgtgttgcaatccatgagtgatgtctgccatgcgtacaggcatggagagtgaggcgcctgtactgtctttctgtagaccctagactggtggggcctctgaaatgcatccagacactgtgctgggtgtgttgcatggccctcccaaccaattcagtatttttctccccattttccagggagaaatctaaggcgtcagaatgtaaggttcttattggaacccaggctccagggtccctggttttctgtgacatcatgctgcaggaccctgtttctctctttgctttggctgctggggagctcagaagggagctttaggcttgctctcagtcaccacattagctcaggggtttgggcatttttgtcgccgtctcctttgggctctgtctcctccctgctgtgcttcctgaggagcaggccggatgtaagttatcaactataaataaaaccaagacttccgttctggctctc

SEQ ID NO: 6616 - protein, 313 aa, Homo sapiens; identical to SEQ ID NO: 902

SEQ ID NO: 6617 - DNA, 2518 bp, Homo sapiens
taccttggctatccccctctgagttcttgccttgattctcctgttactgtcccgcgaacccacatccctacaaagcaggaaagtatgcttgggagaggccaagtgagtggggaatcagcccaaagccaggcgtccagggtctccctcacctgaagctgactttttccccaccttggacagagggcgggagatgccatccccactgaacccagtgctttcaccagccatattagctcccactcaccccccgtcgtggaagcctcggccgtcacacctgcagggccggggcgtgcatggcctcagggatggcctgttcagctgctgggtgactcgggtccaggtgcctcaccacctgctgagctctgtgtgatttctggacacttctgctcgttgcctttgggctcagtgaagagtctggagtttatctggagtgaggtggccggttcttggtgggatctgagcagagtccattcaggagcaggaaagttcatctcagaccctaaatccagccacgtcatgccacgcttaacacctctaacaacttcccctggcacttaggacagcgtctggctccttccctcggctcatggccctcagaatctgcgtcacatacaccccagctctcccgataggtctctgcactcgctgttgcctctgcctggaacagtctccctcctggtgtcattgtctccgtggtgtgtccttcctgaccttccacctccaccaggtgccgacacttccctgaccccagtaacctcttctcttgggtgggtgaatgccacctgctgatgtctgatttattcatcggttttcttgtctgtagtctgtcccccttggggacagggactcgttgctcatgttcacccggcaggctggacacttcgtggagggctccaaagccggcagatcccggggccgcctctgtctctcccaggccctgcgtgttgcggtgagaggagcatttgtgtctctgtggtttgctgctggagctggtgaccgggagagaaacaagggagacaagggtgcccagacaggtgcggggctcagccaggaggcagaagacgtggacgtgtcccgggccaggagggtcacagatgcaccacaaggcactctgtgtggcactgggaacaggaattctgggagtcagtctgcaagggtggtgggcgttgctcacctgggagaagcctttagagtgggcgttgagcaggccattagctcgtgccctgaggaggtgcatgggcggcatgggctctccatggaaattatgtgggcgcgaatggatgtggctctgcgctcacctgggcgaggacttctggccggtgccggggcactctgcatgaccctggcagaatcgagctgccctgactatgaaaggggaagaagagcatgcctgaccctccaccggcaccccacccctcactgctccacctggggcctgcctctgcgggtggctgggtcctggctgactgttgtgactgttgaggccctgggggggtggcgcatgggagttaggaggactggccaggtggggcccactatgcacccacccccagtgtcaggtgcttctcctctcctcctccaccacctcctcctcctcctcctcatcatcatcctcacttgttgaggacgtcctgtgtgccaagtggtttatatgcccagcctcatttaatcctcagaatgactccatgaggtagctactaaaaccccccacttaacagatgaggaaactgaggcctagagaagctcaacaagttgcctaagttccaagtttcctctcccaactctcctaccctctcctcttccttctcctttctcccattcttccctgcctcttccctaactagacaattttttattgagtgtctcccaggtgcaggcatgagccaggtgctgggaaaatcatgataacccagctccttctggtcattttctcagctggttagaggctgggaggacacgcaagttcagctccagccgactggggcattggtggtagcccctggagacattgtgcaatggggctacgaggctgcatctggctccagggaagcgtgttgcaatccatgagtgatgtctgccatgcgtacaggcatggagagtgaggcgcctgtactgtctttctgtagaccctagactggtggggcctctgaaatgcatccagacactgtgctgggtgtgttgcatggccctcccaaccaattcagtatttttctccccattttccagggagaaatctaaggcgtcagaatgtaaggttcttattggaacccaggctccagggtccctggttttctgtgacatcatgctgcaggaccctgtttctctctttgctttggctgctggggagctcagaagggagctttaggcttgctctcagtcaccacattagctcaggggtttgggcatttttgtcgccgtctcctttgggctctgtctcctccctgctgtgcttcctgaggagcaggccggatgtaagttatcaactataaataaaaccaagacttccgttctggctctc

SEQ ID NO: 6618 - protein, 255 aa, Homo sapiens; identical to SEQ ID NO: 6606

SEQ ID NO: 6619 - DNA, 2424 bp, Homo sapiens
taccttggctatccccctctgagttcttgccttgattctcctgttactgtcccgcgaacccacatccctacaaagcaggaaagtatgcttgggagaggccaagtgagtggggaatcagcccaaagccaggcgtccagggtctccctcacctgaagctgactttttccccaccttggacagagggcgggagatgccatccccactgaacccagtgctttcaccagccatattagctcccactcaccccccgtcgtggaagcctcggccgtcacacctgcagggccggggcgtgcatggcctcagggatggcctgttcagctgctgggtgactcgggtccaggtgcctcaccacctgctgagctctgtgtgatttctggacacttctgctcgttgcctttgggctcagtgaagagtctggagtttatctggagtgaggtggccggttcttggtgggatctgagcaggacagcgtctggctccttccctcggctcatggccctcagaatctgcgtcacatacaccccagctctcccgataggtctctgcactcgctgttgcctctgcctggaacagtctccctcctggtgtcattgtctccgtggtgtgtccttcctgaccttccacctccaccaggtgccgacacttccctgaccccagtaacctcttctcttgggtgggtgaatgccacctgctgatgtctgatttattcatcggttttcttgtctgtagtctgtcccccttggggacagggactcgttgctcatgttcacccggcaggctggacacttcgtggagggctccaaagccggcagatcccggggccgcctctgtctctcccaggccctgcgtgttgcggtgagaggagcatttgtgtctctgtggtttgctgctggagctggtgaccgggagagaaacaagggagacaagggtgcccagacaggtgcggggctcagccaggaggcagaagacgtggacgtgtcccgggccaggagggtcacagatgcaccacaaggcactctgtgtggcactgggaacaggaattctgggagtcagtctgcaagggtggtgggcgttgctcacctgggagaagcctttagagtgggcgttgagcaggccattagctcgtgccctgaggaggtgcatgggcggcatgggctctccatggaaattatgtgggcgcgaatggatgtggctctgcgctcacctgggcgaggacttctggccggtgccggggcactctgcatgaccctggcagaatcgagctgccctgactatgaaaggggaagaagagcatgcctgaccctccaccggcaccccacccctcactgctccacctggggcctgcctctgcgggtggctgggtcctggctgactgttgtgactgttgaggccctgggggggtggcgcatgggagttaggaggactggccaggtggggcccactatgcacccacccccagtgtcaggtgcttctcctctcctcctccaccacctcctcctcctcctcctcatcatcatcctcacttgttgaggacgtcctgtgtgccaagtggtttatatgcccagcctcatttaatcctcagaatgactccatgaggtagctactaaaaccccccacttaacagatgaggaaactgaggcctagagaagctcaacaagttgcctaagttccaagtttcctctcccaactctcctaccctctcctcttccttctcctttctcccattcttccctgcctcttccctaactagacaattttttattgagtgtctcccaggtgcaggcatgagccaggtgctgggaaaatcatgataacccagctccttctggtcattttctcagctggttagaggctgggaggacacgcaagttcagctccagccgactggggcattggtggtagcccctggagacattgtgcaatggggctacgaggctgcatctggctccagggaagcgtgttgcaatccatgagtgatgtctgccatgcgtacaggcatggagagtgaggcgcctgtactgtctttctgtagaccctagactggtggggcctctgaaatgcatccagacactgtgctgggtgtgttgcatggccctcccaaccaattcagtatttttctccccattttccagggagaaatctaaggcgtcagaatgtaaggttcttattggaacccaggctccagggtccctggttttctgtgacatcatgctgcaggaccctgtttctctctttgctttggctgctggggagctcagaagggagctttaggcttgctctcagtcaccacattagctcaggggtttgggcatttttgtcgccgtctcctttgggctctgtctcctccctgctgtgcttcctgaggagcaggccggatgtaagttatcaactataaataaaaccaagacttccgttctggctctc

SEQ ID NO: 6620 - protein, 255 aa, Homo sapiens; identical to SEQ ID NO: 6606

SEQ ID NO: 6621 - DNA, 2278 bp, Homo sapiens
taccttggctatccccctctgagttcttgccttgattctcctgttactgtcccgcgaacccacatccctacaaagcaggaaagtatgcttgggagaggccaagtgagtggggaatcagcccaaagccaggcgtccagggtctccctcacctgaagctgactttttccccaccttggacagagggcgggagatgccatccccactgaacccagtgctttcaccagccatattagctcccactcaccccccgtcgtggaagcctcggccgtcacacctgcagggccggggcgtgcatggcctcagggatggcctgttcagctgctgggtgactcgggtccaggtgcctcaccacctgctgagctctgtgtgatttctggacacttctgctcgttgcctttgggctcagtgaagagtctggagtttatctggagtgaggtggccggttcttggtgggatctgagcaggctggacacttcgtggagggctccaaagccggcagatcccggggccgcctctgtctctcccaggccctgcgtgttgcggtgagaggagcatttgtgtctctgtggtttgctgctggagctggtgaccgggagagaaacaagggagacaagggtgcccagacaggtgcggggctcagccaggaggcagaagacgtggacgtgtcccgggccaggagggtcacagatgcaccacaaggcactctgtgtggcactgggaacaggaattctgggagtcagtctgcaagggtggtgggcgttgctcacctgggagaagcctttagagtgggcgttgagcaggccattagctcgtgccctgaggaggtgcatgggcggcatgggctctccatggaaattatgtgggcgcgaatggatgtggctctgcgctcacctgggcgaggacttctggccggtgccggggcactctgcatgaccctggcagaatcgagctgccctgactatgaaaggggaagaagagcatgcctgaccctccaccggcaccccacccctcactgctccacctggggcctgcctctgcgggtggctgggtcctggctgactgttgtgactgttgaggccctgggggggtggcgcatgggagttaggaggactggccaggtggggcccactatgcacccacccccagtgtcaggtgcttctcctctcctcctccaccacctcctcctcctcctcctcatcatcatcctcacttgttgaggacgtcctgtgtgccaagtggtttatatgcccagcctcatttaatcctcagaatgactccatgaggtagctactaaaaccccccacttaacagatgaggaaactgaggcctagagaagctcaacaagttgcctaagttccaagtttcctctcccaactctcctaccctctcctcttccttctcctttctcccattcttccctgcctcttccctaactagacaattttttattgagtgtctcccaggtgcaggcatgagccaggtgctgggaaaatcatgataacccagctccttctggtcattttctcagctggttagaggctgggaggacacgcaagttcagctccagccgactggggcattggtggtagcccctggagacattgtgcaatggggctacgaggctgcatctggctccagggaagcgtgttgcaatccatgagtgatgtctgccatgcgtacaggcatggagagtgaggcgcctgtactgtctttctgtagaccctagactggtggggcctctgaaatgcatccagacactgtgctgggtgtgttgcatggccctcccaaccaattcagtatttttctccccattttccagggagaaatctaaggcgtcagaatgtaaggttcttattggaacccaggctccagggtccctggttttctgtgacatcatgctgcaggaccctgtttctctctttgctttggctgctggggagctcagaagggagctttaggcttgctctcagtcaccacattagctcaggggtttgggcatttttgtcgccgtctcctttgggctctgtctcctccctgctgtgcttcctgaggagcaggccggatgtaagttatcaactataaataaaaccaagacttccgttctggctctcactctagtttcctggtgcattttttttttttaaagttcttaatcaagggaggggatactcctaactgaagatgacatcagcatcagctggccccggggggcaggcccccagcccccaggcccgtgtgggccctgaatgcccccattatgaggggtaacctcattaca

SEQ ID NO: 6622 - protein, 122 aa, Homo sapiens; identical to SEQ ID NO: 6612

SEQ ID NO: 6623 - DNA, 2495 bp, Homo sapiens
taccttggctatccccctctgagttcttgccttgattctcctgttactgtcccgcgaacccacatccctacaaagcaggaaagtatgcttgggagaggccaagtgagtggggaatcagcccaaagccaggcgtccagggtctccctcacctgaagctgactttttccccaccttggacagagggcgggagatgccatccccactgaacccagtgctttcaccagccatattagctcccactcaccccccgtcgtggaagcctcggccgtcacacctgcagggccggggcgtgcatggcctcagggatggcctgttcagctgctgggtgactcgggtccaggtgcctcaccacctgctgagctctgtgtgatttctggacacttctgctcgttgcctttgggctcagtgaagagtctggagtttatctggagtgaggtggccggttcttggtgggatctgagcaggacagcgtctggctccttccctcggctcatggccctcagaatctgcgtcacatacaccccagctctcccgataggtctctgcactcgctgttgcctctgcctggaacagtctccctcctggtgtcattgtctccgtggtgtgtccttcctgaccttccacctccaccagtctgtcccccttggggacagggactcgttgctcatgttcacccggcaggctggacacttcgtggagggctccaaagccggcagatcccggggccgcctctgtctctcccaggccctgcgtgttgcggtgagaggagcatttgtgtctctgtggtttgctgctggagctggtgaccgggagagaaacaagggagacaagggtgcccagacaggtgcggggctcagccaggaggcagaagacgtggacgtgtcccgggccaggagggtcacagatgcaccacaaggcactctgtgtggcactgggaacaggaattctgggagtcagtctgcaagggtggtgggcgttgctcacctgggagaagcctttagagtgggcgttgagcaggccattagctcgtgccctgaggaggtgcatgggcggcatgggctctccatggaaattatgtgggcgcgaatggatgtggctctgcgctcacctgggcgaggacttctggccggtgccggggcactctgcatgaccctggcagaatcgagctgccctgactatgaaaggggaagaagagcatgcctgaccctccaccggcaccccacccctcactgctccacctggggcctgcctctgcgggtggctgggtcctggctgactgttgtgactgttgaggccctgggggggtggcgcatgggagttaggaggactggccaggtggggcccactatgcacccacccccagtgtcaggtgcttctcctctcctcctccaccacctcctcctcctcctcctcatcatcatcctcacttgttgaggacgtcctgtgtgccaagtggtttatatgcccagcctcatttaatcctcagaatgactccatgaggtagctactaaaaccccccacttaacagatgaggaaactgaggcctagagaagctcaacaagttgcctaagttccaagtttcctctcccaactctcctaccctctcctcttccttctcctttctcccattcttccctgcctcttccctaactagacaattttttattgagtgtctcccaggtgcaggcatgagccaggtgctgggaaaatcatgataacccagctccttctggtcattttctcagctggttagaggctgggaggacacgcaagttcagctccagccgactggggcattggtggtagcccctggagacattgtgcaatggggctacgaggctgcatctggctccagggaagcgtgttgcaatccatgagtgatgtctgccatgcgtacaggcatggagagtgaggcgcctgtactgtctttctgtagaccctagactggtggggcctctgaaatgcatccagacactgtgctgggtgtgttgcatggccctcccaaccaattcagtatttttctccccattttccagggagaaatctaaggcgtcagaatgtaaggttcttattggaacccaggctccagggtccctggttttctgtgacatcatgctgcaggaccctgtttctctctttgctttggctgctggggagctcagaagggagctttaggcttgctctcagtcaccacattagctcaggggtttgggcatttttgtcgccgtctcctttgggctctgtctcctccctgctgtgcttcctgaggagcaggccggatgtaagttatcaactataaataaaaccaagacttccgttctggctctcactctagtttcctggtgcattttttttttttaaagttcttaatcaagggaggggatactcctaactgaagatgacatcagcatcagctggccccggggggcaggcccccagcccccaggcccgtgtgggccctgaatgcccccattatgaggggtaacctcattaca

SEQ ID NO: 6624 - protein, 313 aa, Homo sapiens; identical to SEQ ID NO: 902

SEQ ID NO: 6625 - DNA, 2589 bp, Homo sapiens
taccttggctatccccctctgagttcttgccttgattctcctgttactgtcccgcgaacccacatccctacaaagcaggaaagtatgcttgggagaggccaagtgagtggggaatcagcccaaagccaggcgtccagggtctccctcacctgaagctgactttttccccaccttggacagagggcgggagatgccatccccactgaacccagtgctttcaccagccatattagctcccactcaccccccgtcgtggaagcctcggccgtcacacctgcagggccggggcgtgcatggcctcagggatggcctgttcagctgctgggtgactcgggtccaggtgcctcaccacctgctgagctctgtgtgatttctggacacttctgctcgttgcctttgggctcagtgaagagtctggagtttatctggagtgaggtggccggttcttggtgggatctgagcagagtccattcaggagcaggaaagttcatctcagaccctaaatccagccacgtcatgccacgcttaacacctctaacaacttcccctggcacttaggacagcgtctggctccttccctcggctcatggccctcagaatctgcgtcacatacaccccagctctcccgataggtctctgcactcgctgttgcctctgcctggaacagtctccctcctggtgtcattgtctccgtggtgtgtccttcctgaccttccacctccaccagtctgtcccccttggggacagggactcgttgctcatgttcacccggcaggctggacacttcgtggagggctccaaagccggcagatcccggggccgcctctgtctctcccaggccctgcgtgttgcggtgagaggagcatttgtgtctctgtggtttgctgctggagctggtgaccgggagagaaacaagggagacaagggtgcccagacaggtgcggggctcagccaggaggcagaagacgtggacgtgtcccgggccaggagggtcacagatgcaccacaaggcactctgtgtggcactgggaacaggaattctgggagtcagtctgcaagggtggtgggcgttgctcacctgggagaagcctttagagtgggcgttgagcaggccattagctcgtgccctgaggaggtgcatgggcggcatgggctctccatggaaattatgtgggcgcgaatggatgtggctctgcgctcacctgggcgaggacttctggccggtgccggggcactctgcatgaccctggcagaatcgagctgccctgactatgaaaggggaagaagagcatgcctgaccctccaccggcaccccacccctcactgctccacctggggcctgcctctgcgggtggctgggtcctggctgactgttgtgactgttgaggccctgggggggtggcgcatgggagttaggaggactggccaggtggggcccactatgcacccacccccagtgtcaggtgcttctcctctcctcctccaccacctcctcctcctcctcctcatcatcatcctcacttgttgaggacgtcctgtgtgccaagtggtttatatgcccagcctcatttaatcctcagaatgactccatgaggtagctactaaaaccccccacttaacagatgaggaaactgaggcctagagaagctcaacaagttgcctaagttccaagtttcctctcccaactctcctaccctctcctcttccttctcctttctcccattcttccctgcctcttccctaactagacaattttttattgagtgtctcccaggtgcaggcatgagccaggtgctgggaaaatcatgataacccagctccttctggtcattttctcagctggttagaggctgggaggacacgcaagttcagctccagccgactggggcattggtggtagcccctggagacattgtgcaatggggctacgaggctgcatctggctccagggaagcgtgttgcaatccatgagtgatgtctgccatgcgtacaggcatggagagtgaggcgcctgtactgtctttctgtagaccctagactggtggggcctctgaaatgcatccagacactgtgctgggtgtgttgcatggccctcccaaccaattcagtatttttctccccattttccagggagaaatctaaggcgtcagaatgtaaggttcttattggaacccaggctccagggtccctggttttctgtgacatcatgctgcaggaccctgtttctctctttgctttggctgctggggagctcagaagggagctttaggcttgctctcagtcaccacattagctcaggggtttgggcatttttgtcgccgtctcctttgggctctgtctcctccctgctgtgcttcctgaggagcaggccggatgtaagttatcaactataaataaaaccaagacttccgttctggctctcactctagtttcctggtgcattttttttttttaaagttcttaatcaagggaggggatactcctaactgaagatgacatcagcatcagctggccccggggggcaggcccccagcccccaggcccgtgtgggccctgaatgcccccattatgaggggtaacctcattaca

SEQ ID NO: 6626 - protein, 313 aa, Homo sapiens; identical to SEQ ID NO: 902

SEQ ID NO: 6627 - DNA, 1444 bp, Homo sapiens
ctgtagtctgtcccccttggggacagggactcgttgctcatgttcacccggcaggaggaattctgggagtcagtctgcaagggtggtgggcgttgctcacctgggagaagcctttagagtgggcgttgagcaggccattagctcgtgccctgaggaggtgcatgggcggcatgggctctccatggaaattatgtgggcgcgaatggatgtggctctgcgctcacctgggcgaggacttctggccggtgccggggcactctgcatgaccctggcagaatcgagctgccctgactatgaaaggggaagaagagcatgcctgaccctccaccggcaccccacccctcactgctccacctggggcctgcctctgcgggtggctgggtcctggctgactgttgtgactgttgaggccctgggggggtggcgcatgggagttaggaggactggccaggtggggcccactatgcacccacccccagtgtcaggtgcttctcctctcctcctccaccacctcctcctcctcctcctcatcatcatcctcacttgttgaggacgtcctgtgtgccaagtggtttatatgcccagcctcatttaatcctcagaatgactccatgaggtagctactaaaaccccccacttaacagatgaggaaactgaggcctagagaagctcaacaagttgcctaagttccaagtttcctctcccaactctcctaccctctcctcttccttctcctttctcccattcttccctgcctcttccctaactagacaattttttattgagtgtctcccaggtgcaggcatgagccaggtgctgggaaaatcatgataacccagctccttctggtcattttctcagctggttagaggctgggaggacacgcaagttcagctccagccgactggggcattggtggtagcccctggagacattgtgcaatggggctacgaggctgcatctggctccagggaagcgtgttgcaatccatgagtgatgtctgccatgcgtacaggcatggagagtgaggcgcctgtactgtctttctgtagaccctagactggtggggcctctgaaatgcatccagacactgtgctgggtgtgttgcatggccctcccaaccaattcagtatttttctccccattttccagggagaaatctaaggcgtcagaatgtaaggttcttattggaacccaggctccagggtccctggttttctgtgacatcatgctgcaggaccctgtttctctctttgctttggctgctggggagctcagaagggagctttaggcttgctctcagtcaccacattagctcaggggtttgggcatttttgtcgccgtctcctttgggctctgtctcctccctgctgtgcttcctgaggagcaggccggatgtaagttatcaactataaataaaaccaagacttccgttctggctctc

SEQ ID NO: 6628 - protein, 122 aa, Homo sapiens; identical to SEQ ID NO: 6612

SEQ ID NO: 6629 - DNA, 1611 bp, Homo sapiens
ctgtagtctgtcccccttggggacagggactcgttgctcatgttcacccggcaggaggaattctgggagtcagtctgcaagggtggtgggcgttgctcacctgggagaagcctttagagtgggcgttgagcaggccattagctcgtgccctgaggaggtgcatgggcggcatgggctctccatggaaattatgtgggcgcgaatggatgtggctctgcgctcacctgggcgaggacttctggccggtgccggggcactctgcatgaccctggcagaatcgagctgccctgactatgaaaggggaagaagagcatgcctgaccctccaccggcaccccacccctcactgctccacctggggcctgcctctgcgggtggctgggtcctggctgactgttgtgactgttgaggccctgggggggtggcgcatgggagttaggaggactggccaggtggggcccactatgcacccacccccagtgtcaggtgcttctcctctcctcctccaccacctcctcctcctcctcctcatcatcatcctcacttgttgaggacgtcctgtgtgccaagtggtttatatgcccagcctcatttaatcctcagaatgactccatgaggtagctactaaaaccccccacttaacagatgaggaaactgaggcctagagaagctcaacaagttgcctaagttccaagtttcctctcccaactctcctaccctctcctcttccttctcctttctcccattcttccctgcctcttccctaactagacaattttttattgagtgtctcccaggtgcaggcatgagccaggtgctgggaaaatcatgataacccagctccttctggtcattttctcagctggttagaggctgggaggacacgcaagttcagctccagccgactggggcattggtggtagcccctggagacattgtgcaatggggctacgaggctgcatctggctccagggaagcgtgttgcaatccatgagtgatgtctgccatgcgtacaggcatggagagtgaggcgcctgtactgtctttctgtagaccctagactggtggggcctctgaaatgcatccagacactgtgctgggtgtgttgcatggccctcccaaccaattcagtatttttctccccattttccagggagaaatctaaggcgtcagaatgtaaggttcttattggaacccaggctccagggtccctggttttctgtgacatcatgctgcaggaccctgtttctctctttgctttggctgctggggagctcagaagggagctttaggcttgctctcagtcaccacattagctcaggggtttgggcatttttgtcgccgtctcctttgggctctgtctcctccctgctgtgcttcctgaggagcaggccggatgtaagttatcaactataaataaaaccaagacttccgttctggctctcactctagtttcctggtgcattttttttttttaaagttcttaatcaagggaggggatactcctaactgaagatgacatcagcatcagctggccccggggggcaggcccccagcccccaggcccgtgtgggccctgaatgcccccattatgaggggtaacctcattaca

SEQ ID NO: 6630 - protein, 122 aa, Homo sapiens; identical to SEQ ID NO: 6612

SEQ ID NO: 6631 - DNA, 1104 bp, Homo sapiens
gtgactgcatgaggctgtacgtatctgcagcctgccccttttcatggtgtttatccactcacacagtgatgagcagtggtggaggcaatgcccagagctgtggcagccaccttgcagccgtgaagcaccagtgggaatgacagtcaagagaaccacggagatgccagcccctggacccacagcagcagcacctgcttccagactcagagtgtgagaaaaaaataaactcctatttgtttatggcaagagacaaggtctagctctgtgatgcaggccggaggacagtggtgtgatcacagctcactgcagccttgaactcctgggttccagcaatcctcccacctcagcctccttagtaggcgtggctacagtaatggaagacagcaaaagaagtttggagattcctggtttaaagcatttaaagcctctgtgaaaatttgcccaggccaacaacttcactttccacactcagtgccacgaagtgcagctctaagctggggatttctgtgcagagatgatccactgagtgcaacccaccaccgtgcggacaccacccctgcagaatcatctgtgaaaacaaccccaggcccagacataggggccagctaagcttcgtagccctcgaaatacagggagtgccccctctggaccctcgagcccacagtccatccaccacagaggtgtctgctgctcatcagatagttcctaccaagaaaatgctgtgtgaacccatctgtgtggcaaaccggcacggggagaaagctgacttccaaggacgtctaccaactgtcacttgcaaaccagaacttgcctctttgtagatgaagactggcagggctgaagaaatgatctcatgttgaaattaatgatgagcttcagggtgaggtgactcagttcgaatgctgttgaatgttggtgtcatgggacttttacaagaagtaaaactgggctataaaaatgatccccttcccctcactagagaagggaggttctattcctctctctgtctttccctctctctatatataccaaaggtcaaatctttggtattttgcattgagtctttaattattcattcactttgacctagtaattgcacttcag

SEQ ID NO: 6632 - protein, 56 aa, Homo sapiens
MVFIHSHSDEQWWRQCPELWQPPCSREAPVGMTVKRTTEMPAPGPTAAAPASRLRV

SEQ ID NO: 6633 - DNA, 367 bp, Homo sapiens
ccttggtgaacttctattcatccttcaaagcccagcagtaatcatcctttagaaagtcttctttcagagggaaccaaaaagaatggggagaattgtgcctgcccagcctcctccttggggactccaggggcccaaagaaccaagagctgcaaatgtcctggtggccttggaagtttatggatggtacagatctggggtggagggcatggccaggacagggagggctgtcagagagagggtctgtgggtttgtggagtgtggggatcagtcgctgactcattagatgaaccaggagcctgcatgctacagcccacctgccaaatcttgcccccacctgctttttaaaataaagttttattggaacatg

SEQ ID NO: 6634 - protein, 66 aa, Homo sapiens [sequence omitted]

SEQ ID NO: 6635 - DNA, 415 bp, Homo sapiens
gaaaacaggggctcattttagcttcaacatcagggcatctacacaccattgcaaatgcagaggaagattaaggctgggcatgtcacagtggggggctacccctggaacccacccttccacggtgcccagtttaggtgagtgtgccataaatgatggcttgttatctgagtgtcagcaccacagctcttcaggaaagcccccactggggtgctctgcagaaaataaacctgaagcttcaactgggctcagcataaactgtccccacagggactttcagacaccaaagtgactccctggcccaacagggaccactgttgagtggcccagatgagcaggaatctccctcacgaatccatgcaggaggaccaagggccccaggacctgtgggcaaagagcccaggctcctccagggttt

SEQ ID NO: 6636 - protein, 69 aa, Homo sapiens
MSQWGATPGTHPSTVPSLGECAINDGLLSECQHHSSSGKPPLGCSAENKPEASTGLSINCPHRDFQTPK

SEQ ID NO: 6637 - DNA, 2424 bp, Homo sapiens
aaattacccagtatcaggtattgtctttattagcagcgtgagaacagactaatacagtacactacaatttagacttctagtgactatacctggagccccctgttctccacctctctctcacaggtacacacacaaccatccacttattgaagaggatgagcaagggcacagcctcaagcccactgcctgtgtttgaattctgagtggtttgctaactatgtagatttgggcaaatcacttaaaactcgttttcttgtctgaaaaattgatagtaaaggtgcttaccttgcgggctattgcaaaggacaaaataaagtctagtatgtgtatttgttcgtcactgcatttccagagcctagaacagggcctggtgtgcagtaggtgcacaatgcgtgtccgtggaaccagcagcaggccctctacctgcctgccagtgcaggcactggtcagtcaccatgacaaagctgatctgcctgcccctcacacacttgctccccaatcccttcacttggtgacagccttccccgacacccttgggcgcccggcccctgggacgcctgtggagctgttggggagaaggaaatctgaggcccccacatcctgacccaggaccagctggccttgcggattccagaactttctgaagcagccagccggccaccagccaggaagcggaaggtgcagaaatagaaacgcacagagaggcaattgctccttttgccctgcaaggaagggaagccgggggagaggggccaggagaggaagctgaggggcagaggagaggatggggaggccaaggacggcgggatggggttccagagcttgccggacctcggcccccgcctgctcccatgtccagtgccctgggtcagggctgtggggagcagctttcaacaccttcattttcctgacaagatcccaaaatgaggagctctgatttgctctgaatgcgacttgaagccaggccccggggaaagtatttgtggcaactttcaagggttgatgctgtggctggcagcagaggtggggggcaggaggggggtgctcacaatggtcgttggctgactgactgactgaatgaatgaatgaatgagtgagtgagttgtggccagccctataccccagcagagccactgggcttgaggacaggaccctgcctgctggccacgtacctagacagccacagacagaaaacacgcttagcaggctgcactgaggcggagaaatgagatctggccccagctcagctctgctgcatcccaggtcatccgaggatgtcactggccttctcagcctcacaccccttcctcccagtctgggagtatagcaggaggccccccaaaagtgtcctctagtccagactcccccactgcagccagcctacattctagagctgacatgggccaagaccaggaaggaagggccaccttccctgaaggacactgactcctcaacccctgtgctcagccgaccttgcgaagttggaaacacactgccctcctaggctgagctgagcccttcccagctcgcagcccagcgggtccctgaggtcccatagagggggctggcagtggcttcttccaggcagggccccaatgcccaccacccaccttggaaggtctggctggaggggtctctgaggacagggaccatgacaaggttccccttgcctcccccatgctatggccctggccctcctgcagagcccacggtcctggcaggggccacacaggatccctgcacccgtggcccaaccacaggctcggccaccatgcacacggcacaagcatctgctccctggccttcctgacaggcagcgggcgccctggcactggcgggcgggcaggcggcgtgtgcaggttggggccgcccaggggcaggagtgcaggcctgcagttgacaaggcctggtttcctgctctcactctggggaggaagaggaagatgacaagcaaaccagtgcttgtcaaggagtcatctaaacacgcactcagaggccacttccaaagaccgccctgaggcagtccagggtccatcgccgaccaccctccccaaaaaagaatgacatcagccaggtgacagcagcaggcaggtacagatggggtcctctagggatggcagattgccagggagcctggtcacccttccctaagggtcaactcagtttctcagccatggaccaaggtgcccctttgtcctgtgaactttgagaagcagagggcccttctctttggagtctgagagaagcccaggagaagaaggaatgaaaccctgcacatctcatcttcttaaaatgcagattcaggcctgtttttccaagtccatcaccaaacacaaggtctttccaaattaggtgctgagctgagctcatattcccaaaatgcacactcccctccttttttttttttttttgcttgggaatgct

SEQ ID NO: 6638 - protein, 33 aa, Homo sapiens
MRSGPSSALLHPRSSEDVTGLLSLTPLPPSLGV

SEQ ID NO: 6639 - DNA, 2385 bp, Homo sapiens
ggaagactcacaggaagctgaaatgcatattgctagatagaagaaccaatccgaaaaggctactttctctatgattccaactacgtgactttctggaaaaggcaaaactatggagatggtaaaaagagaaaaggatttctgctttcaaatccgctgtttcctgaggctgggtgctgagttcagctgcccctggaggagcagcagctctgggccgctggcagggccgcatcctcttcagtctggacaaattccctgcagccaggggaagtggcccatgcctgctgtcctggtatgcaacatcggacctgcatgctggaatttgacccttttcctgcctgacacccagcaaaataaaccccagggaagggatcaatgcctgcaaccggaatccagaagaaagaggagtgacagataagccctgggtcagaggccagtgaggtcaggacctcccagggacggacacacagcccaaggtttgggtgtgagatttcagagccccaggtaataaaaataaaagagttaaggtgcctagcagctcagtccctcacagtgctacctggggcaaggatggaaattcacctcagtttgctgtggttgctattggctgaatcatgtcctcccaaaattcatatgttggagtgtacctcgggatgtggtatctcaggatacctcagtacctcgggatgtggcgttgtttggagaaagggtcgctagagaggtaattaagttaaaatgaggccatgagggtgggcccaaatccaatttaattggcatccttctaaaaaggggaaatttggacacagagagagacacaaacagggagggcgccctgggaacaggaaggcggccacctccaagccaaggaggtcctggagcagatcctcgtctcagagctccagcgggaaccacccctgcccaaccttcattttgaacttctggcctccagagctgtgagacgatacacttctgtggtttaagccgtgtagcctgtggcacttggttatagcagccccaggaagcccaacacagtggccaaaacagagaggacagctggcttgctaacgtcacacagcacactgacgagcagggtcttcaactcactactcaggaacccagtagtcaggggtgagggggaatgcccttccaatatggctagagccagactgtctgggcccaatccccagctttgtatgtattacctaacctctctgtgcctcagtttaccaagctataaaatgggcataatgacagcacctgcctggtgatgctcttggagggatgaaaggaggcaacggtgtgggcatctggacggcaccaggcattgccctgagagctggccatgcggggaatgctccatccttacgccagccaggtgttgccacccctctcttgctgatggagaccaggagggtcgggacagaaggccttgcccaaggtctcacagccaggagcctgcctccactggtccctgtgtggccagtgctgccctgggggctgctgctgtgcactggagggtcagctgcatggaggagccagaggagatggtgccgaggacagagcttgcggccctgtacctggctcccagaggaatgggtcttggagctgctctgcacagacactgaccttgaggagagacaggggcgccactccctcctccactcgctcaggtgagcattcaaagcgtcataggtaaccaggagcactagttggcatggcgatttcagaggtgagtccaatgtggaccctggccctgggaaggtcacagtttgatggaagatgccagactcacacattcactcactcactcattccctcgtgtattcattccgcaaagcttcactcattacctacctggggccaggactcagtctcagagccaaggagagcgtggttgggaggagactcagacgctttccagcatccctgcccccaggtgtctacacacctgtgtactccccaacttggagtgtggcagggctgcaaagagggtggatgtgctcccgtggtgaggttactttatatcgcaaaggtgccggacttctgcaggtgtaattaaggtcctaaccagctgaccttgagttaatcaaaatggagatgatcctgggtgggcccaagctaatcaggtgagccctttcaaaatggccttgaagtcagagactctcctgcaggatttggagatccagccccatgaggaacaggggcaaggaaatgcaatcttccacaaccgagagagcttggaagagggtcccaaacctcagaggagaccccagctccggttggcaccttgactgcagccccatgagacagaagacccagctatgccatgtcctggctcctgacctgcccaaactttaagacaatagataaatgccattttaagctttt

SEQ ID NO: 6640 - protein, 101 aa, Homo sapiens
MEMVKREKDFCFQIRCFLRLGAEFSCPWRSSSSGPLAGPHPLQSGQIPCSQGKWPMPAVLVCNIGPACWNLTLFLPDTQQNKPQGRDQCLQPESRRKRSDR

SEQ ID NO: 6641 - DNA, 665 bp, Homo sapiens
gcaagacagccacaccttgaactctgactcaaggaagagagtgggcagctcaccagagaggccagaggaggcggcaggaaggtggggtctctccagccaggggcttcctgaaagagctgccttctgagcaggccccccaggctaggaagatgtgcacctgccgagctgggcaggagagggtggcccagtggaggacccagcatgggcagaggtttggaggtggcaggtcctgagggaagcggaaggcagccaggttgtgacagcctgtgaggacctcttggctcccggagccttctctctcctggaatagagatgacaccgtgctgccattgaactcaacccgaaaaaatgatctgttgcaaagctcacaggaaataatggagcaatgttacacgataaactgtaaagtgtggtgagcatgtgaacaagcgtccaggacccagcgaagccccaggctactgggctaggcgtcagatgagaagaggcagagggcaacctcctgtaggatctgaggccttcatgtgctcagcccatggctgtcgtcacggtgacgtgtgcatgcgatgtatctgggccatccttgttcttgaacgcgggcagtgagtcccacggtgatgtggcatgtcacgagctgaaggaggggcacctgcattcaggcttgcgaa

SEQ ID NO: 6642 - protein, 43 aa, Homo sapiens
MAVVTVTCACDVSGPSLFLNAGSESHGDVACHELKEGHLHSGL

SEQ ID NO: 6643 - DNA, 795 bp, Homo sapiens
atggtgagcactcagagggaaggcctcactgccccggggagctgccagagccgctgggcagaggccctggtgttgagagctcattgtctataccggggccggtgcgggcaccgggtgatcaggaagcaacgcgtgcggcccgctaagcccccgtgggccctcggagcagacgtggcctcctctggccctctgcgtgcagcacagtccagctcaataggaagagaggaagcaaatcctaggcctgaaacacccgataccccaaatcctaggcctgaaacacccgataccccaaatcctaggcctgaaatccctgatgccccaaatcctaggtctgaaacccctgataccccgaatcctaggcctgaaatccctgatgccccaaatcctaggcctgaaacacccgataccccaaatcctaggtctgaaatccccgataccccaaatcctaggcctgaaatccccaatgccccaaatcctaggcctgaaatccctgatgccccaaatcctaggcctgaaacacccgataccccaaatcctaggcctgaaacccccgataccccaaatcctaggcctgaaatccccgatgccccaaatcctaggcctgaaatccccgatgccccaaatcctaggcctgaaatccccgatgccccaaatcctaggcctgaaatccccgatgccctaaatcctaggcctgaaacccacgatgccccaaatcctaggcctgacacaccccataccccaaatcctaggcctgaaacccctgatgccgcagtcctaactccgggaagcaaataa

SEQ ID NO: 6644 - protein, 264 aa, Homo sapiens
MVSTQREGLTAPGSCQSRWAEALVLRAHCLYRGRCGHRVIRKQRVRPAKPPWALGADVASSGPLRAAQSSSIGREEANPRPETPDTPNPRPETPDTPNPRPEIPDAPNPRSETPDTPNPRPEIPDAPNPRPETPDTPNPRSEIPDTPNPRPEIPNAPNPRPEIPDAPNPRPETPDTPNPRPETPDTPNPRPEIPDAPNPRPEIPDAPNPRPEIPDAPNPRPEIPDALNPRPETHDAPNPRPDTPHTPNPRPETPDAAVLTPGSK

SEQ ID NO: 6645 - DNA, 663 bp, Homo sapiens
cacacggactacaggggagttttgttgaagttgcaaagtcctggagcctccagagggctgtcggcgcagtagcagcgagcagcagagtccgcacgctccggcgaggggcagaagagcgcgagggagcgcggggcagcagaagcgagagccgagcgcggacccagccaggacccacagccctccccagctgcccaggaagagccccagccatggaacaccagctcctgtgctgcgaagtggaaaccatccgccgcgcgtaccccgatgccaacctcctcaacgaccgggtgctgcgggccatgctgaaggcggaggagacctgcgcgccctcggtgtcctacttcaaatgtgtgcagaaggaggtcctgccgtccatgcggaagatcgtcgccacctggatgctggaggggtgccttcgggagaagccagtgccaggggcaccccaatgggcccgagggtgcgggctggcaggctgggtgcgctttgtgtcccccgcctgcgccccagcccggctgcgcctcagcggccgggagccgccaactccggggggagggggcatagatttgatttttaaattaatatccatggacacgtatgcaagggccgctcgtgccagtattatgcgccatctttgctcttttattgcaaagcaaaagtgtttat

SEQ ID NO: 6646 - protein, 150 aa, Homo sapiens
MEHQLLCCEVETIRRAYPDANLLNDRVLRAMLKAEETCAPSVSYFKCVQKEVLPSMRKIVATWMLEGCLREKPVPGAPQWARGCGLAGWVRFVSPACAPARLRLSGREPPTPGGGGIDLIFKLISMDTYARAARASIMRHLCSFIAKQKC

SEQ ID NO: 6647 - DNA, 976 bp, Homo sapiens
cacacggactacaggggagttttgttgaagttgcaaagtcctggagcctccagagggctgtcggcgcagtagcagcgagcagcagagtccgcacgctccggcgaggggcagaagagcgcgagggagcgcggggcagcagaagcgagagccgagcgcggacccagccaggacccacagccctccccagctgcccaggaagagccccagccatggaacaccagctcctgtgctgcgaagtggaaaccatccgccgcgcgtaccccgatgccaacctcctcaacgaccgggtgctgcgggccatgctgaaggcggaggagacctgcgcgccctcggtgtcctacttcaaatgtgtgcagaaggaggtcctgccgtccatgcggaagatcgtcgccacctggatgctggaggtctgcgaggaacagaagtgcgaggaggaggtcttcccgctggccatgaactacctggaccgcttcctgtcgctggagcccgtgaaaaagagccgcctgcagctgctgggggccacttgcatgttcgtggcctctaagatgaaggagaccatccccctgacggccgagaagctgtgcatctacaccgacaactccatccggcccgaggagctgctgcaaatggagctgctcctggtgaacaagctcaagtggaacctggccgcaatgaccccgcacgatttcattgaacacttcctctccaaaatgccagaggcggaggagaacaaacagatcatccgcaaacacgcgcagaccttcgttgccctctgtgccacaggtagggcaggcccggcagcccccggcctccccttgagagccggctccttaggtgaccctggccggcttcttgctctccacctgggtgctgtctgggaagatgtccccagaccccctcctgcgctggagagcgctcttccagctctggtgagcagaggccctggattgtttgtcgcgctggatggagggagatt

SEQ ID NO: 6648 - protein, 254 aa, Homo sapiens
MEHQLLCCEVETIRRAYPDANLLNDRVLRAMLKAEETCAPSVSYFKCVQKEVLPSMRKIVATWMLEVCEEQKCEEEVFPLAMNYLDRFLSLEPVKKSRLQLLGATCMFVASKMKETIPLTAEKLCIYTDNSIRPEELLQMELLLVNKLKWNLAAMTPHDFIEHFLSKMPEAEENKQIIRKHAQTFVALCATGRAGPAAPGLPLRAGSLGDPGRLLALHLGAVWEDVPRPPPALESALPALVSRGPGLFVALDGG

SEQ ID NO: 6649 - DNA, 1274 bp, Homo sapiens
cacacggactacaggggagttttgttgaagttgcaaagtcctggagcctccagagggctgtcggcgcagtagcagcgagcagcagagtccgcacgctccggcgaggggcagaagagcgcgagggagcgcggggcagcagaagcgagagccgagcgcggacccagccaggacccacagccctccccagctgcccaggaagagccccagccatggaacaccagctcctgtgctgcgaagtggaaaccatccgccgcgcgtaccccgatgccaacctcctcaacgaccgggtgctgcgggccatgctgaaggcggaggagacctgcgcgccctcggtgtcctacttcaaatgtgtgcagaaggaggtcctgccgtccatgcggaagatcgtcgccacctggatgctggaggtctgcgaggaacagaagtgcgaggaggaggtcttcccgctggccatgaactacctggaccgcttcctgtcgctggagcccgtgaaaaagagccgcctgcagctgctgggggccacttgcatgttcgtggcctctaagatgaaggagaccatccccctgacggccgagaagctgtgcatctacaccgacaactccatccggcccgaggagctgctgcaaatggagctgctcctggtgaacaagctcaagtggaacctggccgcaatgaccccgcacgatttcattgaacacttcctctccaaaatgccagaggcggaggagaacaaacagatcatccgcaaacacgcgcagaccttcgttgccctctgtgccacagatgtgaagttcatttccaatccgccctccatggtggcagcggggagcgtggtggccgcagtgcaaggcctgaacctgaggagccccaacaacttcctgtcctactaccgcctcacacgcttcctctccagagtgatcaagtgtgacccggactgcctccgggcctgccaggagcagatcgaagccctgctggagtcaagcctgcgccaggcccagcagaacatggaccccaaggccgccgaggaggaggaagaggaggaggaggaggtggacctggcttgcacacccaccgacgtgcgggacgtggacatctgagggcgccaggcaggcgggcgccaccgccacccgcagcgagggcggagccggccccaggtgctcccctgacagtccctcctctccggagcattttgataccagaagggaaagcttcattctccttgttgttggttgttttttcctttgctctttcccccttccatctctgacttaagc

SEQ ID NO: 6650 - protein, 295 aa, Homo sapiens; identical to SEQ ID NO: 904

SEQ ID NO: 6651 - DNA, 1305 bp, Homo sapiens
cacacggactacaggggagttttgttgaagttgcaaagtcctggagcctccagagggctgtcggcgcagtagcagcgagcagcagagtccgcacgctccggcgaggggcagaagagcgcgagggagcgcggggcagcagaagcgagagccgagcgcggacccagccaggacccacagccctccccagctgcccaggaagagccccagccatggaacaccagctcctgtgctgcgaagtggaaaccatccgccgcgcgtaccccgatgccaacctcctcaacgaccgggtgctgcgggccatgctgaaggcggaggagacctgcgcgccctcggtgtcctacttcaaatgtgtgcagaaggaggtcctgccgtccatgcggaagatcgtcgccacctggatgctggaggtctgcgaggaacagaagtgcgaggaggaggtcttcccgctggccatgaactacctggaccgcttcctgtcgctggagcccgtgaaaaagagccgcctgcagctgctgggggccacttgcatgttcgtggcctctaagatgaaggagaccatccccctgacggccgagaagctgtgcatctacaccgacaactccatccggcccgaggagctgctgcaaatggagctgctcctggtgaacaagctcaagtggaacctggccgcaatgaccccgcacgatttcattgaacacttcctctccaaaatgccagaggcggaggagaacaaacagatcatccgcaaacacgcgcagaccttcgttgccctctgtgccacagatgtgaagttcatttccaatccgccctccatggtggcagcggggagcgtggtggccgcagtgcaaggcctgaacctgaggagccccaacaacttcctgtcctactaccgcctcacacgcttcctctccagagtgatcaagtgtgacccggactgcctccgggcctgccaggagcagatcgaagccctgctggagtcaagcctgcgccaggcccagcagaacatggaccccaaggccgccgaggaggaggaagaggaggaggaggaggtggacctggcttgcacacccaccgacgtgcgggacgtggacatctgagggcgccaggcaggcgggcgccaccgccacccgcagcgagggcggagccggccccaggtgctcccctgacagtccctcctctccggagcattttgataccagaagggaaagcttcattctccttgttgttggttgttttttcctttgctctttcccccttccatctctgacttaagcaaaagaaaaagattacccaaaaactgtcttt

SEQ ID NO: 6652 - protein, 295 aa, Homo sapiens; identical to SEQ ID NO: 904

SEQ ID NO: 6653 - DNA, 1423 bp, Homo sapiens
cacacggactacaggggagttttgttgaagttgcaaagtcctggagcctccagagggctgtcggcgcagtagcagcgagcagcagagtccgcacgctccggcgaggggcagaagagcgcgagggagcgcggggcagcagaagcgagagccgagcgcggacccagccaggacccacagccctccccagctgcccaggaagagccccagccatggaacaccagctcctgtgctgcgaagtggaaaccatccgccgcgcgtaccccgatgccaacctcctcaacgaccgggtgctgcgggccatgctgaaggcggaggagacctgcgcgccctcggtgtcctacttcaaatgtgtgcagaaggaggtcctgccgtccatgcggaagatcgtcgccacctggatgctggaggtctgcgaggaacagaagtgcgaggaggaggtcttcccgctggccatgaactacctggaccgcttcctgtcgctggagcccgtgaaaaagagccgcctgcagctgctgggggccacttgcatgttcgtggcctctaagatgaaggagaccatccccctgacggccgagaagctgtgcatctacaccgacaactccatccggcccgaggagctgctgcaaatggagctgctcctggtgaacaagctcaagtggaacctggccgcaatgaccccgcacgatttcattgaacacttcctctccaaaatgccagaggcggaggagaacaaacagatcatccgcaaacacgcgcagaccttcgttgccctctgtgccacagatgtgaagttcatttccaatccgccctccatggtggcagcggggagcgtggtggccgcagtgcaaggcctgaacctgaggagccccaacaacttcctgtcctactaccgcctcacacgcttcctctccagagtgatcaagtgtgacccggactgcctccgggcctgccaggagcagatcgaagccctgctggagtcaagcctgcgccaggcccagcagaacatggaccccaaggccgccgaggaggaggaagaggaggaggaggaggtggacctggcttgcacacccaccgacgtgcgggacgtggacatctgagggcgccaggcaggcgggcgccaccgccacccgcagcgagggcggagccggccccaggtgctcccctgacagtccctcctctccggagcattttgataccagaagggaaagcttcattctccttgttgttggttgttttttcctttgctctttcccccttccatctctgacttaagcaaaagaaaaagattacccaaaaactgtctttaaaagagagagagagaaaaaaaaaatagtatttgcataaccctgagcggtgggggaggagggttgtgctacagatgatagaggattttataccccaataatcaactcgtttttatatt

SEQ ID NO: 6654 - protein, 295 aa, Homo sapiens; identical to SEQ ID NO: 904

SEQ ID NO: 6655 - DNA, 1510 bp, Homo sapiens
cacacggactacaggggagttttgttgaagttgcaaagtcctggagcctccagagggctgtcggcgcagtagcagcgagcagcagagtccgcacgctccggcgaggggcagaagagcgcgagggagcgcggggcagcagaagcgagagccgagcgcggacccagccaggacccacagccctccccagctgcccaggaagagccccagccatggaacaccagctcctgtgctgcgaagtggaaaccatccgccgcgcgtaccccgatgccaacctcctcaacgaccgggtgctgcgggccatgctgaaggcggaggagacctgcgcgccctcggtgtcctacttcaaatgtgtgcagaaggaggtcctgccgtccatgcggaagatcgtcgccacctggatgctggaggtctgcgaggaacagaagtgcgaggaggaggtcttcccgctggccatgaactacctggaccgcttcctgtcgctggagcccgtgaaaaagagccgcctgcagctgctgggggccacttgcatgttcgtggcctctaagatgaaggagaccatccccctgacggccgagaagctgtgcatctacaccgacaactccatccggcccgaggagctgctgcaaatggagctgctcctggtgaacaagctcaagtggaacctggccgcaatgaccccgcacgatttcattgaacacttcctctccaaaatgccagaggcggaggagaacaaacagatcatccgcaaacacgcgcagaccttcgttgccctctgtgccacagatgtgaagttcatttccaatccgccctccatggtggcagcggggagcgtggtggccgcagtgcaaggcctgaacctgaggagccccaacaacttcctgtcctactaccgcctcacacgcttcctctccagagtgatcaagtgtgacccggactgcctccgggcctgccaggagcagatcgaagccctgctggagtcaagcctgcgccaggcccagcagaacatggaccccaaggccgccgaggaggaggaagaggaggaggaggaggtggacctggcttgcacacccaccgacgtgcgggacgtggacatctgagggcgccaggcaggcgggcgccaccgccacccgcagcgagggcggagccggccccaggtgctcccctgacagtccctcctctccggagcattttgataccagaagggaaagcttcattctccttgttgttggttgttttttcctttgctctttcccccttccatctctgacttaagcaaaagaaaaagattacccaaaaactgtctttaaaagagagagagagaaaaaaaaaatagtatttgcataaccctgagcggtgggggaggagggttgtgctacagatgatagaggattttataccccaataatcaactcgtttttatattaatgtacttgtttctctgttgtaagaataggcattaacacaaaggaggcgtctcgggagaggattaggttccatcctttacgtgttt

SEQ ID NO: 6656 - protein, 295 aa, Homo sapiens; identical to SEQ ID NO: 904

SEQ ID NO: 6657 - DNA, 3786 bp, Homo sapiens
cacacggactacaggggagttttgttgaagttgcaaagtcctggagcctccagagggctgtcggcgcagtagcagcgagcagcagagtccgcacgctccggcgaggggcagaagagcgcgagggagcgcggggcagcagaagcgagagccgagcgcggacccagccaggacccacagccctccccagctgcccaggaagagccccagccatggaacaccagctcctgtgctgcgaagtggaaaccatccgccgcgcgtaccccgatgccaacctcctcaacgaccgggtgctgcgggccatgctgaaggcggaggagacctgcgcgccctcggtgtcctacttcaaatgtgtgcagaaggaggtcctgccgtccatgcggaagatcgtcgccacctggatgctggaggtctgcgaggaacagaagtgcgaggaggaggtcttcccgctggccatgaactacctggaccgcttcctgtcgctggagcccgtgaaaaagagccgcctgcagctgctgggggccacttgcatgttcgtggcctctaagatgaaggagaccatccccctgacggccgagaagctgtgcatctacaccgacaactccatccggcccgaggagctgctgcaaatggagctgctcctggtgaacaagctcaagtggaacctggccgcaatgaccccgcacgatttcattgaacacttcctctccaaaatgccagaggcggaggagaacaaacagatcatccgcaaacacgcgcagaccttcgttgccctctgtgccacagatgtgaagttcatttccaatccgccctccatggtggcagcggggagcgtggtggccgcagtgcaaggcctgaacctgaggagccccaacaacttcctgtcctactaccgcctcacacgcttcctctccagagtgatcaagtgtgacccggactgcctccgggcctgccaggagcagatcgaagccctgctggagtcaagcctgcgccaggcccagcagaacatggaccccaaggccgccgaggaggaggaagaggaggaggaggaggtggacctggcttgcacacccaccgacgtgcgggacgtggacatctgagggcgccaggcaggcgggcgccaccgccacccgcagcgagggcggagccggccccaggtgctcccctgacagtccctcctctccggagcattttgataccagaagggaaagcttcattctccttgttgttggttgttttttcctttgctctttcccccttccatctctgacttaagcaaaagaaaaagattacccaaaaactgtctttaaaagagagagagagaaaaaaaaaatagtatttgcataaccctgagcggtgggggaggagggttgtgctacagatgatagaggattttataccccaataatcaactcgtttttatattaatgtacttgtttctctgttgtaagaataggcattaacacaaaggaggcgtctcgggagaggattaggttccatcctttacgtgtttaaaaaaaagcataaaaacattttaaaaacatagaaaaattcagcaaaccatttttaaagtagaagagggttttaggtagaaaaacatattcttgtgcttttcctgataaagcacagctgtagtggggttctaggcatctctgtactttgcttgctcatatgcatgtagtcactttataagtcattgtatgttattatattccgtaggtagatgtgtaacctcttcaccttattcatggctgaagtcacctcttggttacagtagcgtagcgtgcccgtgtgcatgtcctttgcgcctgtgaccaccaccccaacaaaccatccagtgacaaaccatccagtggaggtttgtcgggcaccagccagcgtagcagggtcgggaaaggccacctgtcccactcctacgatacgctactataaagagaagacgaaatagtgacataatatattctatttttatactcttcctatttttgtagtgacctgtttatgagatgctggttttctacccaacggccctgcagccagctcacgtccaggttcaacccacagctacttggtttgtgttcttcttcatattctaaaaccattccatttccaagcactttcagtccaataggtgtaggaaatagcgctgtttttgttgtgtgtgcagggagggcagttttctaatggaatggtttgggaatatccatgtacttgtttgcaagcaggactttgaggcaagtgtgggccactgtggtggcagtggaggtggggtgtttgggaggctgcgtgccagtcaagaagaaaaaggtttgcattctcacattgccaggatgataagttcctttccttttctttaaagaagttgaagtttaggaatcctttggtgccaactggtgtttgaaagtagggacctcagaggtttacctagagaacaggtggtttttaagggttatcttagatgtttcacaccggaaggtttttaaacactaaaatatataatttatagttaaggctaaaaagtatatttattgcagaggatgttcataaggccagtatgatttataaatgcaatctccccttgatttaaacacacagatacacacacacacacacacacacacaaaccttctgcctttgatgttacagatttaatacagtttatttttaaagatagatccttttataggtgagaaaaaaacaatctggaagaaaaaaaccacacaaagacattgattcagcctgtttggcgtttcccagagtcatctgattggacaggcatgggtgcaaggaaaattagggtactcaacctaagttcggttccgatgaattcttatcccctgccccttcctttaaaaaacttagtgacaaaatagacaatttgcacatcttggctatgtaattcttgtaatttttatttaggaagtgttgaagggaggtggcaagagtgtggaggctgacgtgtgagggaggacaggcgggaggaggtgtgaggaggaggctcccgaggggaaggggcggtgcccacaccggggacaggccgcagctccattttcttattgcgctgctaccgttgacttccaggcacggtttggaaatattcacatcgcttctgtgtatctctttcacattgtttgctgctattggaggatcagttttttgttttacaatgtcatatactgccatgtactagttttagttttctcttagaacattgtattacagatgccttttttgtagttttttttttttttatgtgatcaattttgacttaatgtgattactgctctattccaaaaaggttgctgtttcacaatacctcatgcttcacttagccatggtggacccagcgggcaggttctgcctgctttggcgggcagacacgcgggcgcgatcccacacaggctggcgggggccggccccgaggccgcgtgcgtgagaaccgcgccggtgtccccagagaccaggctgtgtccctcttctcttccctgcgcctgtgatgctgggcacttcatctgatcgggggcgtagcatcatagtagtttttacagctgtgttattctttgcgtgtagctatggaagttgcataattattattattattattataacaagtgtgtcttacgtgccaccacggcgttgtacctgtaggactctcattcgggatgattggaatagcttctggaatttgttcaagttttgggtatgtttaatctgttatgtactagtgttctgtttgttattgttttgttaattacaccataatgctaatttaaagagactccaaatctc

SEQ ID NO: 6658 - protein, 295 aa, Homo sapiens; identical to SEQ ID NO: 904

SEQ ID NO: 6659 - DNA, 4291 bp, Homo sapiens
cacacggactacaggggagttttgttgaagttgcaaagtcctggagcctccagagggctgtcggcgcagtagcagcgagcagcagagtccgcacgctccggcgaggggcagaagagcgcgagggagcgcggggcagcagaagcgagagccgagcgcggacccagccaggacccacagccctccccagctgcccaggaagagccccagccatggaacaccagctcctgtgctgcgaagtggaaaccatccgccgcgcgtaccccgatgccaacctcctcaacgaccgggtgctgcgggccatgctgaaggcggaggagacctgcgcgccctcggtgtcctacttcaaatgtgtgcagaaggaggtcctgccgtccatgcggaagatcgtcgccacctggatgctggaggtctgcgaggaacagaagtgcgaggaggaggtcttcccgctggccatgaactacctggaccgcttcctgtcgctggagcccgtgaaaaagagccgcctgcagctgctgggggccacttgcatgttcgtggcctctaagatgaaggagaccatccccctgacggccgagaagctgtgcatctacaccgacaactccatccggcccgaggagctgctgcaaatggagctgctcctggtgaacaagctcaagtggaacctggccgcaatgaccccgcacgatttcattgaacacttcctctccaaaatgccagaggcggaggagaacaaacagatcatccgcaaacacgcgcagaccttcgttgccctctgtgccacagatgtgaagttcatttccaatccgccctccatggtggcagcggggagcgtggtggccgcagtgcaaggcctgaacctgaggagccccaacaacttcctgtcctactaccgcctcacacgcttcctctccagagtgatcaagtgtgacccggactgcctccgggcctgccaggagcagatcgaagccctgctggagtcaagcctgcgccaggcccagcagaacatggaccccaaggccgccgaggaggaggaagaggaggaggaggaggtggacctggcttgcacacccaccgacgtgcgggacgtggacatctgagggcgccaggcaggcgggcgccaccgccacccgcagcgagggcggagccggccccaggtgctcccctgacagtccctcctctccggagcattttgataccagaagggaaagcttcattctccttgttgttggttgttttttcctttgctctttcccccttccatctctgacttaagcaaaagaaaaagattacccaaaaactgtctttaaaagagagagagagaaaaaaaaaatagtatttgcataaccctgagcggtgggggaggagggttgtgctacagatgatagaggattttataccccaataatcaactcgtttttatattaatgtacttgtttctctgttgtaagaataggcattaacacaaaggaggcgtctcgggagaggattaggttccatcctttacgtgtttaaaaaaaagcataaaaacattttaaaaacatagaaaaattcagcaaaccatttttaaagtagaagagggttttaggtagaaaaacatattcttgtgcttttcctgataaagcacagctgtagtggggttctaggcatctctgtactttgcttgctcatatgcatgtagtcactttataagtcattgtatgttattatattccgtaggtagatgtgtaacctcttcaccttattcatggctgaagtcacctcttggttacagtagcgtagcgtgcccgtgtgcatgtcctttgcgcctgtgaccaccaccccaacaaaccatccagtgacaaaccatccagtggaggtttgtcgggcaccagccagcgtagcagggtcgggaaaggccacctgtcccactcctacgatacgctactataaagagaagacgaaatagtgacataatatattctatttttatactcttcctatttttgtagtgacctgtttatgagatgctggttttctacccaacggccctgcagccagctcacgtccaggttcaacccacagctacttggtttgtgttcttcttcatattctaaaaccattccatttccaagcactttcagtccaataggtgtaggaaatagcgctgtttttgttgtgtgtgcagggagggcagttttctaatggaatggtttgggaatatccatgtacttgtttgcaagcaggactttgaggcaagtgtgggccactgtggtggcagtggaggtggggtgtttgggaggctgcgtgccagtcaagaagaaaaaggtttgcattctcacattgccaggatgataagttcctttccttttctttaaagaagttgaagtttaggaatcctttggtgccaactggtgtttgaaagtagggacctcagaggtttacctagagaacaggtggtttttaagggttatcttagatgtttcacaccggaaggtttttaaacactaaaatatataatttatagttaaggctaaaaagtatatttattgcagaggatgttcataaggccagtatgatttataaatgcaatctccccttgatttaaacacacagatacacacacacacacacacacacacaaaccttctgcctttgatgttacagatttaatacagtttatttttaaagatagatccttttataggtgagaaaaaaacaatctggaagaaaaaaaccacacaaagacattgattcagcctgtttggcgtttcccagagtcatctgattggacaggcatgggtgcaaggaaaattagggtactcaacctaagttcggttccgatgaattcttatcccctgccccttcctttaaaaaacttagtgacaaaatagacaatttgcacatcttggctatgtaattcttgtaatttttatttaggaagtgttgaagggaggtggcaagagtgtggaggctgacgtgtgagggaggacaggcgggaggaggtgtgaggaggaggctcccgaggggaaggggcggtgcccacaccggggacaggccgcagctccattttcttattgcgctgctaccgttgacttccaggcacggtttggaaatattcacatcgcttctgtgtatctctttcacattgtttgctgctattggaggatcagttttttgttttacaatgtcatatactgccatgtactagttttagttttctcttagaacattgtattacagatgccttttttgtagttttttttttttttatgtgatcaattttgacttaatgtgattactgctctattccaaaaaggttgctgtttcacaatacctcatgcttcacttagccatggtggacccagcgggcaggttctgcctgctttggcgggcagacacgcgggcgcgatcccacacaggctggcgggggccggccccgaggccgcgtgcgtgagaaccgcgccggtgtccccagagaccaggctgtgtccctcttctcttccctgcgcctgtgatgctgggcacttcatctgatcgggggcgtagcatcatagtagtttttacagctgtgttattctttgcgtgtagctatggaagttgcataattattattattattattataacaagtgtgtcttacgtgccaccacggcgttgtacctgtaggactctcattcgggatgattggaatagcttctggaatttgttcaagttttgggtatgtttaatctgttatgtactagtgttctgtttgttattgttttgttaattacaccataatgctaatttaaagagactccaaatctcaatgaagccagctcacagtgctgtgtgccccggtcacctagcaagctgccgaaccaaaagaatttgcaccccgctgcgggcccacgtggttggggccctgccctggcagggtcatcctgtgctcggaggccatctcgggcacaggcccaccccgccccacccctccagaacacggctcacgcttacctcaaccatcctggctgcggcgtctgtctgaaccacgcgggggccttgagggacgctttgtctgtcgtgatggggcaagggcacaagtcctggatgttgtgtgtatcgagaggccaaaggctggtggcaagtgcacggggcacagcggagtctgtcctgtgacgcgcaagtctgagggtctgggcggcgggcggctgggtctgtgcatttctggttgcaccgcggcgcttcccagcaccaacatgtaaccggcatgtttccagcagaagacaaaaagacaaacatgaaagtctagaaataaaactggtaaaaccccagc

SEQ ID NO: 6660 - protein, 295 aa, Homo sapiens; identical to SEQ ID NO: 904

SEQ ID NO: 6661 - DNA, 3086 bp, Homo sapiens
ttttgttgaagttgcaaagtcctggagcctccagagggctgtcggcgcagtagcagcgagcagcagagtccgcacgctccggcgaggggcagaagagcgcgagggagcgcggggcagcagaagcgagagccgagcgcggacccagccaggacccacagccctccccagctgcccaggaagagccccagccatggaacaccagctcctgtgctgcgaagtggaaaccatccgccgcgcgtaccccgatgccaacctcctcaacgaccgggtgctgcgggccatgctgaaggcggaggagacctgcgcgccctcggtgtcctacttcaaatgtgtgcagaaggaggaggaggtggacctggcttgcacacccaccgacgtgcgggacgtggacatctgagggcgccaggcaggcgggcgccaccgccacccgcagcgagggcggagccggccccaggtgctcccctgacagtccctcctctccggagcattttgataccagaagggaaagcttcattctccttgttgttggttgttttttcctttgctctttcccccttccatctctgacttaagcaaaagaaaaagattacccaaaaactgtctttaaaagagagagagagaaaaaaaaaatagtatttgcataaccctgagcggtgggggaggagggttgtgctacagatgatagaggattttataccccaataatcaactcgtttttatattaatgtacttgtttctctgttgtaagaataggcattaacacaaaggaggcgtctcgggagaggattaggttccatcctttacgtgtttaaaaaaaagcataaaaacattttaaaaacatagaaaaattcagcaaaccatttttaaagtagaagagggttttaggtagaaaaacatattcttgtgcttttcctgataaagcacagctgtagtggggttctaggcatctctgtactttgcttgctcatatgcatgtagtcactttataagtcattgtatgttattatattccgtaggtagatgtgtaacctcttcaccttattcatggctgaagtcacctcttggttacagtagcgtagcgtgcccgtgtgcatgtcctttgcgcctgtgaccaccaccccaacaaaccatccagtgacaaaccatccagtggaggtttgtcgggcaccagccagcgtagcagggtcgggaaaggccacctgtcccactcctacgatacgctactataaagagaagacgaaatagtgacataatatattctatttttatactcttcctatttttgtagtgacctgtttatgagatgctggttttctacccaacggccctgcagccagctcacgtccaggttcaacccacagctacttggtttgtgttcttcttcatattctaaaaccattccatttccaagcactttcagtccaataggtgtaggaaatagcgctgtttttgttgtgtgtgcagggagggcagttttctaatggaatggtttgggaatatccatgtacttgtttgcaagcaggactttgaggcaagtgtgggccactgtggtggcagtggaggtggggtgtttgggaggctgcgtgccagtcaagaagaaaaaggtttgcattctcacattgccaggatgataagttcctttccttttctttaaagaagttgaagtttaggaatcctttggtgccaactggtgtttgaaagtagggacctcagaggtttacctagagaacaggtggtttttaagggttatcttagatgtttcacaccggaaggtttttaaacactaaaatatataatttatagttaaggctaaaaagtatatttattgcagaggatgttcataaggccagtatgatttataaatgcaatctccccttgatttaaacacacagatacacacacacacacacacacacacaaaccttctgcctttgatgttacagatttaatacagtttatttttaaagatagatccttttataggtgagaaaaaaacaatctggaagaaaaaaaccacacaaagacattgattcagcctgtttggcgtttcccagagtcatctgattggacaggcatgggtgcaaggaaaattagggtactcaacctaagttcggttccgatgaattcttatcccctgccccttcctttaaaaaacttagtgacaaaatagacaatttgcacatcttggctatgtaattcttgtaatttttatttaggaagtgttgaagggaggtggcaagagtgtggaggctgacgtgtgagggaggacaggcgggaggaggtgtgaggaggaggctcccgaggggaaggggcggtgcccacaccggggacaggccgcagctccattttcttattgcgctgctaccgttgacttccaggcacggtttggaaatattcacatcgcttctgtgtatctctttcacattgtttgctgctattggaggatcagttttttgttttacaatgtcatatactgccatgtactagttttagttttctcttagaacattgtattacagatgccttttttgtagttttttttttttttatgtgatcaattttgacttaatgtgattactgctctattccaaaaaggttgctgtttcacaatacctcatgcttcacttagccatggtggacccagcgggcaggttctgcctgctttggcgggcagacacgcgggcgcgatcccacacaggctggcgggggccggccccgaggccgcgtgcgtgagaaccgcgccggtgtccccagagaccaggctgtgtccctcttctcttccctgcgcctgtgatgctgggcacttcatctgatcgggggcgtagcatcatagtagtttttacagctgtgttattctttgcgtgtagctatggaagttgcataattattattattattattataacaagtgtgtcttacgtgccaccacggcgttgtacctgtaggactctcattcgggatgattggaatagcttctggaatttgttcaagttttgggtatgtttaatctgttatgtactagtgttctgtttgttattgttttgttaattacaccataatgctaatttaaagagactccaaatctc

SEQ ID NO: 6662 - protein, 79 aa, Homo sapiens [sequence omitted]

SEQ ID NO: 6663 - DNA, 3591 bp, Homo sapiens
ttttgttgaagttgcaaagtcctggagcctccagagggctgtcggcgcagtagcagcgagcagcagagtccgcacgctccggcgaggggcagaagagcgcgagggagcgcggggcagcagaagcgagagccgagcgcggacccagccaggacccacagccctccccagctgcccaggaagagccccagccatggaacaccagctcctgtgctgcgaagtggaaaccatccgccgcgcgtaccccgatgccaacctcctcaacgaccgggtgctgcgggccatgctgaaggcggaggagacctgcgcgccctcggtgtcctacttcaaatgtgtgcagaaggaggaggaggtggacctggcttgcacacccaccgacgtgcgggacgtggacatctgagggcgccaggcaggcgggcgccaccgccacccgcagcgagggcggagccggccccaggtgctcccctgacagtccctcctctccggagcattttgataccagaagggaaagcttcattctccttgttgttggttgttttttcctttgctctttcccccttccatctctgacttaagcaaaagaaaaagattacccaaaaactgtctttaaaagagagagagagaaaaaaaaaatagtatttgcataaccctgagcggtgggggaggagggttgtgctacagatgatagaggattttataccccaataatcaactcgtttttatattaatgtacttgtttctctgttgtaagaataggcattaacacaaaggaggcgtctcgggagaggattaggttccatcctttacgtgtttaaaaaaaagcataaaaacattttaaaaacatagaaaaattcagcaaaccatttttaaagtagaagagggttttaggtagaaaaacatattcttgtgcttttcctgataaagcacagctgtagtggggttctaggcatctctgtactttgcttgctcatatgcatgtagtcactttataagtcattgtatgttattatattccgtaggtagatgtgtaacctcttcaccttattcatggctgaagtcacctcttggttacagtagcgtagcgtgcccgtgtgcatgtcctttgcgcctgtgaccaccaccccaacaaaccatccagtgacaaaccatccagtggaggtttgtcgggcaccagccagcgtagcagggtcgggaaaggccacctgtcccactcctacgatacgctactataaagagaagacgaaatagtgacataatatattctatttttatactcttcctatttttgtagtgacctgtttatgagatgctggttttctacccaacggccctgcagccagctcacgtccaggttcaacccacagctacttggtttgtgttcttcttcatattctaaaaccattccatttccaagcactttcagtccaataggtgtaggaaatagcgctgtttttgttgtgtgtgcagggagggcagttttctaatggaatggtttgggaatatccatgtacttgtttgcaagcaggactttgaggcaagtgtgggccactgtggtggcagtggaggtggggtgtttgggaggctgcgtgccagtcaagaagaaaaaggtttgcattctcacattgccaggatgataagttcctttccttttctttaaagaagttgaagtttaggaatcctttggtgccaactggtgtttgaaagtagggacctcagaggtttacctagagaacaggtggtttttaagggttatcttagatgtttcacaccggaaggtttttaaacactaaaatatataatttatagttaaggctaaaaagtatatttattgcagaggatgttcataaggccagtatgatttataaatgcaatctccccttgatttaaacacacagatacacacacacacacacacacacacaaaccttctgcctttgatgttacagatttaatacagtttatttttaaagatagatccttttataggtgagaaaaaaacaatctggaagaaaaaaaccacacaaagacattgattcagcctgtttggcgtttcccagagtcatctgattggacaggcatgggtgcaaggaaaattagggtactcaacctaagttcggttccgatgaattcttatcccctgccccttcctttaaaaaacttagtgacaaaatagacaatttgcacatcttggctatgtaattcttgtaatttttatttaggaagtgttgaagggaggtggcaagagtgtggaggctgacgtgtgagggaggacaggcgggaggaggtgtgaggaggaggctcccgaggggaaggggcggtgcccacaccggggacaggccgcagctccattttcttattgcgctgctaccgttgacttccaggcacggtttggaaatattcacatcgcttctgtgtatctctttcacattgtttgctgctattggaggatcagttttttgttttacaatgtcatatactgccatgtactagttttagttttctcttagaacattgtattacagatgccttttttgtagttttttttttttttatgtgatcaattttgacttaatgtgattactgctctattccaaaaaggttgctgtttcacaatacctcatgcttcacttagccatggtggacccagcgggcaggttctgcctgctttggcgggcagacacgcgggcgcgatcccacacaggctggcgggggccggccccgaggccgcgtgcgtgagaaccgcgccggtgtccccagagaccaggctgtgtccctcttctcttccctgcgcctgtgatgctgggcacttcatctgatcgggggcgtagcatcatagtagtttttacagctgtgttattctttgcgtgtagctatggaagttgcataattattattattattattataacaagtgtgtcttacgtgccaccacggcgttgtacctgtaggactctcattcgggatgattggaatagcttctggaatttgttcaagttttgggtatgtttaatctgttatgtactagtgttctgtttgttattgttttgttaattacaccataatgctaatttaaagagactccaaatctcaatgaagccagctcacagtgctgtgtgccccggtcacctagcaagctgccgaaccaaaagaatttgcaccccgctgcgggcccacgtggttggggccctgccctggcagggtcatcctgtgctcggaggccatctcgggcacaggcccaccccgccccacccctccagaacacggctcacgcttacctcaaccatcctggctgcggcgtctgtctgaaccacgcgggggccttgagggacgctttgtctgtcgtgatggggcaagggcacaagtcctggatgttgtgtgtatcgagaggccaaaggctggtggcaagtgcacggggcacagcggagtctgtcctgtgacgcgcaagtctgagggtctgggcggcgggcggctgggtctgtgcatttctggttgcaccgcggcgcttcccagcaccaacatgtaaccggcatgtttccagcagaagacaaaaagacaaacatgaaagtctagaaataaaactggtaaaaccccagc

SEQ ID NO: 6664 - protein, 79 aa, Homo sapiens [sequence omitted]

SEQ ID NO: 6665 - DNA, 487 bp, Homo sapiens
cgaggggcagaagagcgcgagggagcgcggggcagcagaagcgagagccgagcgcggacccagccaggacccacagcccctgccctggcagggtcatcctgtgctcggaggccatctcgggcacaggcccaccccgccccacccctccagaacacggctcacgcttacctcaaccatcctggctgcggcgtctgtctgaaccacgcgggggccttgagggacgctttgtctgtcgtgatggggcaagggcacaagtcctggatgttgtgtgtatcgagaggccaaaggctggtggcaagtgcacggggcacagcggagtctgtcctgtgacgcgcaagtctgagggtctgggcggcgggcggctgggtctgtgcatttctggttgcaccgcggcgcttcccagcaccaacatgtaaccggcatgtttccagcagaagacaaaaagacaaacatgaaagtctagaaataaaactggtaaaaccccagc

SEQ ID NO: 6666 - protein, 30 aa, Homo sapiens
MGQGHKSWMLCVSRGQRLVASARGTAESVL

SEQ ID NO: 6667 - DNA, 1689 bp, Homo sapiens
gtgaagttcatttccaatccgccctccatggtggcagcggggagcgtggtggccgcagtgcaaggcctgaacctgaggagccccaacaacttcctgtcctactaccgcctcacacgcttcctctccagagtgatcaagttgtgggccactgtggtggcagtggaggtggggtgtttgggaggctgcgtgccagtcaagaagaaaaaggtttgcattctcacattgccaggatgataagttcctttccttttctttaaagaagttgaagtttaggaatcctttggtgccaactggtgtttgaaagtagggacctcagaggtttacctagagaacaggtggtttttaagggttatcttagatgtttcacaccggaaggtttttaaacactaaaatatataatttatagttaaggctaaaaagtatatttattgcagaggatgttcataaggccagtatgatttataaatgcaatctccccttgatttaaacacacagatacacacacacacacacacacacacaaaccttctgcctttgatgttacagatttaatacagtttatttttaaagatagatccttttataggtgagaaaaaaacaatctggaagaaaaaaaccacacaaagacattgattcagcctgtttggcgtttcccagagtcatctgattggacaggcatgggtgcaaggaaaattagggtactcaacctaagttcggttccgatgaattcttatcccctgccccttcctttaaaaaacttagtgacaaaatagacaatttgcacatcttggctatgtaattcttgtaatttttatttaggaagtgttgaagggaggtggcaagagtgtggaggctgacgtgtgagggaggacaggcgggaggaggtgtgaggaggaggctcccgaggggaaggggcggtgcccacaccggggacaggccgcagctccattttcttattgcgctgctaccgttgacttccaggcacggtttggaaatattcacatcgcttctgtgtatctctttcacattgtttgctgctattggaggatcagttttttgttttacaatgtcatatactgccatgtactagttttagttttctcttagaacattgtattacagatgccttttttgtagttttttttttttttatgtgatcaattttgacttaatgtgattactgctctattccaaaaaggttgctgtttcacaatacctcatgcttcacttagccatggtggacccagcgggcaggttctgcctgctttggcgggcagacacgcgggcgcgatcccacacaggctggcgggggccggccccgaggccgcgtgcgtgagaaccgcgccggtgtccccagagaccaggctgtgtccctcttctcttccctgcgcctgtgatgctgggcacttcatctgatcgggggcgtagcatcatagtagtttttacagctgtgttattctttgcgtgtagctatggaagttgcataattattattattattattataacaagtgtgtcttacgtgccaccacggcgttgtacctgtaggactctcattcgggatgattggaatagcttctggaatttgttcaagttttgggtatgtttaatctgttatgtactagtgttctgtttgttattgttttgttaattacaccataatgctaatttaaagagactccaaatctc

SEQ ID NO: 6668 - protein, 68 aa, Homo sapiens [sequence omitted]

SEQ ID NO: 6669 - DNA, 2194 bp, Homo sapiens
gtgaagttcatttccaatccgccctccatggtggcagcggggagcgtggtggccgcagtgcaaggcctgaacctgaggagccccaacaacttcctgtcctactaccgcctcacacgcttcctctccagagtgatcaagttgtgggccactgtggtggcagtggaggtggggtgtttgggaggctgcgtgccagtcaagaagaaaaaggtttgcattctcacattgccaggatgataagttcctttccttttctttaaagaagttgaagtttaggaatcctttggtgccaactggtgtttgaaagtagggacctcagaggtttacctagagaacaggtggtttttaagggttatcttagatgtttcacaccggaaggtttttaaacactaaaatatataatttatagttaaggctaaaaagtatatttattgcagaggatgttcataaggccagtatgatttataaatgcaatctccccttgatttaaacacacagatacacacacacacacacacacacacaaaccttctgcctttgatgttacagatttaatacagtttatttttaaagatagatccttttataggtgagaaaaaaacaatctggaagaaaaaaaccacacaaagacattgattcagcctgtttggcgtttcccagagtcatctgattggacaggcatgggtgcaaggaaaattagggtactcaacctaagttcggttccgatgaattcttatcccctgccccttcctttaaaaaacttagtgacaaaatagacaatttgcacatcttggctatgtaattcttgtaatttttatttaggaagtgttgaagggaggtggcaagagtgtggaggctgacgtgtgagggaggacaggcgggaggaggtgtgaggaggaggctcccgaggggaaggggcggtgcccacaccggggacaggccgcagctccattttcttattgcgctgctaccgttgacttccaggcacggtttggaaatattcacatcgcttctgtgtatctctttcacattgtttgctgctattggaggatcagttttttgttttacaatgtcatatactgccatgtactagttttagttttctcttagaacattgtattacagatgccttttttgtagttttttttttttttatgtgatcaattttgacttaatgtgattactgctctattccaaaaaggttgctgtttcacaatacctcatgcttcacttagccatggtggacccagcgggcaggttctgcctgctttggcgggcagacacgcgggcgcgatcccacacaggctggcgggggccggccccgaggccgcgtgcgtgagaaccgcgccggtgtccccagagaccaggctgtgtccctcttctcttccctgcgcctgtgatgctgggcacttcatctgatcgggggcgtagcatcatagtagtttttacagctgtgttattctttgcgtgtagctatggaagttgcataattattattattattattataacaagtgtgtcttacgtgccaccacggcgttgtacctgtaggactctcattcgggatgattggaatagcttctggaatttgttcaagttttgggtatgtttaatctgttatgtactagtgttctgtttgttattgttttgttaattacaccataatgctaatttaaagagactccaaatctcaatgaagccagctcacagtgctgtgtgccccggtcacctagcaagctgccgaaccaaaagaatttgcaccccgctgcgggcccacgtggttggggccctgccctggcagggtcatcctgtgctcggaggccatctcgggcacaggcccaccccgccccacccctccagaacacggctcacgcttacctcaaccatcctggctgcggcgtctgtctgaaccacgcgggggccttgagggacgctttgtctgtcgtgatggggcaagggcacaagtcctggatgttgtgtgtatcgagaggccaaaggctggtggcaagtgcacggggcacagcggagtctgtcctgtgacgcgcaagtctgagggtctgggcggcgggcggctgggtctgtgcatttctggttgcaccgcggcgcttcccagcaccaacatgtaaccggcatgtttccagcagaagacaaaaagacaaacatgaaagtctagaaataaaactggtaaaaccccagc

SEQ ID NO: 6670 - protein, 68 aa, Homo sapiens [sequence omitted]

SEQ ID NO: 6671 - DNA, 2740 bp, Homo sapiens
gactgcctccgggcctgccaggagcagatcgaagccctgctggagtcaagcctgcgccaggcaggcgggcgccaccgccacccgcagcgagggcggagccggccccaggtgctcccctgacagtccctcctctccggagcattttgataccagaagggaaagcttcattctccttgttgttggttgttttttcctttgctctttcccccttccatctctgacttaagcaaaagaaaaagattacccaaaaactgtctttaaaagagagagagagaaaaaaaaaatagtatttgcataaccctgagcggtgggggaggagggttgtgctacagatgatagaggattttataccccaataatcaactcgtttttatattaatgtacttgtttctctgttgtaagaataggcattaacacaaaggaggcgtctcgggagaggattaggttccatcctttacgtgtttaaaaaaaagcataaaaacattttaaaaacatagaaaaattcagcaaaccatttttaaagtagaagagggttttaggtagaaaaacatattcttgtgcttttcctgataaagcacagctgtagtggggttctaggcatctctgtactttgcttgctcatatgcatgtagtcactttataagtcattgtatgttattatattccgtaggtagatgtgtaacctcttcaccttattcatggctgaagtcacctcttggttacagtagcgtagcgtgcccgtgtgcatgtcctttgcgcctgtgaccaccaccccaacaaaccatccagtgacaaaccatccagtggaggtttgtcgggcaccagccagcgtagcagggtcgggaaaggccacctgtcccactcctacgatacgctactataaagagaagacgaaatagtgacataatatattctatttttatactcttcctatttttgtagtgacctgtttatgagatgctggttttctacccaacggccctgcagccagctcacgtccaggttcaacccacagctacttggtttgtgttcttcttcatattctaaaaccattccatttccaagcactttcagtccaataggtgtaggaaatagcgctgtttttgttgtgtgtgcagggagggcagttttctaatggaatggtttgggaatatccatgtacttgtttgcaagcaggactttgaggcaagtgtgggccactgtggtggcagtggaggtggggtgtttgggaggctgcgtgccagtcaagaagaaaaaggtttgcattctcacattgccaggatgataagttcctttccttttctttaaagaagttgaagtttaggaatcctttggtgccaactggtgtttgaaagtagggacctcagaggtttacctagagaacaggtggtttttaagggttatcttagatgtttcacaccggaaggtttttaaacactaaaatatataatttatagttaaggctaaaaagtatatttattgcagaggatgttcataaggccagtatgatttataaatgcaatctccccttgatttaaacacacagatacacacacacacacacacacacacaaaccttctgcctttgatgttacagatttaatacagtttatttttaaagatagatccttttataggtgagaaaaaaacaatctggaagaaaaaaaccacacaaagacattgattcagcctgtttggcgtttcccagagtcatctgattggacaggcatgggtgcaaggaaaattagggtactcaacctaagttcggttccgatgaattcttatcccctgccccttcctttaaaaaacttagtgacaaaatagacaatttgcacatcttggctatgtaattcttgtaatttttatttaggaagtgttgaagggaggtggcaagagtgtggaggctgacgtgtgagggaggacaggcgggaggaggtgtgaggaggaggctcccgaggggaaggggcggtgcccacaccggggacaggccgcagctccattttcttattgcgctgctaccgttgacttccaggcacggtttggaaatattcacatcgcttctgtgtatctctttcacattgtttgctgctattggaggatcagttttttgttttacaatgtcatatactgccatgtactagttttagttttctcttagaacattgtattacagatgccttttttgtagttttttttttttttatgtgatcaattttgacttaatgtgattactgctctattccaaaaaggttgctgtttcacaatacctcatgcttcacttagccatggtggacccagcgggcaggttctgcctgctttggcgggcagacacgcgggcgcgatcccacacaggctggcgggggccggccccgaggccgcgtgcgtgagaaccgcgccggtgtccccagagaccaggctgtgtccctcttctcttccctgcgcctgtgatgctgggcacttcatctgatcgggggcgtagcatcatagtagtttttacagctgtgttattctttgcgtgtagctatggaagttgcataattattattattattattataacaagtgtgtcttacgtgccaccacggcgttgtacctgtaggactctcattcgggatgattggaatagcttctggaatttgttcaagttttgggtatgtttaatctgttatgtactagtgttctgtttgttattgttttgttaattacaccataatgctaatttaaagagactccaaatctc

SEQ ID NO: 6672 - protein, 84 aa, Homo sapiens
MLGTSSDRGRSIIVVFTAVLFFACSYGSCIIIIIIIITSVSYVPPRRCTCRTLIRDDWNSFWNLFKFWVCLICYVLVFCLLLFC

SEQ ID NO: 6673 - DNA, 3245 bp, Homo sapiens
gactgcctccgggcctgccaggagcagatcgaagccctgctggagtcaagcctgcgccaggcaggcgggcgccaccgccacccgcagcgagggcggagccggccccaggtgctcccctgacagtccctcctctccggagcattttgataccagaagggaaagcttcattctccttgttgttggttgttttttcctttgctctttcccccttccatctctgacttaagcaaaagaaaaagattacccaaaaactgtctttaaaagagagagagagaaaaaaaaaatagtatttgcataaccctgagcggtgggggaggagggttgtgctacagatgatagaggattttataccccaataatcaactcgtttttatattaatgtacttgtttctctgttgtaagaataggcattaacacaaaggaggcgtctcgggagaggattaggttccatcctttacgtgtttaaaaaaaagcataaaaacattttaaaaacatagaaaaattcagcaaaccatttttaaagtagaagagggttttaggtagaaaaacatattcttgtgcttttcctgataaagcacagctgtagtggggttctaggcatctctgtactttgcttgctcatatgcatgtagtcactttataagtcattgtatgttattatattccgtaggtagatgtgtaacctcttcaccttattcatggctgaagtcacctcttggttacagtagcgtagcgtgcccgtgtgcatgtcctttgcgcctgtgaccaccaccccaacaaaccatccagtgacaaaccatccagtggaggtttgtcgggcaccagccagcgtagcagggtcgggaaaggccacctgtcccactcctacgatacgctactataaagagaagacgaaatagtgacataatatattctatttttatactcttcctatttttgtagtgacctgtttatgagatgctggttttctacccaacggccctgcagccagctcacgtccaggttcaacccacagctacttggtttgtgttcttcttcatattctaaaaccattccatttccaagcactttcagtccaataggtgtaggaaatagcgctgtttttgttgtgtgtgcagggagggcagttttctaatggaatggtttgggaatatccatgtacttgtttgcaagcaggactttgaggcaagtgtgggccactgtggtggcagtggaggtggggtgtttgggaggctgcgtgccagtcaagaagaaaaaggtttgcattctcacattgccaggatgataagttcctttccttttctttaaagaagttgaagtttaggaatcctttggtgccaactggtgtttgaaagtagggacctcagaggtttacctagagaacaggtggtttttaagggttatcttagatgtttcacaccggaaggtttttaaacactaaaatatataatttatagttaaggctaaaaagtatatttattgcagaggatgttcataaggccagtatgatttataaatgcaatctccccttgatttaaacacacagatacacacacacacacacacacacacaaaccttctgcctttgatgttacagatttaatacagtttatttttaaagatagatccttttataggtgagaaaaaaacaatctggaagaaaaaaaccacacaaagacattgattcagcctgtttggcgtttcccagagtcatctgattggacaggcatgggtgcaaggaaaattagggtactcaacctaagttcggttccgatgaattcttatcccctgccccttcctttaaaaaacttagtgacaaaatagacaatttgcacatcttggctatgtaattcttgtaatttttatttaggaagtgttgaagggaggtggcaagagtgtggaggctgacgtgtgagggaggacaggcgggaggaggtgtgaggaggaggctcccgaggggaaggggcggtgcccacaccggggacaggccgcagctccattttcttattgcgctgctaccgttgacttccaggcacggtttggaaatattcacatcgcttctgtgtatctctttcacattgtttgctgctattggaggatcagttttttgttttacaatgtcatatactgccatgtactagttttagttttctcttagaacattgtattacagatgccttttttgtagttttttttttttttatgtgatcaattttgacttaatgtgattactgctctattccaaaaaggttgctgtttcacaatacctcatgcttcacttagccatggtggacccagcgggcaggttctgcctgctttggcgggcagacacgcgggcgcgatcccacacaggctggcgggggccggccccgaggccgcgtgcgtgagaaccgcgccggtgtccccagagaccaggctgtgtccctcttctcttccctgcgcctgtgatgctgggcacttcatctgatcgggggcgtagcatcatagtagtttttacagctgtgttattctttgcgtgtagctatggaagttgcataattattattattattattataacaagtgtgtcttacgtgccaccacggcgttgtacctgtaggactctcattcgggatgattggaatagcttctggaatttgttcaagttttgggtatgtttaatctgttatgtactagtgttctgtttgttattgttttgttaattacaccataatgctaatttaaagagactccaaatctcaatgaagccagctcacagtgctgtgtgccccggtcacctagcaagctgccgaaccaaaagaatttgcaccccgctgcgggcccacgtggttggggccctgccctggcagggtcatcctgtgctcggaggccatctcgggcacaggcccaccccgccccacccctccagaacacggctcacgcttacctcaaccatcctggctgcggcgtctgtctgaaccacgcgggggccttgagggacgctttgtctgtcgtgatggggcaagggcacaagtcctggatgttgtgtgtatcgagaggccaaaggctggtggcaagtgcacggggcacagcggagtctgtcctgtgacgcgcaagtctgagggtctgggcggcgggcggctgggtctgtgcatttctggttgcaccgcggcgcttcccagcaccaacatgtaaccggcatgtttccagcagaagacaaaaagacaaacatgaaagtctagaaataaaactggtaaaaccccagc

SEQ ID NO: 6674 - protein, 84 aa, Homo sapiens; identical to SEQ ID NO: 6672

SEQ ID NO: 6675 - DNA, 4260 bp, Homo sapiens
ctcttccccagccctccttgtgtgccctcgtgagtggcggtgacaatgctcccggatgtgggccccaaggccagcggccccagagctgcccgcccacccgtccgcctgctattgtctgctcaggcctggcggtgtggcgctgggcttgtggggccctggcgggcaggggactgtgggaacggattagaggtcctgggcttgctttcctcgtcttgcataaactcttgatcaaagacattcctgggatgacagagccctgtgagctgcgaggctggcccagagtgcgggacgcacaccccacgctgcagcccctgcacaggcctgcccttgctggccctcgctggccctggctgcagtgctgactttggggactagccttatggtgggactggtgatagagcgggtgccagcaggcaacacagccttccccaccagattcagaggccaggcccccaatgctgggcagagcgaggctgtgactgcttcctggggtgcttcaaggagggtcacgctgcatgcagggtagccggagggattgccggatgcatgccactgccactggacctggcttctctggactcccatgggcagtgcaccaccctctgcacagccctagccactgttatcccacaagcgcggtccgaagtccacgtgcccactctgcccagcctccttcctctgtcccctcagggcctttcactccttgtgacaactctaggtgctgtctgggctcctggggaacccccgacccttccagccatggaatcagctcccggcatgcgggtcaggctggacccatggctctgcacctcagcccagcagcttggggctgccctgtaggagccgacacgacctcccttccattcggcccccttcctaggacccactgtatgccagggtggggagacggaggcagagagaaatctgggagatttccgtcctggaggggctcagccagagcaggaaggtgcccaggcatgacaatcccagactcccagaaccacctgcctgctgtggggtggggaagccctcagagagcccatccttacagtcagagcagagatgaaggttcctgtggaccgaggcggtgggccaagcgcagaacaggaagctggatgcagtctggtgtgtcaggagctcctgggcaaagacatcgagcttattggggtcaaggctggggagagatggggctgagtcccagggaccttggacggagctgaagggagataggaaggctgggggttgggggcagaggatgaagaatggatgaggactgtctggctgcagggagatgggccaggaggcagggcaggtaggggtggcgggcgtgtgaggacaggcttctgcgaaggggctgcagggagagctgactgcggaaggctttgtctctgaagttcctcaaaggtcagtttttaccatcaccctctgggtagcgcagatactccaacaagggacgaggtctccactgaatcccaggaggggttgcaggcacagaggtgatgtcagtggagtttgagagttgggaacaagggcctagagtggccagacgatgcctttgatatggtttggctgtgtccccacccaaatctcatcttgaattgtagctcccataattcccacgtgttgtgggagggacccggtgggaggtgattgaatcatggggcagtttcccctatactgttcccatggtggtgaacaagtctcagcagatctgatggttttataggggtttcccctttcacttgagtctcattctctcttgcctgctgccatggaagacgggcctttcgccttccgccgtgatggtgaggcctcccagctacgtagaactcgccgcggtgcaaccagaaatgcacagacccagccgcccgccgcccagaccctcagacttgcgcgtcacaggacagactccgctgtgccccgtgcacttgccaccagcctttggcctctcgatacacacaacatccaggacttgtgcccttgccccatcacgacagacaaagcgtccctcaaggcccccgcgtggttcagacagacgccgcagccaggatggttgagcagcaaacaatgtgaaagagatacacagaagcgatgtgaatatttccaaaccgtgcctggaagtcaacggtagcagcgcaataagaaaatggagctgcggcctgtccccggtgtgggcaccgccccttcccctcgggagcctcctcctcacacctcctcccgcctgtcctccctcacacgtcagcctccacactcttgccacctcccttcaacacttcctaaataaaaattacaagaattacatagccaagatgtgcaaattgtctattttgtcactaagttttttaaaggaaggggcaggggataagaattcatcggaaccgaacttaggttgagtaccctaattttccttgcacccatgcctgtccaatcagatgactctgggaaacgccaaacaggctgaatcaatgtctttgtgtggtttttttcttccagattgtttttttctcacctataaaaggatctatctttaaaaataaactgtattaaatctgtaacatcaaaggcagaaggtttgtgtgtgtgtgtgtgtgtgtgtgtatctgtgtgtttaaatcaaggggagattgcatttataaatcatactggccttatgaacatcctctgcaataaatatactttttagccttaactataaattatatattttagtgtttaaaaaccttccggtgtgaaacatctaagataacccttaaaaaccacctgttctctaggtaaacctctgaggtccctactttcaaacaccagttggcaccaaaggattcctaaacttcaacttctttaaagaaaaggaaaggaacttatcatcctggcaatgtgagaatgcaaacctttttcttcttgactggcacgcagcctcccaaacaccccacctccactgccaccacagtggcccacacttgcctcaaagtcctgcttgcaaacaagtacatggatattcccaaaccattccattagaaaactgccctccctgcacacacaacaaaaacagcgctatttcctacacctattggactgaaagtgcttggaaatggaatggttttagaatatgaagaagaacacaaaccaagtagctgtgggttgaacctggacgtgagctggctgcagggccgttgggtagaaaaccagcatctcataaacaggtcactacaaaaataggaagagtataaaaatagaatatattatgtcactatttcgtcttctctttatagtagcgtatcgtaggagtgggacaggtggcctttcccgaccctgctacgctggctggtgcccgacaaacctccactggatggtttgtcactggatggtttgttggggtggtggtcacaggcgcaaaggacatgcacacgggcacgctacgctactgtaaccaagaggtgacttcagccatgaataaggtgaagaggttacacatctacctacggaatataataacatacaatgacttataaagtgactacatgcatatgagcaagcaaagtacagagatgcctagaaccccactacagctgtgctttatcaggaaaagcacaagaatatgtttttctacctaaaaccctcttctactttaaaaatggtttgctgaatttttctatgtttttaaaatgtttttatgcttttttttaaacacgtaaaggatggaacctaatcctctcccgagacgcctcctttgtgttaatgcctattcttacaacagagaaacaagtacattaatataaaaacgagttgattattggggtataaaatcctctatcatctgtagcacaaccctcctcccccaccgctcagggttatgcaaatactattttttttttctctctctctcttttaaagacagtttttgggtaatctttttcttttgcttaagtcagagatggaagggggaaagagcaaaggaaaaaacaaccaacaacaaggagaatgaagctttcccttctggtatcaaaatgctccggagaggagggactgtcaggggagcacctggggccggctccgccctcgctgcgggtggcggtggcgcccgcctgcctggcgccctcagatgtccacgtcccgcacgtcggtgggtgtgcaagccaggtccacctcctcctcctcctcttcctcctcctcggcggccttggggtccatgttctgctgggcctggcgcaggcttgactccagcagggcttcgatctgctcctggcaggcccggaggcagtc

SEQ ID NO: 6676 - protein, 119 aa, Homo sapiens
MEDGPFAFRRDGEASQLRRTRRGATRNAQTQPPAAQTLRLARHRTDSAVPRALATSLWPLDTHNIQDLCPCPITTDKASLKAPAWFRQTPQPGWLSSKQCERDTQKRCEYFQTVPGSQR

SEQ ID NO: 6677 - DNA, 1041 bp, Homo sapiens
agggtcgggaaaggccacctgtcccactcctacgatacgctactataaagagaagacgaaatagtgacataatatattctatttttatactcttcctatttttgtagtgacctgtttatgagatgctggttttctacccaacggccctgcagccagctcacgtccaggttcaacccacagctacttggtttgtgttcttcttcatattctaaaaccattccatttccaagcactttcagtccaataggtgtaggaaatagcgctgtttttgttgtgtgtgcagggagggcagttttctaatggaatggtttgggaatatccatgtacttgtttgcaagcaggactttgaggcaagtgtgggccactgtggtggcagtggaggtggggtgtttgggaggctgcgtgccagtcaagaagaaaaaggtttgcattctcacattgccaggatgataagttcctttccttttctttaaagaagttgaagtttaggaatcctttggtgccaactggtgtttgaaagtagggacctcagaggtttacctagagaacaggtggtttttaagggttatcttagatgtttcacaccggaaggtttttaaacactaaaatatataatttatagttaaggctaaaaagtatatttattgcagaggatgttcataaggccagtatgatttataaatgcaatctccccttgatttaaacacacagatacacacacacacacacacacacacaaaccttctgcctttgatgttacagatttaatacagtttatttttaaagatagatccttttataggtgagaaaaaaacaatctggaagaaaaaaaccacacaaagacattgattcagcctgtttggcgtttcccagagtcatctgattggacaggcatgggtgcaaggaaaattagggtaggctgggtctgtgcatttctggttgcaccgcggcgcttcccagcaccaacatgtaaccggcatgtttccagcagaagacaaaaagacaaacatgaaagtctagaaataaaactggtaaaacccc

SEQ ID NO: 6678 - protein, 48 aa, Homo sapiens [sequence omitted]

SEQ ID NO: 6679 - DNA, 1322 bp, Homo sapiens
agggtcgggaaaggccacctgtcccactcctacgatacgctactataaagagaagacgaaatagtgacataatatattctatttttatactcttcctatttttgtagtgacctgtttatgagatgctggttttctacccaacggccctgcagccagctcacgtccaggttcaacccacagctacttggtttgtgttcttcttcatattctaaaaccattccatttccaagcactttcagtccaataggtgtaggaaatagcgctgtttttgttgtgtgtgcagggagggcagttttctaatggaatggtttgggaatatccatgtacttgtttgcaagcaggactttgaggcaagtgtgggccactgtggtggcagtggaggtggggtgtttgggaggctgcgtgccagtcaagaagaaaaaggtttgcattctcacattgccaggatgataagttcctttccttttctttaaagaagttgaagtttaggaatcctttggtgccaactggtgtttgaaagtagggacctcagaggtttacctagagaacaggtggtttttaagggttatcttagatgtttcacaccggaaggtttttaaacactaaaatatataatttatagttaaggctaaaaagtatatttattgcagaggatgttcataaggccagtatgatttataaatgcaatctccccttgatttaaacacacagatacacacacacacacacacacacacaaaccttctgcctttgatgttacagatttaatacagtttatttttaaagatagatccttttataggtgagaaaaaaacaatctggaagaaaaaaaccacacaaagacattgattcagcctgtttggcgtttcccagagtcatctgattggacaggcatgggtgcaaggaaaattagggtactcaacctaagttcggttccgatgaattcttatcccctgccccttcctttaaaaaacttagtgacaaaatagacaatttgcacatcttggctatgtaattcttgtaatttttatttaggaagtgttgaagggaggtggcaagagtgtggaggctgacgtgtgagggaggacaggcgggaggaggttgtgtatcgagaggccaaaggctggtggcaagtgcacggggcacagcggagtctgtcctgtgacgcgcaagtctgagggtctgggcggcgggcggctgggtctgtgcatttctggttgcaccgcggcgcttcccagcaccaacatgtaaccggcatgtttccagcagaagacaaaaagacaaacatgaaagtctagaaataaaactggtaaaaccccagc

SEQ ID NO: 6680 - protein, 60 aa, Homo sapiens
MRCWFSTQRPCSQLTSRFNPQLLGLCSSSYSKTIPFPSTFSPIGVGNSAVFVVCAGRAVF

SEQ ID NO: 6681 - DNA, 1133 bp, Homo sapiens
ctgtttatgagatgctggttttctacccaacggccctgcagccagctcacgtccaggttcaacccacagctacttggtttgtgttcttcttcatattctaaaaccattccatttccaagcactttcagtccaataggtgtaggaaatagcgctgtttttgttgtgtgtgcagggagggcagttttctaatggaatggtttgggaatatccatgtacttgtttgcaagcaggactttgaggcaagtgtgggccactgtggtggcagtggaggtggggtgtttgggaggctgcgtgccagtcaagaagaaaaaggtttgcattctcacattgccaggatgataagttcctttccttttctttaaagaagttgaagtttaggaatcctttggtgccaactggtgtttgaaagtagggacctcagaggtttacctagagaacaggtggtttttaagggttatcttagatgtttcacaccggaaggtttttaaacactaaaatatataatttatagttaaggctaaaaagtatatttattgcagaggatgttcataaggccagtatgatttataaatgcaatctccccttgatttaaacacacagatacacacacacacacacacacacacaaaccttctgcctttgatgttacagatttaatacagtttatttttaaagatagatccttttataggtgagaaaaaaacaatctggaagaaaaaaaccacacaaagacattgattcagcctgtttggcgtttcccagagtcatctgattggacaggcatgggtgcaaggaaaattagggtactcaacctaagttcggttccgatgaattcttatcccctgccccttcctttaaaaaacttagtgacaaaatagacaatttgcacatcttggctatgtaattcttgtaatttttatttaggaagccaaaggctggtggcaagtgcacggggcacagcggagtctgtcctgtgacgcgcaagtctgagggtctgggcggcgggcggctgggtctgtgcatttctggttgcaccgcggcgcttcccagcaccaacatgtaaccggcatgtttccagcagaagacaaaaagacaaacatgaaagtctagaaataaaactggtaaaaccccag

SEQ ID NO: 6682 - protein, 60 aa, Homo sapiens; identical to SEQ ID NO: 6680

SEQ ID NO: 6683 - DNA, 1160 bp, Homo sapiens
tccgatgaattcttatcccctgccccttcctttaaaaaacttagtgacaaaatagacaatttgcacatcttggctatgtaattcttgtaatttttatttaggaagtgttgaagggaggtggcaagagtgtggaggctgacgtgtgagggaggacaggcgggaggaggtgtgaggaggaggctcccgaggggaaggggcggtgcccacaccggggacaggccgcagctccattttcttattgcgctgctaccgttgacttccaggcacggtttggaaatattcacatcgcttctgtgtatctctttcacattgtttgctgctattggaggatcagttttttgttttacaatgtcatatactgccatgtactagttttagttttctcttagaacattgtattacagatgccttttttgtagttttttttttttttatgtgatcaattttgacttaatgtgattactgctctattccaaaaaggttgctgtttcacaatacctcatgcttcacttagccatggtggacccagcgggcaggttctgcctgctttggcgggcagacacgcgggcgcgatcccacacaggctggcgggggccggccccgaggccgcgtgcgtgagaaccgcgccggtgtccccagagaccaggctgtgtccctcttctcttccctgcgcctgtgatgctgggcacttcatctgatcgggggcgtagcatcatagtagtttttacagctgtgttattctttgcgtgtagctatggaagttgcataattattattattattattataacaagtgtgtcttacgtgccaccacggcgttgtacctgtaggactctcattcgggatgattggaatagcttctggaatttgttcaagttttgggtatgtttaatctgttatgtactagtgttctgtttgttattgttttgttaattacaccataatgctaatttaaagagactccaaatctcaatgaagccagctcacacggagtctgtcctgtgacgcgcaagtctgagggtctgggcggcgggcggctgggtctgtgcatttctggttgcaccgcggcgcttcccagcaccaacatgtaaccggcatgtttccagcagaagacaaaaagacaaacatgaaagtctagaaataaaactggtaaaacccca

SEQ ID NO: 6684 - protein, 84 aa, Homo sapiens; identical to SEQ ID NO: 6672

SEQ ID NO: 6685 - DNA, 1375 bp, Homo sapiens
tccgatgaattcttatcccctgccccttcctttaaaaaacttagtgacaaaatagacaatttgcacatcttggctatgtaattcttgtaatttttatttaggaagtgttgaagggaggtggcaagagtgtggaggctgacgtgtgagggaggacaggcgggaggaggtgtgaggaggaggctcccgaggggaaggggcggtgcccacaccggggacaggccgcagctccattttcttattgcgctgctaccgttgacttccaggcacggtttggaaatattcacatcgcttctgtgtatctctttcacattgtttgctgctattggaggatcagttttttgttttacaatgtcatatactgccatgtactagttttagttttctcttagaacattgtattacagatgccttttttgtagttttttttttttttatgtgatcaattttgacttaatgtgattactgctctattccaaaaaggttgctgtttcacaatacctcatgcttcacttagccatggtggacccagcgggcaggttctgcctgctttggcgggcagacacgcgggcgcgatcccacacaggctggcgggggccggccccgaggccgcgtgcgtgagaaccgcgccggtgtccccagagaccaggctgtgtccctcttctcttccctgcgcctgtgatgctgggcacttcatctgatcgggggcgtagcatcatagtagtttttacagctgtgttattctttgcgtgtagctatggaagttgcataattattattattattattataacaagtgtgtcttacgtgccaccacggcgttgtacctgtaggactctcattcgggatgattggaatagcttctggaatttgttcaagttttgggtatgtttaatctgttatgtactagtgttctgtttgttattgttttgttaattacaccataatgctaatttaaagagactccaaatctcaatgaagccagctcacagtgctgtgtgccccggtcacctagcaagctgccgaaccaaaagaatttgcaccccgctgcgggcccacgtggttggggccctgccctggcagggtcatcctgtggcgggggccttgagggacgctttgtctgtcgtgatggggcaagggcacaagtcctggatgttgtgtgtatcgagaggccaaaggctggtggcaagtgcacggggcacagcggagtctgtcctgtgacgcgcaagtctgagggtctgggcggcgggcggctgggtctgtgcatttctggttgcaccgcggcgcttcccagcaccaacatgtaaccggcatgtttccagcagaagacaaaaagacaaacatgaaagtctagaaataaaactggtaaaaccccagc

SEQ ID NO: 6686 - protein, 81 aa, Homo sapiens
MKPAHSAVCPGHLASCRTKRICTPLRAHVVGALPWQGHPVAGALRDALSVVMGQGHKSWMLCVSRGQRLVASARGTAESVL

SEQ ID NO: 6687 - DNA, 1133 bp, Homo sapiens
atgaattcttatcccctgccccttcctttaaaaaacttagtgacaaaatagacaatttgcacatcttggctatgtaattcttgtaatttttatttaggaagtgttgaagggaggtggcaagagtgtggaggctgacgtgtgagggaggacaggcgggaggaggtgtgaggaggaggctcccgaggggaaggggcggtgcccacaccggggacaggccgcagctccattttcttattgcgctgctaccgttgacttccaggcacggtttggaaatattcacatcgcttctgtgtatctctttcacattgtttgctgctattggaggatcagttttttgttttacaatgtcatatactgccatgtactagttttagttttctcttagaacattgtattacagatgccttttttgtagttttttttttttttatgtgatcaattttgacttaatgtgattactgctctattccaaaaaggttgctgtttcacaatacctcatgcttcacttagccatggtggacccagcgggcaggttctgcctgctttggcgggcagacacgcgggcgcgatcccacacaggctggcgggggccggccccgaggccgcgtgcgtgagaaccgcgccggtgtccccagagaccaggctgtgtccctcttctcttccctgcgcctgtgatgctgggcacttcatctgatcgggggcgtagcatcatagtagtttttacagctgtgttattctttgcgtgtagctatggaagttgcataattattattattattattataacaagtgtgtcttacgtgccaccacggcgttgtacctgtaggactctcattcgggatgattggaatagcttctggaatttgttcaagttttgggtatgtttaatctgttatgtactagtgttctgttgtgtgtatcgagaggccaaaggctggtggcaagtgcacggggcacagcggagtctgtcctgtgacgcgcaagtctgagggtctgggcggcgggcggctgggtctgtgcatttctggttgcaccgcggcgcttcccagcaccaacatgtaaccggcatgtttccagcagaagacaaaaagacaaacatgaaagtctagaaataaaactggtaaaaccccagc

SEQ ID NO: 6688 - protein, 104 aa, Homo sapiens
MLGTSSDRGRSIIVVFTAVLFFACSYGSCIIIIIIIITSVSYVPPRRCTCRTLIRDDWNSFWNLFKFWVCLICYVLVFCCVYREAKGWWQVHGAQRSLSCDAQV

SEQ ID NO: 6689 - DNA, 1107 bp, Homo sapiens
atgaattcttatcccctgccccttcctttaaaaaacttagtgacaaaatagacaatttgcacatcttggctatgtaattcttgtaatttttatttaggaagtgttgaagggaggtggcaagagtgtggaggctgacgtgtgagggaggacaggcgggaggaggtgtgaggaggaggctcccgaggggaaggggcggtgcccacaccggggacaggccgcagctccattttcttattgcgctgctaccgttgacttccaggcacggtttggaaatattcacatcgcttctgtgtatctctttcacattgtttgctgctattggaggatcagttttttgttttacaatgtcatatactgccatgtactagttttagttttctcttagaacattgtattacagatgccttttttgtagttttttttttttttatgtgatcaattttgacttaatgtgattactgctctattccaaaaaggttgctgtttcacaatacctcatgcttcacttagccatggtggacccagcgggcaggttctgcctgctttggcgggcagacacgcgggcgcgatcccacacaggctggcgggggccggccccgaggccgcgtgcgtgagaaccgcgccggtgtccccagagaccaggctgtgtccctcttctcttccctgcgcctgtgatgctgggcacttcatctgatcgggggcgtagcatcatagtagtttttacagctgtgttattctttgcgtgtagctatggaagttgcataattattattattattattataacaagtgtgtcttacgtgccaccacggcgttgtacctgtaggactctcattcgggacgctttgtctgtcgtgatggggcaagggcacaagtcctggatgttgtgtgtatcgagaggccaaaggctggtggcaagtgcacggggcacagcggagtctgtcctgtgacgcgcaagtctgagggtctgggcggcgggcggctgggtctgtgcatttctggttgcaccgcggcgcttcccagcaccaacatgtaaccggcatgtttccagcagaagacaaaaagacaaacatgaaagtctagaaataaaactggtaaaaccccagc

SEQ ID NO: 6690 - protein, 91 aa, Homo sapiens
MLGTSSDRGRSIIVVFTAVLFFACSYGSCIIIIIIIITSVSYVPPRRCTCRTLIRDALSVVMGQGHKSWMLCVSRGQRLVASARGTAESVL

SEQ ID NO: 6691 - DNA, 1143 bp, Homo sapiens
cggtgcccacaccggggacaggccgcagctccattttcttattgcgctgctaccgttgacttccaggcacggtttggaaatattcacatcgcttctgtgtatctctttcacattgtttgctgctattggaggatcagttttttgttttacaatgtcatatactgccatgtactagttttagttttctcttagaacattgtattacagatgccttttttgtagttttttttttttttatgtgatcaattttgacttaatgtgattactgctctattccaaaaaggttgctgtttcacaatacctcatgcttcacttagccatggtggacccagcgggcaggttctgcctgctttggcgggcagacacgcgggcgcgatcccacacaggctggcgggggccggccccgaggccgcgtgcgtgagaaccgcgccggtgtccccagagaccaggctgtgtccctcttctcttccctgcgcctgtgatgctgggcacttcatctgatcgggggcgtagcatcatagtagtttttacagctgtgttattctttgcgtgtagctatggaagttgcataattattattattattattataacaagtgtgtcttacgtgccaccacggcgttgtacctgtaggactctcattcgggatgattggaatagcttctggaatttgttcaagttttgggtatgtttaatctgttatgtactagtgttctgtttgttattgttttgttaattacaccataatgctaatttaaagagactccaaatctcaatgaagccagctcacagtgctgtgtgccccggtcacctagcaagctgccgaaccaaaagaatttgcaccccgctgcgggcccacgtggttggggccctgccctggcagggtcatcctgtgctcggaggccatctcgggcacaggcccaccccgccccaccccgccaaaggctggtggcaagtgcacggggcacagcggagtctgtcctgtgacgcgcaagtctgagggtctgggcggcgggcggctgggtctgtgcatttctggttgcaccgcggcgcttcccagcaccaacatgtaaccggcatgtttccagcagaagacaaaaagacaaacatgaaagtctagaaataaaactggtaaaaccccag

SEQ ID NO: 6692 - protein, 74 aa, Homo sapiens
MKPAHSAVCPGHLASCRTKRICTPLRAHVVGALPWQGHPVLGGHLGHRPTPPHPAKGWWQVHGAQRSLSCDAQV

SEQ ID NO: 6693 - DNA, 1845 bp, Homo sapiens
ggaagtgggtctcgtctcctcccaagcggagcatttgtgcctgaagctgccgggtctgctacggcaccgcggggctgcagaaacccgggggccaagggcgggctgcttgccgctatggctggcagtcaggacatattcgatgccatcgtgatggcggatgagaggtttcatggggaagggtatcgggaaggctatgaagaaggcagtagtttgggtgtgatggagggaaggcagcatggcacgctgcatggagccaaaatcgggtctgagatcgggtgctaccaaggttttgcttttgcatggaaatgtctactgcacagttgcaccactgagaaggacagcagaaagatgaaggtcttagaatcattgattggaatgatccagaaattcccttatgatgaccctacttacgataaactccatgaagacttagacaagatcagaggaaaatttaaacagttttgttcgttactcaatgttcagccagactttaaaattagtgcagaaggttccggactttcattttgaggaggatggatgaacagagaccgaacgtcgaggaacagatgccgcacaggtcctgccaagcctcacggagcacgggggagtctgtggtggccagtttacctgggcatctggctgagaggaagaaaggccaacctgatcctgaggggacccagacatatcctttgcactgtccctagaggggcgatgagctttgcagcattaaaaaatggtgaaggggggaaatattttgaaccaaagaccaaatgttaggccgccgttatatttgcagaagctttgagaaccatgcgtatagcctcctgcattctcccctctcctaggagctcttttgtctctgtccttacgaggcgtcatacagaggcagtggggtgggcacagatgagcagagtggatggttcggtgggtccccacgaggcgagtggtggtcatatgtgatggcacgtgttcacacaccctcctgtgtacccccccagggtcaccgaagtccccacacgctggctctccacacccctcctgttccagaaagcatgtccgaaagcagtccaggagattattaaggggtcgccatgaatccactttggttttaaaaccattcccgaatgtcctagtggattgtgttgtgctgcctaagctgccggctgcaggagccagagaagtgacccccgcgggagcagcggcaggtggatctccacggtggctcgctttgtttttgttttgttttttcttttaagacggagtctcactctgtcgccgagtttggagtgtattggcgcgatctcggctcactgtaacctccgcctcctgaattcaagtgattctcctgcctcagcctccctagtagctgggattataggcgccccccaccacgcccaagtaacttttgtatttttagtagagatggggttttgccttgttggccaggctggtcttgaactcccagcctgaaatgatccacccacgtccacctaccaaagtgctggaattgcaggcatgagccaccactcccggcctgctttttgtttttgaagacaggacttaggtctcctcctcccgaactctaaacctgcgtgtgtggctgtgcaccgctcgtttgtagcgtcacctcaggtctggggaagtctgtgctggcatctcctcattgtgccttcatcagagctggtgccttcgggccagaaagactctcgttctttctagatggtgggatcaggggcctttgctgtgtttcccttggtggatttttgtgttttgtaagttgtctattttgataatgtattatttttataactgtaaaaaaagtaaatagcatattttaaagtgaaa

SEQ ID NO: 6694 - protein, 137 aa, Homo sapiens; identical to SEQ ID NO: 908

SEQ ID NO: 6695 - DNA, 2422 bp, Homo sapiens
gccgcttccggaagtgggtctcgtctcctcccaagcggagcatttgtgcctgaagctgccgggtctgctacggcaccgcggggctgcagaaacccgggggccaagggcgggctgcttgccgctatggctggcagtcaggacatattcgatgccatcgtgatggcggatgagaggtttcatggggaagggtatcgggaaggctatgaagaaggcagtagtttgggtgtgatggagggaaggcagcatggcacgctgcatggagccaaaatcgggtctgagcagaaagatgaaggtcttagaatcattgattggaatgatccagaaattcccttatgatgaccctacttacgataaactccatgaagacttagacaagatcagaggaaaatttaaacagttttgttcgttactcaatgttcagccagactttaaaattagtgcagaaggttccggactttcattttgaggaggatggatgaacagagaccgaacgtcgaggaacagatgtgtgtgtgacgtgtttagaaatgcggtgaagggccagacggtgctgggaaggcagttgttcattgggagggtgagggttccggttcggccgtgggagggcttccttccctggggttttctgcctgtgtcaccttggtgcccgtcttggggcctcgccacacatgccctttgttgggctgaagccgtccctggcagagccctcgtgcattgacttgacagcctctccggcagcacaggcctagctggttctgggttggagttggctctggatagggtcagtcaccaggcctggactgaaggcagttatttttattattattattatttgcaatgagagagatggttggccccgaatgaggctcatgggaggtttggacgggtgctgtgccgcatgtcgaggccgattgtgtgccaggcggtgcgggacgtgcctcccgtgtgttatttaatcccttcaggagcccacaagatgggtgttattctcattttacagaggagggaggggagacgcgaagggattgcctggtctaagggcacccagcagcagagctaggacttccgccctaaggctgtgcctcactgccaccaggcacagccgcctccggaatgcacaggcgagtccctgccctccctcccaggccgcacaggtcctgccaagcctcacggagcacgggggagtctgtggtggccagtttacctgggcatctggctgagaggaagaaaggccaacctgatcctgaggggacccagacatatcctttgcactgtccctagaggggcgatgagctttgcagcattaaaaaatggtgaaggggggaaatattttgaaccaaagaccaaatgttaggccgccgttatatttgcagaagctttgagaaccatgcgtatagcctcctgcattctcccctctcctaggagctcttttgtctctgtccttacgaggcgtcatacagaggcagtggggtgggcacagatgagcagagtggatggttcggtgggtccccacgaggcgagtggtggtcatatgtgatggcacgtgttcacacaccctcctgtgtacccccccagggtcaccgaagtccccacacgctggctctccacacccctcctgttccagaaagcatgtccgaaagcagtccaggagattattaaggggtcgccatgaatccactttggttttaaaaccattcccgaatgtcctagtggattgtgttgtgctgcctaagctgccggctgcaggagccagagaagtgacccccgcgggagcagcggcaggtggatctccacggtggctcgctttgtttttgttttgttttttcttttaagacggagtctcactctgtcgccgagtttggagtgtattggcgcgatctcggctcactgtaacctccgcctcctgaattcaagtgattctcctgcctcagcctccctagtagctgggattataggcgccccccaccacgcccaagtaacttttgtatttttagtagagatggggttttgccttgttggccaggctggtcttgaactcccagcctgaaatgatccacccacgtccacctaccaaagtgctggaattgcaggcatgagccaccactcccggcctgctttttgtttttgaagacaggacttaggtctcctcctcccgaactctaaacctgcgtgtgtggctgtgcaccgctcgtttgtagcgtcacctcaggtctggggaagtctgtgctggcatctcctcattgtgccttcatcagagctggtgccttcgggccagaaagactctcgttctttctagatggtgggatcaggggcctttgctgtgtttcccttggtggatttttgtgttttgtaagttgtctattttgataatgtattatttttataactgtaaaaaaagtaaatagcatattttaaagtgaaa

SEQ ID NO: 6696 - protein, 73 aa, Homo sapiens
MARCMEPKSGLSRKMKVLESLIGMIQKFPYDDPTYDKLHEDLDKIRGKFKQFCSLLNVQPDFKISAEGSGLSF

SEQ ID NO: 6697 - DNA, 3779 bp, Homo sapiens
agtttttctggagaaagtattctttctcctgttgatttgatgaagcatgcttcttcttcacaggtttcatggggaagggtatcgggaaggctatgaagaaggcagtagtttgggtgtgatggagggaaggcagcatggcacgctgcatggagccaaaatcgggtctgaggtaagtgggaacccccatctggagatgaagcctcttcatttacaatttataatttatttcgatattcagtgtgatggagtaagaattgtcaggccttttaaaatcacagtgccggatgggcgcggtgactcacacctgtaatcccagcactttgggagtctgaggtgggtggatcgccttgaggtcaggagttggagaccagcctgaccaacatggtgaaaccctgtctctactaaaaatactgaattagctgggcatggtggtgcatgcctgtaatcccagccacttgggaggctgaggtatgagactcgcttgaacctgggaggcagaggttgtggtaagccgggaccgtgccattgcactgcagcctgggcgacaggatgaaactccatctccaaaaaataaacaaaaaaaatcacagtgcctttgcatgggagttaatggactagatggactgttgctggagaaatattcttagtacagaaccaagagtgcattttgctgtaggtagatacaattaaattatgcatgctggataaaagaaaacaagtccctggtctccttagtttacttgggagtgtcatggtgctggctcatgtactaagccaaagaatgggtgccctctgtcatgtgaacatattccatttatgtttacgttgaaatttcattaactttatgatttttttttttctcttcttgccctttgtcctagattggcccttacagataagtggcccttagtggcaaagtctgagttgaggcagttatgactatattggatgttcgatgctgtgaaacagatcaccacaaaattcatgggcttaacacagcaaatatggatgatctcacatgtttctgagggttgggaactcaggagcagctttgctgggtggtcctggctcagggtgtcagccagagccgtgtcacctgaaggcttgactgggcttggaggatctgcctccaaggtggtgctgtcacctgactgtgggcatggacgtctccatggggctgcttgtgtgtcctcgtgacattcaagagcgagtggtccaagagagctggtgaggcaagtgacactggcttttatccctagactcaggagctttgtgctgttcctccacattctgttggttacgaaagccaccctggtggagtgtcgagggacctgcacagggcatgggtaccaggagatgaggactggggcatctgggaggctggctgccccaccgatgacctaatttcctaatttccattgcctaatgctcaacaggtgcttccagaacaatagtgtgagaagcaccgctgccttctgcccccaccttttgttttgagatcttggtaatgaaagtgtagctagttgcttattaatttcactcttaaatatttttcacattcacagatcgggtgctaccaaggttttgcttttgcatggaaatgtctactgcacagttgcaccactgagaaggacagcagaaagatgaaggtcttagaatcattgattggaatgatccagaaattcccttatgatgaccctacttacgataaactccatgaagacttagacaagatcagaggaaaatttaaacagttttgttcgttactcaatgttcagccagactttaaaattagtgcagaaggttccggactttcattttgaggaggatggatgaacagagaccgaacgtcgaggaacagatgtgtgtgtgacgtgtttagaaatgcggtgaagggccagacggtgctgggaaggcagttgttcattgggagggtgagggttccggttcggccgtgggagggcttccttccctggggttttctgcctgtgtcaccttggtgcccgtcttggggcctcgccacacatgccctttgttgggctgaagccgtccctggcagagccctcgtgcattgacttgacagcctctccggcagcacaggcctagctggttctgggttggagttggctctggatagggtcagtcaccaggcctggactgaaggcagttatttttattattattattatttgcaatgagagagatggttggccccgaatgaggctcatgggaggtttggacgggtgctgtgccgcatgtcgaggccgattgtgtgccaggcggtgcgggacgtgcctcccgtgtgttatttaatcccttcaggagcccacaagatgggtgttattctcattttacagaggagggaggggagacgcgaagggattgcctggtctaagggcacccagcagcagagctaggacttccgccctaaggctgtgcctcactgccaccaggcacagccgcctccggaatgcacaggcgagtccctgccctccctcccaggccgcacaggtcctgccaagcctcacggagcacgggggagtctgtggtggccagtttacctgggcatctggctgagaggaagaaaggccaacctgatcctgaggggacccagacatatcctttgcactgtccctagaggggcgatgagctttgcagcattaaaaaatggtgaaggggggaaatattttgaaccaaagaccaaatgttaggccgccgttatatttgcagaagctttgagaaccatgcgtatagcctcctgcattctcccctctcctaggagctcttttgtctctgtccttacgaggcgtcatacagaggcagtggggtgggcacagatgagcagagtggatggttcggtgggtccccacgaggcgagtggtggtcatatgtgatggcacgtgttcacacaccctcctgtgtacccccccagggtcaccgaagtccccacacgctggctctccacacccctcctgttccagaaagcatgtccgaaagcagtccaggagattattaaggggtcgccatgaatccactttggttttaaaaccattcccgaatgtcctagtggattgtgttgtgctgcctaagctgccggctgcaggagccagagaagtgacccccgcgggagcagcggcaggtggatctccacggtggctcgctttgtttttgttttgttttttcttttaagacggagtctcactctgtcgccgagtttggagtgtattggcgcgatctcggctcactgtaacctccgcctcctgaattcaagtgattctcctgcctcagcctccctagtagctgggattataggcgccccccaccacgcccaagtaacttttgtatttttagtagagatggggttttgccttgttggccaggctggtcttgaactcccagcctgaaatgatccacccacgtccacctaccaaagtgctggaattgcaggcatgagccaccactcccggcctgctttttgtttttgaagacaggacttaggtctcctcctcccgaactctaaacctgcgtgtgtggctgtgcaccgctcgtttgtagcgtcacctcaggtctggggaagtctgtgctggcatctcctcattgtgccttcatcagagctggtgccttcgggccagaaagactctcgttctttctagatggtgggatcaggggcctttgctgtgtttcccttggtggatttttgtgttttgtaagttgtctattttgataatgtattatttttataactgtaaaaaaagtaaatagcatattttaaagtgaaa

SEQ ID NO: 6698 - protein, 59 aa, Homo sapiens [sequence omitted]

SEQ ID NO: 6699 - DNA, 2652 bp, Homo sapiens
gccgggtctgctacggcaccgcggggctgcagaaacccgggggccaagggcgggctgcttgccgctatggctggcagtcaggacatattcgatgccatcgtgatggcggatgagagagcccctggggagcccctcgtgctgcgacagtgggggagctgtgagttgcctcctggctgacttccagtgcccggcccagaggacgcgtccatagatgttagttaagaaagcggccgaacatttagcagtcaggcgctgacgtttatttagctcgcgctgtgagtcagacactgagctaaacgttccaccctggttatctacttcagccctacttagtttcatggggaagggtatcgggaaggctatgaagaaggcagtagtttgggtgtgatggagggaaggcagcatggcacgctgcatggagccaaaatcgggtctgagatcgggtgctaccaaggttttgcttttgcatggaaatgtctactgcacagttgcaccactgagaaggacagcagaaagatgaaggtcttagaatcattgattggaatgatccagaaattcccttatgatgaccctacttacgataaactccatgaagacttagacaagatcagaggaaaatttaaacagttttgttcgttactcaatgttcagccagactttaaaattagtgcagaaggttccggactttcattttgaggaggatggatgaacagagaccgaacgtcgaggaacagatgtgtgtgtgacgtgtttagaaatgcggtgaagggccagacggtgctgggaaggcagttgttcattgggagggtgagggttccggttcggccgtgggagggcttccttccctggggttttctgcctgtgtcaccttggtgcccgtcttggggcctcgccacacatgccctttgttgggctgaagccgtccctggcagagccctcgtgcattgacttgacagcctctccggcagcacaggcctagctggttctgggttggagttggctctggatagggtcagtcaccaggcctggactgaaggcagttatttttattattattattatttgcaatgagagagatggttggccccgaatgaggctcatgggaggtttggacgggtgctgtgccgcatgtcgaggccgattgtgtgccaggcggtgcgggacgtgcctcccgtgtgttatttaatcccttcaggagcccacaagatgggtgttattctcattttacagaggagggaggggagacgcgaagggattgcctggtctaagggcacccagcagcagagctaggacttccgccctaaggctgtgcctcactgccaccaggcacagccgcctccggaatgcacaggcgagtccctgccctccctcccaggccgcacaggtcctgccaagcctcacggagcacgggggagtctgtggtggccagtttacctgggcatctggctgagaggaagaaaggccaacctgatcctgaggggacccagacatatcctttgcactgtccctagaggggcgatgagctttgcagcattaaaaaatggtgaaggggggaaatattttgaaccaaagaccaaatgttaggccgccgttatatttgcagaagctttgagaaccatgcgtatagcctcctgcattctcccctctcctaggagctcttttgtctctgtccttacgaggcgtcatacagaggcagtggggtgggcacagatgagcagagtggatggttcggtgggtccccacgaggcgagtggtggtcatatgtgatggcacgtgttcacacaccctcctgtgtacccccccagggtcaccgaagtccccacacgctggctctccacacccctcctgttccagaaagcatgtccgaaagcagtccaggagattattaaggggtcgccatgaatccactttggttttaaaaccattcccgaatgtcctagtggattgtgttgtgctgcctaagctgccggctgcaggagccagagaagtgacccccgcgggagcagcggcaggtggatctccacggtggctcgctttgtttttgttttgttttttcttttaagacggagtctcactctgtcgccgagtttggagtgtattggcgcgatctcggctcactgtaacctccgcctcctgaattcaagtgattctcctgcctcagcctccctagtagctgggattataggcgccccccaccacgcccaagtaacttttgtatttttagtagagatggggttttgccttgttggccaggctggtcttgaactcccagcctgaaatgatccacccacgtccacctaccaaagtgctggaattgcaggcatgagccaccactcccggcctgctttttgtttttgaagacaggacttaggtctcctcctcccgaactctaaacctgcgtgtgtggctgtgcaccgctcgtttgtagcgtcacctcaggtctggggaagtctgtgctggcatctcctcattgtgccttcatcagagctggtgccttcgggccagaaagactctcgttctttctagatggtgggatcaggggcctttgctgtgtttcccttggtggatttttgtgttttgtaagttgtctattttgataatgtattatttttataactgtaaaaaaagtaaatagcatattttaaagtgaaa

SEQ ID NO: 6700 - protein, 102 aa, Homo sapiens [sequence omitted]

SEQ ID NO: 6701 - DNA, 2330 bp, Homo sapiens
gccgggtctgctacggcaccgcggggctgcagaaacccgggggccaagggcgggctgcttgccgctatggctggcagtcaggacatattcgatgccatcgtgatggcggatgagagatcgggtgctaccaaggttttgcttttgcatggaaatgtctactgcacagttgcaccactgagaaggacagcagaaagatgaaggtcttagaatcattgattggaatgatccagaaattcccttatgatgaccctacttacgataaactccatgaagacttagacaagatcagaggaaaatttaaacagttttgttcgttactcaatgttcagccagactttaaaattagtgcagaaggttccggactttcattttgaggaggatggatgaacagagaccgaacgtcgaggaacagatgtgtgtgtgacgtgtttagaaatgcggtgaagggccagacggtgctgggaaggcagttgttcattgggagggtgagggttccggttcggccgtgggagggcttccttccctggggttttctgcctgtgtcaccttggtgcccgtcttggggcctcgccacacatgccctttgttgggctgaagccgtccctggcagagccctcgtgcattgacttgacagcctctccggcagcacaggcctagctggttctgggttggagttggctctggatagggtcagtcaccaggcctggactgaaggcagttatttttattattattattatttgcaatgagagagatggttggccccgaatgaggctcatgggaggtttggacgggtgctgtgccgcatgtcgaggccgattgtgtgccaggcggtgcgggacgtgcctcccgtgtgttatttaatcccttcaggagcccacaagatgggtgttattctcattttacagaggagggaggggagacgcgaagggattgcctggtctaagggcacccagcagcagagctaggacttccgccctaaggctgtgcctcactgccaccaggcacagccgcctccggaatgcacaggcgagtccctgccctccctcccaggccgcacaggtcctgccaagcctcacggagcacgggggagtctgtggtggccagtttacctgggcatctggctgagaggaagaaaggccaacctgatcctgaggggacccagacatatcctttgcactgtccctagaggggcgatgagctttgcagcattaaaaaatggtgaaggggggaaatattttgaaccaaagaccaaatgttaggccgccgttatatttgcagaagctttgagaaccatgcgtatagcctcctgcattctcccctctcctaggagctcttttgtctctgtccttacgaggcgtcatacagaggcagtggggtgggcacagatgagcagagtggatggttcggtgggtccccacgaggcgagtggtggtcatatgtgatggcacgtgttcacacaccctcctgtgtacccccccagggtcaccgaagtccccacacgctggctctccacacccctcctgttccagaaagcatgtccgaaagcagtccaggagattattaaggggtcgccatgaatccactttggttttaaaaccattcccgaatgtcctagtggattgtgttgtgctgcctaagctgccggctgcaggagccagagaagtgacccccgcgggagcagcggcaggtggatctccacggtggctcgctttgtttttgttttgttttttcttttaagacggagtctcactctgtcgccgagtttggagtgtattggcgcgatctcggctcactgtaacctccgcctcctgaattcaagtgattctcctgcctcagcctccctagtagctgggattataggcgccccccaccacgcccaagtaacttttgtatttttagtagagatggggttttgccttgttggccaggctggtcttgaactcccagcctgaaatgatccacccacgtccacctaccaaagtgctggaattgcaggcatgagccaccactcccggcctgctttttgtttttgaagacaggacttaggtctcctcctcccgaactctaaacctgcgtgtgtggctgtgcaccgctcgtttgtagcgtcacctcaggtctggggaagtctgtgctggcatctcctcattgtgccttcatcagagctggtgccttcgggccagaaagactctcgttctttctagatggtgggatcaggggcctttgctgtgtttcccttggtggatttttgtgttttgtaagttgtctattttgataatgtattatttttataactgtaaaaaaagtaaatagcatattttaaagtgaaa

SEQ ID NO: 6702 - protein, 59 aa, Homo sapiens [sequence omitted]

SEQ ID NO: 6703 - DNA, 2277 bp, Homo sapiens
gcatttgtgcctgaagctgccgggtctgctacggcaccgcggggctgcagaaacccgggggccaagggcgggctgcttgccgctatggctggcagtcaggacatattcgatgccatcgtgatggcggatgagagcagaaagatgaaggtcttagaatcattgattggaatgatccagaaattcccttatgatgaccctacttacgataaactccatgaagacttagacaagatcagaggaaaatttaaacagttttgttcgttactcaatgttcagccagactttaaaattagtgcagaaggttccggactttcattttgaggaggatggatgaacagagaccgaacgtcgaggaacagatgtgtgtgtgacgtgtttagaaatgcggtgaagggccagacggtgctgggaaggcagttgttcattgggagggtgagggttccggttcggccgtgggagggcttccttccctggggttttctgcctgtgtcaccttggtgcccgtcttggggcctcgccacacatgccctttgttgggctgaagccgtccctggcagagccctcgtgcattgacttgacagcctctccggcagcacaggcctagctggttctgggttggagttggctctggatagggtcagtcaccaggcctggactgaaggcagttatttttattattattattatttgcaatgagagagatggttggccccgaatgaggctcatgggaggtttggacgggtgctgtgccgcatgtcgaggccgattgtgtgccaggcggtgcgggacgtgcctcccgtgtgttatttaatcccttcaggagcccacaagatgggtgttattctcattttacagaggagggaggggagacgcgaagggattgcctggtctaagggcacccagcagcagagctaggacttccgccctaaggctgtgcctcactgccaccaggcacagccgcctccggaatgcacaggcgagtccctgccctccctcccaggccgcacaggtcctgccaagcctcacggagcacgggggagtctgtggtggccagtttacctgggcatctggctgagaggaagaaaggccaacctgatcctgaggggacccagacatatcctttgcactgtccctagaggggcgatgagctttgcagcattaaaaaatggtgaaggggggaaatattttgaaccaaagaccaaatgttaggccgccgttatatttgcagaagctttgagaaccatgcgtatagcctcctgcattctcccctctcctaggagctcttttgtctctgtccttacgaggcgtcatacagaggcagtggggtgggcacagatgagcagagtggatggttcggtgggtccccacgaggcgagtggtggtcatatgtgatggcacgtgttcacacaccctcctgtgtacccccccagggtcaccgaagtccccacacgctggctctccacacccctcctgttccagaaagcatgtccgaaagcagtccaggagattattaaggggtcgccatgaatccactttggttttaaaaccattcccgaatgtcctagtggattgtgttgtgctgcctaagctgccggctgcaggagccagagaagtgacccccgcgggagcagcggcaggtggatctccacggtggctcgctttgtttttgttttgttttttcttttaagacggagtctcactctgtcgccgagtttggagtgtattggcgcgatctcggctcactgtaacctccgcctcctgaattcaagtgattctcctgcctcagcctccctagtagctgggattataggcgccccccaccacgcccaagtaacttttgtatttttagtagagatggggttttgccttgttggccaggctggtcttgaactcccagcctgaaatgatccacccacgtccacctaccaaagtgctggaattgcaggcatgagccaccactcccggcctgctttttgtttttgaagacaggacttaggtctcctcctcccgaactctaaacctgcgtgtgtggctgtgcaccgctcgtttgtagcgtcacctcaggtctggggaagtctgtgctggcatctcctcattgtgccttcatcagagctggtgccttcgggccagaaagactctcgttctttctagatggtgggatcaggggcctttgctgtgtttcccttggtggatttttgtgttttgtaagttgtctattttgataatgtattatttttataactgtaaaaaaagtaaatagcatattttaaagtgaaa

SEQ ID NO: 6704 - protein, 78 aa, Homo sapiens
MAGSQDIFDAIVMADESRKMKVLESLIGMIQKFPYDDPTYDKLHEDLDKIRGKFKQFCSLLNVQPDFKISAEGSGLSF

SEQ ID NO: 6705 - DNA, 2988 bp, Homo sapiens
agcatttgtgcctgaagctgccgggtctgctacggcaccgcggggctgcagaaacccgggggccaagggcgggctgcttgccgctatggctggcagtcaggacatattcgatgccatcgtgatggcggatgagaggtgggtggtgaggccgggcccgcaccccgccctgtctggtcgtctcccagcggcttcgccgccggctgcggcccagggcggctgctggagcctggcgtcccttgggcgtgcgcattggggagcgcctggtggccgtggacgcagggacaagtgtgggcctgatgctctggtcctcttctcctggcccgctccggcggggcacgtgcccagctgctcttccagacccgccttccctgtcagggctgccccaaacatctgctcagcctggtggttcccctcctccgaggccgcctcgtcctctgggaggacagacctttgccatctgggagctgcctttttttctggttccttaatcataggacatacggcagtattcatggatgtgctgatagatgtacccgaccacaccccttttccctccagagcccctggggagcccctcgtgctgcgacagtgggggagctgtgagttgcctcctggctgacttccagtgcccggcccagaggacgcgtccatagatgttagttaagaaagcggccgaacatttagcagtcaggcgctgacgtttatttagctcgcgctgtgagtcagacactgagctaaacgttccaccctggttatctacttcagccctacttaatcgggtgctaccaaggttttgcttttgcatggaaatgtctactgcacagttgcaccactgagaaggacagcagaaagatgaaggtcttagaatcattgattggaatgatccagaaattcccttatgatgaccctacttacgataaactccatgaagacttagacaagatcagaggaaaatttaaacagttttgttcgttactcaatgttcagccagactttaaaattagtgcagaaggttccggactttcattttgaggaggatggatgaacagagaccgaacgtcgaggaacagatgtgtgtgtgacgtgtttagaaatgcggtgaagggccagacggtgctgggaaggcagttgttcattgggagggtgagggttccggttcggccgtgggagggcttccttccctggggttttctgcctgtgtcaccttggtgcccgtcttggggcctcgccacacatgccctttgttgggctgaagccgtccctggcagagccctcgtgcattgacttgacagcctctccggcagcacaggcctagctggttctgggttggagttggctctggatagggtcagtcaccaggcctggactgaaggcagttatttttattattattattatttgcaatgagagagatggttggccccgaatgaggctcatgggaggtttggacgggtgctgtgccgcatgtcgaggccgattgtgtgccaggcggtgcgggacgtgcctcccgtgtgttatttaatcccttcaggagcccacaagatgggtgttattctcattttacagaggagggaggggagacgcgaagggattgcctggtctaagggcacccagcagcagagctaggacttccgccctaaggctgtgcctcactgccaccaggcacagccgcctccggaatgcacaggcgagtccctgccctccctcccaggccgcacaggtcctgccaagcctcacggagcacgggggagtctgtggtggccagtttacctgggcatctggctgagaggaagaaaggccaacctgatcctgaggggacccagacatatcctttgcactgtccctagaggggcgatgagctttgcagcattaaaaaatggtgaaggggggaaatattttgaaccaaagaccaaatgttaggccgccgttatatttgcagaagctttgagaaccatgcgtatagcctcctgcattctcccctctcctaggagctcttttgtctctgtccttacgaggcgtcatacagaggcagtggggtgggcacagatgagcagagtggatggttcggtgggtccccacgaggcgagtggtggtcatatgtgatggcacgtgttcacacaccctcctgtgtacccccccagggtcaccgaagtccccacacgctggctctccacacccctcctgttccagaaagcatgtccgaaagcagtccaggagattattaaggggtcgccatgaatccactttggttttaaaaccattcccgaatgtcctagtggattgtgttgtgctgcctaagctgccggctgcaggagccagagaagtgacccccgcgggagcagcggcaggtggatctccacggtggctcgctttgtttttgttttgttttttcttttaagacggagtctcactctgtcgccgagtttggagtgtattggcgcgatctcggctcactgtaacctccgcctcctgaattcaagtgattctcctgcctcagcctccctagtagctgggattataggcgccccccaccacgcccaagtaacttttgtatttttagtagagatggggttttgccttgttggccaggctggtcttgaactcccagcctgaaatgatccacccacgtccacctaccaaagtgctggaattgcaggcatgagccaccactcccggcctgctttttgtttttgaagacaggacttaggtctcctcctcccgaactctaaacctgcgtgtgtggctgtgcaccgctcgtttgtagcgtcacctcaggtctggggaagtctgtgctggcatctcctcattgtgccttcatcagagctggtgccttcgggccagaaagactctcgttctttctagatggtgggatcaggggcctttgctgtgtttcccttggtggatttttgtgttttgtaagttgtctattttgataatgtattatttttataactgtaaaaaaagtaaatagcatattttaaagtgaaa

SEQ ID NO: 6706 - protein, 59 aa, Homo sapiens [sequence omitted]

SEQ ID NO: 6707 - DNA, 2790 bp, Homo sapiens
gaagtgggtctcgtctcctcccaagcggagcatttgtgcctgaagctgccgggtctgctacggcaccgcggggctgcagaaacccgggggccaagggcgggctgcttgccgctatggctggcagtcaggacatattcgatgccatcgtgatggcggatgagaggtttcatggggaagggtatcgggaaggctatgaagaaggcagtagtttgggtgtgatggagggaaggcagcatggcacgctgcatggagccaaaatcgggtctgagatcgggtgctaccaaggttttgcttttgcatggaaatgtctactgcacagttgcaccactgagaaggacagcagaaagatgaaggtcttagaatcattgattggaatgatccagaaattcccttatgatgaccctacttacgataaactccatgaagacttagacaagatcagaggaaaatttaaacaggtgcgtgcactgtgtgtttcctcctgctaggagcacctgattgcgcctttcccaggcggggcagcgcactcccggggccgctgcggcaatggcctggggctgcgtgcgccgcggaactgtccgtagaggcgcctcatccttgagtcgcagtgcaggaaaactgaagacagtccagagaaaaggagttagaactcatttatgggctggccacatagacaggaaaagctatagctagagatagagttatcttctcatttttcagtaaaaatgcacaagattaaaaataccatctcttttgtgttttcagttttgttcgttactcaatgttcagccagactttaaaattagtgcagaaggttccggactttcattttgaggaggatggatgaacagagaccgaacgtcgaggaacagatgtgtgtgtgacgtgtttagaaatgcggtgaagggccagacggtgctgggaaggcagttgttcattgggagggtgagggttccggttcggccgtgggagggcttccttccctggggttttctgcctgtgtcaccttggtgcccgtcttggggcctcgccacacatgccctttgttgggctgaagccgtccctggcagagccctcgtgcattgacttgacagcctctccggcagcacaggcctagctggttctgggttggagttggctctggatagggtcagtcaccaggcctggactgaaggcagttatttttattattattattatttgcaatgagagagatggttggccccgaatgaggctcatgggaggtttggacgggtgctgtgccgcatgtcgaggccgattgtgtgccaggcggtgcgggacgtgcctcccgtgtgttatttaatcccttcaggagcccacaagatgggtgttattctcattttacagaggagggaggggagacgcgaagggattgcctggtctaagggcacccagcagcagagctaggacttccgccctaaggctgtgcctcactgccaccaggcacagccgcctccggaatgcacaggcgagtccctgccctccctcccaggccgcacaggtcctgccaagcctcacggagcacgggggagtctgtggtggccagtttacctgggcatctggctgagaggaagaaaggccaacctgatcctgaggggacccagacatatcctttgcactgtccctagaggggcgatgagctttgcagcattaaaaaatggtgaaggggggaaatattttgaaccaaagaccaaatgttaggccgccgttatatttgcagaagctttgagaaccatgcgtatagcctcctgcattctcccctctcctaggagctcttttgtctctgtccttacgaggcgtcatacagaggcagtggggtgggcacagatgagcagagtggatggttcggtgggtccccacgaggcgagtggtggtcatatgtgatggcacgtgttcacacaccctcctgtgtacccccccagggtcaccgaagtccccacacgctggctctccacacccctcctgttccagaaagcatgtccgaaagcagtccaggagattattaaggggtcgccatgaatccactttggttttaaaaccattcccgaatgtcctagtggattgtgttgtgctgcctaagctgccggctgcaggagccagagaagtgacccccgcgggagcagcggcaggtggatctccacggtggctcgctttgtttttgttttgttttttcttttaagacggagtctcactctgtcgccgagtttggagtgtattggcgcgatctcggctcactgtaacctccgcctcctgaattcaagtgattctcctgcctcagcctccctagtagctgggattataggcgccccccaccacgcccaagtaacttttgtatttttagtagagatggggttttgccttgttggccaggctggtcttgaactcccagcctgaaatgatccacccacgtccacctaccaaagtgctggaattgcaggcatgagccaccactcccggcctgctttttgtttttgaagacaggacttaggtctcctcctcccgaactctaaacctgcgtgtgtggctgtgcaccgctcgtttgtagcgtcacctcaggtctggggaagtctgtgctggcatctcctcattgtgccttcatcagagctggtgccttcgggccagaaagactctcgttctttctagatggtgggatcaggggcctttgctgtgtttcccttggtggatttttgtgttttgtaagttgtctattttgataatgtattatttttataactgtaaaaaaagtaaatagcatattttaaagtgaaa

SEQ ID NO: 6708 - protein, 124 aa, Homo sapiens
MAGSQDIFDAIVMADERFHGEGYREGYEEGSSLGVMEGRQHGTLHGAKIGSEIGCYQGFAFAWKCLLHSCTTEKDSRKMKVLESLIGMIQKFPYDDPTYDKLHEDLDKIRGKFKQVRALCVSSC

SEQ ID NO: 6709 - DNA, 2483 bp, Homo sapiens
gaagtgggtctcgtctcctcccaagcggagcatttgtgcctgaagctgccgggtctgctacggcaccgcggggctgcagaaacccgggggccaagggcgggctgcttgccgctatggctggcagtcaggacatattcgatgccatcgtgatggcggatgagaggtttcatggggaagggtatcgggaaggctatgaagaaggcagtagtttgggtgtgatggagggaaggcagcatggcacgctgcatggagccaaaatcgggtctgagatcgggtgctaccaaggttttgcttttgcatggaaatgtctactgcacagttgcaccactgagaaggacagcagaaagatgaaggtcttagaatcattgattggaatgatccagaaattcccttatgatgaccctacttacgataaactccatgaagacttagacaagatcagaggaaaatttaaacagttttgttcgttactcaatgttcagccagactttaaaattagtgcagaaggttccggactttcattttgaggaggatggatgaacagagaccgaacgtcgaggaacagatgtgtgtgtgacgtgtttagaaatgcggtgaagggccagacggtgctgggaaggcagttgttcattgggagggtgagggttccggttcggccgtgggagggcttccttccctggggttttctgcctgtgtcaccttggtgcccgtcttggggcctcgccacacatgccctttgttgggctgaagccgtccctggcagagccctcgtgcattgacttgacagcctctccggcagcacaggcctagctggttctgggttggagttggctctggatagggtcagtcaccaggcctggactgaaggcagttatttttattattattattatttgcaatgagagagatggttggccccgaatgaggctcatgggaggtttggacgggtgctgtgccgcatgtcgaggccgattgtgtgccaggcggtgcgggacgtgcctcccgtgtgttatttaatcccttcaggagcccacaagatgggtgttattctcattttacagaggagggaggggagacgcgaagggattgcctggtctaagggcacccagcagcagagctaggacttccgccctaaggctgtgcctcactgccaccaggcacagccgcctccggaatgcacaggcgagtccctgccctccctcccaggccgcacaggtcctgccaagcctcacggagcacgggggagtctgtggtggccagtttacctgggcatctggctgagaggaagaaaggccaacctgatcctgaggggacccagacatatcctttgcactgtccctagaggggcgatgagctttgcagcattaaaaaatggtgaaggggggaaatattttgaaccaaagaccaaatgttaggccgccgttatatttgcagaagctttgagaaccatgcgtatagcctcctgcattctcccctctcctaggagctcttttgtctctgtccttacgaggcgtcatacagaggcagtggggtgggcacagatgagcagagtggatggttcggtgggtccccacgaggcgagtggtggtcatatgtgatggcacgtgttcacacaccctcctgtgtacccccccagggtcaccgaagtccccacacgctggctctccacacccctcctgttccagaaagcatgtccgaaagcagtccaggagattattaaggggtcgccatgaatccactttggttttaaaaccattcccgaatgtcctagtggattgtgttgtgctgcctaagctgccggctgcaggagccagagaagtgacccccgcgggagcagcggcaggtggatctccacggtggctcgctttgtttttgttttgttttttcttttaagacggagtctcactctgtcgccgagtttggagtgtattggcgcgatctcggctcactgtaacctccgcctcctgaattcaagtgattctcctgcctcagcctccctagtagctgggattataggcgccccccaccacgcccaagtaacttttgtatttttagtagagatggggttttgccttgttggccaggctggtcttgaactcccagcctgaaatgatccacccacgtccacctaccaaagtgctggaattgcaggcatgagccaccactcccggcctgctttttgtttttgaagacaggacttaggtctcctcctcccgaactctaaacctgcgtgtgtggctgtgcaccgctcgtttgtagcgtcacctcaggtctggggaagtctgtgctggcatctcctcattgtgccttcatcagagctggtgccttcgggccagaaagactctcgttctttctagatggtgggatcaggggcctttgctgtgtttcccttggtggatttttgtgttttgtaagttgtctattttgataatgtattatttttataactgtaaaaaaagtaaatagcatattttaaagtgaaa

SEQ ID NO: 6710 - protein, 137 aa, Homo sapiens; identical to SEQ ID NO: 908

SEQ ID NO: 6711 - DNA, 1415 bp, Homo sapiens
ggaagtgggtctcgtctcctcccaagcggagcatttgtgcctgaagctgccgggtctgctacggcaccgcggggctgcagaaacccgggggccaagggcgggctgcttgccgctatggctggcagtcaggacatattcgatgccatcgtgatggcggatgagaggtttcatggggaagggtatcgggaaggctatgaagaaggcagtagtttgggtgtgatggagggaaggcagcatggcacgctgcatggagccaaaatcgggtctgagatcgggtgctaccaaggttttgcttttgcatggaaatgtctactgcacagttgcaccactgagaaggacagcagaaagatgaaggtcttagaatcattgattggaatgatccagaaattcccttatgatgaccctacttacgataaactccatgaagacttagacaagatcagaggaaaatttaaacagttttgttcgttactcaatgttcagccagactttaaaattagtgcagaaggttccggactttcattttgaggaggatggatgaacagagaccgaacgtcgaggaacagatggtcaccgaagtccccacacgctggctctccacacccctcctgttccagaaagcatgtccgaaagcagtccaggagattattaaggggtcgccatgaatccactttggttttaaaaccattcccgaatgtcctagtggattgtgttgtgctgcctaagctgccggctgcaggagccagagaagtgacccccgcgggagcagcggcaggtggatctccacggtggctcgctttgtttttgttttgttttttcttttaagacggagtctcactctgtcgccgagtttggagtgtattggcgcgatctcggctcactgtaacctccgcctcctgaattcaagtgattctcctgcctcagcctccctagtagctgggattataggcgccccccaccacgcccaagtaacttttgtatttttagtagagatggggttttgccttgttggccaggctggtcttgaactcccagcctgaaatgatccacccacgtccacctaccaaagtgctggaattgcaggcatgagccaccactcccggcctgctttttgtttttgaagacaggacttaggtctcctcctcccgaactctaaacctgcgtgtgtggctgtgcaccgctcgtttgtagcgtcacctcaggtctggggaagtctgtgctggcatctcctcattgtgccttcatcagagctggtgccttcgggccagaaagactctcgttctttctagatggtgggatcaggggcctttgctgtgtttcccttggtggatttttgtgttttgtaagttgtctattttgataatgtattatttttataactgtaaaaaaagtaaatagcatattttaaagtgaaa

SEQ ID NO: 6712 - protein, 137 aa, Homo sapiens; identical to SEQ ID NO: 908

SEQ ID NO: 6713 - DNA, 1263 bp, Homo sapiens
cagttttgttcgttactcaatgttcagccagactttaaaattagtgcagaaggttccggactttcattttgaggaggatggatgaacagagaccgaacgtcgaggaacagatgtgtgtgtgacgtgtttagaaatgcggtgaagggccagacggtgctgggaaggcagttgttcattgggagggtgagggttccggttcggccgtgggagggcttccttccctggggttttctgcctgtgtcaccttggtgcccgtcttggggcctcgccacacatgccctttgttgggctgaagccgtccctggcagagccctcgtgcattgacttgacagcctctccggcagcacaggcctagctggttctgggttggagttggctctggatagggtcagtcaccaggcctggactgaaggcagttatttttattattattattatttgcaatgagagagatggttggccccgaatgaggctcatgggaggtttggacgggtgctgtgccgcatgtcgaggccgattgtgtgccaggcggtgcgggacgtgcctcccgtgtgttatttaatcccttcaggagcccacaagatgggtgttattctcattttacagaggagggaggggagacgcgaagggattgcctggtctaagggcacccagcagcagagctaggacttccgccctaaggctgtgcctcactgccaccaggcacagccgcctccggaatgcacaggcgagtccctgccctccctcccaggccgcacaggtcctgcctcagcctccctagtagctgggattataggcgccccccaccacgcccaagtaacttttgtatttttagtagagatggggttttgccttgttggccaggctggtcttgaactcccagcctgaaatgatccacccacgtccacctaccaaagtgctggaattgcaggcatgagccaccactcccggcctgctttttgtttttgaagacaggacttaggtctcctcctcccgaactctaaacctgcgtgtgtggctgtgcaccgctcgtttgtagcgtcacctcaggtctggggaagtctgtgctggcatctcctcattgtgccttcatcagagctggtgccttcgggccagaaagactctcgttctttctagatggtgggatcaggggcctttgctgtgtttcccttggtggatttttgtgttttgtaagttgtctattttgataatgtattatttttataactgtaaaaaaagtaaatagcatattttaaagtgaaa

SEQ ID NO: 6714 - protein, 51 aa, Homo sapiens
MHRRVPALPPRPHRSCLSLPSSWDYRRPPPRPSNFCIFSRDGVLPCWPGWS

SEQ ID NO: 6715 - DNA, 513 bp, Homo sapiens
aatgagaaaataatcatccagcttttgaacgaaggcattcttagcgcacctgctgggtttcaggaagccagcagcatagctgttgtgtaagttgagcctgttgtgtgcacatgactgagagtctgtatttctgtgctttacagcagaaagatgaaggtcttagaatcattgattggaatgatccagaaattcccttatgatgaccctacttacgataaactccatgaagattaggtctcctcctcccgaactctaaacctgcgtgtgtggctgtgcaccgctcgtttgtagcgtcacctcaggtctggggaagtctgtgctggcatctcctcattgtgccttcatcagagctggtgccttcgggccagaaagactctcgttctttctagatggtgggatcaggggcctttgctgtgtttcccttggtggatttttgtgttttgtaagttgtctattttgataatgtattatttttataactgtaaaaaaagtaaatagcatattttaaagtga

SEQ ID NO: 6716 - protein, 53 aa, Homo sapiens [sequence omitted]

SEQ ID NO: 6717 - DNA, 711 bp, Homo sapiens
tggggaggggacagtactgatttccgcctttggagggaggggtttgctggtttacctgcagctgaactttggaaggctttgagcacaaagaatccagatcctggaaaatccccagacccagagcaggcctgctcgtgcccagccccagtccctcttgcccagttctgtctgtttctgcatgtgtgacctcgagagtcagcagggcttctggctgcctcagccccttggccccgtggtcggaatggaggcgtgtctgtaagctaggcacacacttgctgtcgaggcactgggtatgggcctaagctcgttgctagcagaaagatgaaggtcttagaatcattgattggaatgatccagaaattcccttatgatgaccctacttacgataaactccatgaagacttagacaagatcagaggaaaatttaaacaggtgcgtgcactgtgtgtttcctcctgctaggagcacctgattgcgcctttcccaggcggggcagcgcactcccggggccgctgcggcaatggcctggggctgcgtgcgccgcggaactgtccgtagaggcgcctcatccttgagtcgcagtgcaggaaaactgaagacagtccagagaaaaggagttagaactcatttatgggctggccacatagacaggaaaagctatagctagagatagagttatcttctcatttttcagtaaaaatgcacaagatt

SEQ ID NO: 6718 - protein, 48 aa, Homo sapiens
MAWGCVRRGTVRRGASSLSRSAGKLKTVQRKGVRTHLWAGHIDRKSYS

SEQ ID NO: 6719 - DNA, 737 bp, Homo sapiens
gaagtgggtctcgtctcctcccaagcggagcatttgtgcctgaagctgccgggtctgctacggcaccgcggggctgcagaaacccgggggccaagggcgggctgcttgccgctatggctggcagtcaggacatattcgatgccatcgtgatggcggatgagaggtttcatggggaagggtatcgggaaggctatgaagaaggcagtagtttgggtgtgatggagggaaggcagcatggcacgctgcatggagccaaaatcgggtctgagatcgggtgctaccaaggttttgcttttgcatggaaatgtctactgcacagttgcaccactgagaaggacagcagaaagatgaaggtcttagaatcattgattggaatgatccagaaattcccttatgatgaccctacttacgataaactccatgaagacttagacaagatcagaggaaaatttaaacaggtgcgtgcactgtgtgtttcctcctgctaggagcacctgattgcgcctttcccaggcggggcagcgcactcccggggccgctgcggcaatggcctggggctgcgtgcgccgcggaactgtccgtagaggcgcctcatccttgagtcgcagtgcaggaaaactgaagacagtccagagaaaaggagttagaactcatttatgggctggccacatagacaggaaaagctatagctagagatagagttatcttctcatttttcagtaaaaatgcacaagatt

SEQ ID NO: 6720 - protein, 124 aa, Homo sapiens; identical to SEQ ID NO: 6708

SEQ ID NO: 6721 - DNA, 780 bp, Homo sapiens
acaggctgctttgggccctcccgcgtgccgttcttacccggcctgccccgcgccgccgcttccggaagtgggtctcgtctcctcccaagcggagcatttgtgcctgaagctgccgggtctgctacggcaccgcggggctgcagaaacccgggggccaagggcgggctgcttgccgctatggctggcagtcaggacatattcgatgccatcgtgatggcggatgagaggtttcatggggaagggtatcgggaaggctatgaagaaggcagtagtttgggtgtgatggagggaaggcagcatggcacgctgcatggagccaaaatcgggtctgagatcgggtgctaccaaggttttgcttttgcatggaaatgtctactgcacagttgcaccactgagaaggacaggtaaaggtggagatgtctttctttctcagcgtaggaaccaggagttctagttccatgggttaccagcatgcccttgagtaatcaatctgtctgttcctcatctgtaaaatggagaaaattatcagtgtcaagcttgagtgttgttaggagatttaacggaaatactaaatagaaagtgccaggcacattttaggtgtttggtgaacactggctgttgttgcttctcaagagttctatgctcctgccttttacctggagtcattagtgcaccatgtggcttttagataccctaccaataaaataatgttgacattgattgtattttctcattcacctttcccctgagcttctaataaacaaattataacagttttgt

SEQ ID NO: 6722 - protein, 76 aa, Homo sapiens
MAGSQDIFDAIVMADERFHGEGYREGYEEGSSLGVMEGRQHGTLHGAKIGSEIGCYQGFAFAWKCLLHSCTTEKDR

SEQ ID NO: 6723 - DNA, 2443 bp, Homo sapiens
tgaaagaacctgagactgtcggaactgccggggaaaattctacgggacggctttgacgtcagatgtgcggggctgcgaaagtcgggggagggagtgcgagtgggcttttaaggggaagggcactaaggccgaggtgaggcttttcccgacagagggtgaagggggcaaaactcggtgccccccaacctctggccccggggttcctgaccccgcccccgctagtgccccacgccgagtgcatccactgggagcctgaggcctgggggaagggccccagttgtcgattgctttacaaagtcaaactctcccagccaagaacctcggggccgctgcgcggtggggaggagttccccgaaacccggccgctaagcgaggcctcctcctcccgcagatccgaacggcctgggcggggtcaccccggctgggacaagaagccgccgcctgcctgcccgggcccggggagggggctggggctggggccggaggcggggtgtgagtgggtgtgtgcggggggcggaggcttgatgcaatcccgataagaaatgctcgggtgtcttgggcacctacccgtggggcccgtaaggcgctactatataaggctgccggcccggagccgccgcgccgtcagagcaggagcgctgcgtccaggatctagggccacgaccatcccaacccggcactcacagccccgcagcgcatcccggtcgccgcccagcctcccgcacccccatcgccggagctgcgccgagagccccagggaggtgccatgcggagcgggtgtgtggtggtccacgtatggatcctggccggcctctggctggccgtggccgggcgccccctcgccttctcggacgcggggccccacgtgcactacggctggggcgaccccatccgcctgcggcacctgtacacctccggcccccacgggctctccagctgcttcctgcgcatccgtgccgacggcgtcgtggactgcgcgcggggccagagcgcgcacagtttgctggagatcaaggcagtcgctctgcggaccgtggccatcaagggcgtgcacagcgtgcggtacctctgcatgggcgccgacggcaagatgcaggggctgcttcagtactcggaggaagactgtgctttcgaggaggagatccgcccagatggctacaatgtgtaccgatccgagaagcaccgcctcccggtctccctgagcagtgccaaacagcggcagctgtacaagaacagaggctttcttccactctctcatttcctgcccatgctgcccatggtcccagaggagcctgaggacctcaggggccacttggaatctgacatgttctcttcgcccctggagaccgacagcatggacccatttgggcttgtcaccggactggaggccgtgaggagtcccagctttgagaagtaactgagaccatgcccgggcctcttcactgctgccaggggctgtggtacctgcagcgtgggggacgtgcttctacaagaacagtcctgagtccacgttctgtttagctttaggaagaaacatctagaagttgtacatattcagagttttccattggcagtgccagtttctagccaatagacttgtctgatcataacattgtaagcctgtagcttgcccagctgctgcctgggcccccattctgctccctcgaggttgctggacaagctgctgcactgtctcagttctgcttgaatacctccatcgatggggaactcacttcctttggaaaaattcttatgtcaagctgaaattctctaattttttctcatcacttccccaggagcagccagaagacaggcagtagttttaatttcaggaacaggtgatccactctgtaaaacagcaggtaaatttcactcaaccccatgtgggaattgatctatatctctacttccagggaccatttgcccttcccaaatccctccaggccagaactgactggagcaggcatggcccaccaggcttcaggagtaggggaagcctggagccccactccagccctgggacaacttgagaattccccctgaggccagttctgtcatggatgctgtcctgagaataacttgctgtcccggtgtcacctgcttccatctcccagcccaccagccctctgcccacctcacatgcctccccatggattggggcctcccaggccccccaccttatgtcaacctgcacttcttgttcaaaaatcaggaaaagaaaagatttgaagaccccaagtcttgtcaataacttgctgtgtggaagcagcgggggaagacctagaaccctttccccagcacttggttttccaacatgatatttatgagtaatttattttgatatgtacatctcttattttcttacattatttatgcccccaaattatatttatgtatgtaagtgaggtttgttttgtatattaaaatggagtttgtttgtatc

SEQ ID NO: 6724 - protein, 219 aa, Homo sapiens
MLGCLGHLPVGPVRRYYIRLPARSRRAVRAGALRPGSRATTIPTRHSQPRSASRSPPSLPHPHRRSCAESPREVPCGAGVWWSTYGSWPASGWPWPGAPSPSRTRGPTCTTAGATPSACGTCTPPAPTGSPAASCASVPTASWTARGARARTVCWRSRQSLCGPWPSRACTACGTSAWAPTARCRGCFSTRRKTVLSRRRSAQMATMCTDPRSTASRSP

SEQ ID NO: 6725 - DNA, 1137 bp, Homo sapiens
atgccctctgccttgcctctgcagtctgcgcacaagcaaggaaaggcccctctatggacctcgctggccgccaccacagtgtgtccctacctgcgccagcagcagagctcacctgccccacccaaccaggatcctggaactccaagacctaaggactccatcctgctgagagccatttccagaggattgtccccacccgaaggccagctgaagcctgctgccaggatccggtcacacctgcatgcaaaatgctcatcagagactgaaagggtaggatgccgagacttcaaaccacacaacagacatgtgattgttttgtacctgctaattcagtctgagacgtgtttcattgtgctacctggtggcaggggtggggtgggcgagggctccttcaagtatgcctgggtgttggacaagctgagggcagaaagagaacgcaggatcaccattgatatctccctgtggaagttcaagactagcacatactacagcattatcatcgatgctccaggccacagagacttcatcatgaccatgatcaggggcacttcccaggccgactgcgcggtgctcttcgtggcaggcggctgggcggaggccggcatcttcaagaacccgcagacccacgagctcgcgctgctggccaactggcgggacgtcacgcagctcatcgtgatcttcaacgaaattgactccaccgagcccgcctacagcggctcgcgcctccaggtgatcaccaaggaaggacagccggggtggaggcgagcggaccacaccccggactcacctcccctcgacatcccgaagatgccctggttcaagtgctggaaggtagagtggaaggaggggaacgccatgggggtgactctgctggaagctttgaactccatcctcccaacaacgcgcagggtcgacaatcccctgaggctgcccctgcaagatgtgtacaagatgggaggtgacccaggcctgagtggagctgagggcattggcagtgtgccagtgggccgtgtggagggtggctttttcaaattcgggatagtggtcacatttgcccccagcaatgtcaccactaaggttaaatctgtggagatgcaccatgaggtcctggcggaagccctgtggttaacaatgtag

SEQ ID NO: 6726 - protein, 378 aa, Homo sapiens
MPSALPLQSAHKQGKAPLWTSLAATTVCPYLRQQQSSPAPPNQDPGTPRPKDSILLRAISRGLSPPEGQLKPAARIRSHLHAKCSSETERVGCRDFKPHNRHVIVLYLLIQSETCFIVLPGGRGGVGEGSFKYAWVLDKLRAERERRITIDISLWKFKTSTYYSIIIDAPGHRDFIMTMIRGTSQADCAVLFVAGGWAEAGIFKNPQTHELALLANWRDVTQLIVIFNEIDSTEPAYSGSRLQVITKEGQPGWRRADHTPDSPPLDIPKMPWFKCWKVEWKEGNAMGVTLLEALNSILPTTRRVDNPLRLPLQDVYKMGGDPGLSGAEGIGSVPVGRVEGGFFKFGIVVTFAPSNVTTKVKSVEMHHEVLAEALWLTM

SEQ ID NO: 6727 - DNA, 732 bp, Homo sapiens
gcccagccgcctgccacgaagagcaccgcgcagtcggcctgcaccgcggggatacacaaacacaccgggttgcgggagggggcatcggactgactttgggaggttccgaatcccattgtaaagctggggaatgccctccagaactcagatggccaaatgggattcatggaccaccctagatgcggtgcatgggggtcctgcttcccagttcctctcatttaatctcatctaaatcagcttttagtcccttctttctggaccaactgatctactagtctgagtgtaagaaaacctggtccctctaggcccccccaggacaacaggatctgagcttcatgagagtgatgggactttcagtcctgtcctccctaattctttcaggattgatggatgatggccataggaatgtttctgaaggcatggactgctttacctgggaagtgcccctgatcatggtcatgatgaagtctctgtggcctggagcatcgatgataatgctgtaatccttttccttcccgtctccacatgtccagaagtttggtccccataaaattacagtgggctgggcacagttgctcacgcctgtaatctcagcactttgggagcctgaagcaggaggatcacttgaacttaggaaaagaaggccagcctgggcaatatgatttaacccatctctacaaaaaattaaaaatagagaaaataaaaaaaaaaaaaaaaaaaaaaaaaaaaggg

SEQ ID NO: 6728 - protein, 55 aa, Homo sapiens
MRVMGLSVLSSLILSGLMDDGHRNVSEGMDCFTWEVPLIMVMMKSLWPGASMIML

SEQ ID NO: 6729 - DNA, 352 bp, Homo sapiens
ccggggtggaggcgagcggaccacaccccggactcacctcccctcgacatcccgaagatgccctggttcaagtgctggaaggagaactgatgccaaagcctgcattttgttaccttctttggaatcattgggaatatcccaagtttgaagtctgatttgtttctattgctctggtttgggacacatccatggaagcctagaagaggagaggattatccttttaaatttagccattttccaaccttttttttaaatttgctttgttttgttttctttcagcaaatgtgttaaatgcctaccatgtgttaggaatttttacattatgtcatttcaataaattatggttactagt

SEQ ID NO: 6730 - protein, 48 aa, Homo sapiens
RGGGERTTPRTHLPSTSRRCPGSSAGRRTDAKACILLPSLESLGISQV

SEQ ID NO: 6731 - DNA, 507 bp, Homo sapiens
gtgtctcagtttcttttacctgttaaataaggatgaaaatagtaccttcttagaaagttgcgaagataaaatgagttactataagacacactcacaatagctgctggctcagaatgttgagtattccagaacctgaaaaggtcacatggagctaaggaagtgagccatgtaacacgagagggaaaagcatttcaggcagagggaacatcagtgcaaacgccctggtgcagggatgagagggatcagtctgactgccacgtgggaacagggaggactgcggcttggaccaggatgatggaagtcattgagtccaacaggaaattgtggaactcctgagggctcagccgcccctggtctcttctccctgaggtctcagcttatgtagctttcccaggaaagcatgtgcaaccccagatgagattagagctgtctctctccacaagctcacaccaccttggatttctttttcatggtgtcatcacaattagaatgtattgtttatatcaa

SEQ ID NO: 6732 - protein, 30 aa, Homo sapiens
MRLELSLSTSSHHLGFLFHGVITIRMYCLY

SEQ ID NO: 6733 - DNA, 497 bp, Homo sapiens
ctgggccaatcactgctatctcccaagataccctggttgaaagatgtttgggaaaggtttcaagtactatctggagtaaaaggtgttactgttgggatacatgacaatgagcttctacggtcagatattcatttgagtttgaacttgggatacgtgttgagaaaaccagttctgctcaatttttaaatcctaggacactcgaataatattccattgtctggatgtgccacacagtttgtttatttattcacctattgaaagacatcttggttgcttccaagtttgggaattataagtaaaattgctgtaaacatcggtgtgcaggtctttctgtggacatatattttcaactcacttgggtttttggtgataaaccaggagctgagagaatcaaaaagaatggtaaagcccaggcccaggacatcaagcaatgtacatatttggaatgacctcatgctgtgggccctgattgtaaataaaaatgcttttgcggaaac

SEQ ID NO: 6734 - protein, 31 aa, Homo sapiens
MVKPRPRTSSNVHIWNDLMLWALIVNKNAFA

SEQ ID NO: 6735 - DNA, 463 bp, Homo sapiens
ttcaagtactatctggagtaaaaggtgttactgttgggatacatgacaatgagcttctacggtcagatattcatttgagtttgaacttgggatacgtgttgagaaaaccagttctgctcaatttttaaatcctaggacactcgaataatattccattgtctggatgtgccacacagtttgtttatttattcacctattgaaagacatcttggttgcttccaagtttgggaattataagtaaaattgctgtaaacatcggtgtgcaggtctttctgtggacatatattttcaactcacttgggtaagtactaaggaatacaattgctcgatgcgatggtaagggtatgtgttgttttgcagtgcatcaccaaactgccttccaaagtggctgtatcattcccccaccattttaaggcacagcctggccagccatgccaggatgtagcattgacttcttagatag

SEQ ID NO: 6736 - protein, 41 aa, Homo sapiens
MVRVCVVLQCITKLPSKVAVSFPHHFKAQPGQPCQDVALTS

SEQ ID NO: 6737 - DNA, 1662 bp, Homo sapiens; identical to SEQ ID NO: 911

SEQ ID NO: 6738 - protein, 362 aa, Homo sapiens; identical to SEQ ID NO: 912

SEQ ID NO: 6739 - DNA, 425 bp, Homo sapiens
cgggctggtcgggggctggcagcgcgcggccctccaggacccctcgacctccctgggtggctccagcgctgtccgcggtgctcatcgtcaccaccgccgtggacgtcgtgggcaacctcctggtgatcctctccgtgctcaggaaccgcaagctccggaacgcaggtttttggtgataaaccaggagctgagagaatcaaaaagaatggtaaagcccaggcccaggacatcaagcaatgtacatatttggaatgacctcatgctgtgggccctgattgtaaataaaaatgcttttgcggaaacagcaaaatttggggaagcctgtcttccacctccttgactgaaaagtctggtcagaggtgccacctggctacttcctcctcatccttctaggaccttcctctggacccctcagttctgagccc

SEQ ID NO: 6740 - protein, 44 aa, Homo sapiens
MVKPRPRTSSNVHIWNDLMLWALIVNKNAFAETAKFGEACLPPP

SEQ ID NO: 6741 - DNA, 486 bp, Homo sapiens
gatttaaaaaaaatccacaacacattctaaagaagtactagaaatagcagtgcctcaaagtgagggcttctagaatttctgatatatattccttggaatagacttcttattttgagggtcataaagaattgagagactagccatggttgcacacactccacattaggtctgagctcatcagtcttgatggttctctctcctgaactctcgtgaaggcaatatctacttgtagttgatggagtatcaggcaaaacaaagtgctgtcttagatttatgaactcctttatcactcaagggaactggaaaaatagactttgatgcagtcctgcaccagaataaatggcaccacgaaagaatgagaagccaccttatgattggatatgaaattatctctaagatatatgattcaggaaaagcagaaggtacagaacgacagtatggaagatactatttgtgtaaataaagtgaacaaaatagaacaaacat

SEQ ID NO: 6742 - protein, 35 aa, Homo sapiens
MRSHLMIGYEIISKIYDSGKAEGTERQYGRYYLCK

SEQ ID NO: 6743 - DNA, 3089 bp, Homo sapiens
cccaatgatgctttaaggaagttatcattgttctgcttttcaaatgctgcagccccattcggaatctccagatgaatcctcattttactccttgttatcccagagtttcgaacaggtcgtgctgaccagaatgaacaggagatacctgtagcttgctcacttggcaaagtttgtttgttttttgctgctttcctcccatcttgtttcttggcgacagggcgtgtttgtttacggtttcccgctgtccaaaataaaaaaatatggatgtaatgaggcccttgataaatgagcagaattttgatgggacatcagatgaagaacatgagcaagagcttctgcctgttcagaagcattaccaacttgatgatcaagagggcatttcatttgtacaaactcttatgcaccttcttaaaggaaatattggaactggccttttaggacttccattggcaataaaaaatgcaggcatagtgcttggaccaatcagccttgtgtttataggaattatttctgttcactgtatgcacatattggtacgttgcagtcactttctatgtctgaggtttaaaaagtcaacattaggttatagtgacactgtgagctttgctatggaagtgagtccttggagttgtcttcagaagcaagcagcatgggggcggagtgtggttgacttttttctggtgataacacagctgggattctgtagtgtttatattgtcttcttagctgaaaatgtgaaacaagttcatgaaggattcctggagagtaaagtgtttatttcaaatagtaccaattcatcaaacccttgtgagagaagaagtgttgacctaaggatatatatgctttgctttcttccatttataattcttttggtcttcattcgtgaactaaagaatctatttgtactttcattccttgccaacgtttccatggctgtcagtcttgtgataatttaccagtatgttgtcaggaacatgccagatccccacaaccttccaatagtggctggttggaagaaatacccactcttttttggtactgctgtatttgcttttgaaggcataggagtggtccttccactggaaaaccaaatgaaagaatcaaagcgtttccctcaagcgttgaatattggcatggggattgttacaactttgtatgtaacattagctactttaggatatatgtgtttccatgatgaaatcaaaggcagcataactttaaatcttccccaagatgtatggttatatcaatcagtgaaaattctatattcctttggcatttttgtgacatattcaattcagttctatgttccagcagagatcattatccctgggatcacatccaaatttcatactaaatggaagcaaatctgtgaatttgggataagatccttcttggttagtattacttgtgccggagcaattcttattcctcgtttagacattgtgatttccttcgttggagctgtgagcagcagcacattggccctaatcctgccacctttggttgaaattcttacattttcgaaggaacattataatatatggatggtcctgaaaaatatttctatagcattcactggagttgttggcttcttattaggtacatatataactgttgaagaaattatttatcctactcccaaagttgtagctggcactccacagagtccttttctaaatttgaattcaacatgcttaacatctggtttgaaatagtaaaagcagaatcatgagtcttctatttttgtcccatttctgaaaattatcaagataactagtaaaatacattgctatatacataaaaatggtaacaaactctgttttctttggcacgatattaatattttggaagtaatcataactctttaccagtagtggtaaacctatgaaaaatccttgcttttaagtgttagcaatagttcaaaaaattaagttctgaaaattgaaaaaattaaaatgtaaaaaaattaaagaataaaaatacttctattattcttttatctcagtaagaaataccttaaccaagttatctctcttttatgctactcttttgccactcacttgagaacagaataggatttcaacaataagagaataaaataagaacatgtataacaaaaagctctctccagatcatccctgtgaatgccaaagtaaactttatgtacagtgtaaaaaaaaaaaatctcagttatgtttttattagccaaattctaatgattggctcctggaagtatagaaaactcccattaacataatataagcatcagaaaattgcaaacactagaattaattttacactctaatggtagttgatcttcatagtcaagaggcactgttcaagatcatgacttagtgtttcaatgaaatttgaaaagggactttaaaacttatccagtgcaactcccttgtttttcgtcagaggaaaaggaggcctagaaaggttaagtaacttggtcgagaccactcagccttgagatcaagaaaacctaatcttctgactcccaggccaggatgttttatttctcacatcatgtccaagaaaaagaataaattatgttcagcttaattttagtgttgaatctatttgattatattttaatactttgaaaatgaatgtgtgatttttaatagtatatgtgacctgagcagaaaatcagggaactccaagaagcctacactgtggccatataaacctcagcaagagaaagaagctatgttcttttaaaacagaatagagaccgcttgctggtgaaactcctggctagtaagatgtgtgtctagctatactatttgtggcttgagcttttttaattattaccttcctttcctgagttttgtaggcaccacattcctgaatggcagaaaatagacacctcagaaaacggaggatttgtggactctttccagccctgtggcttttcttatcacagccttttatttattatgagcagaataaaagaatcagctaggtgtggtggtctgtgcttataatcccagctactctggaggataagttgggaggatcacttgagaggccaggagcttgagaccagcctgggcagcatagtgagacctcgactctat

SEQ ID NO: 6744 - protein, 485 aa, Homo sapiens
MDVMRPLINEQNFDGTSDEEHEQELLPVQKHYQLDDQEGISFVQTLMHLLKGNIGTGLLGLPLAIKNAGIVLGPISLVFIGIISVHCMHILVRCSHFLCLRFKKSTLGYSDTVSFAMEVSPWSCLQKQAAWGRSVVDFFLVITQLGFCSVYIVFLAENVKQVHEGFLESKVFISNSTNSSNPCERRSVDLRIYMLCFLPFIILLVFIRELKNLFVLSFLANVSMAVSLVIIYQYVVRNMPDPHNLPIVAGWKKYPLFFGTAVFAFEGIGVVLPLENQMKESKRFPQALNIGMGIVTTLYVTLATLGYMCFHDEIKGSITLNLPQDVWLYQSVKILYSFGIFVTYSIQFYVPAEIIIPGITSKFHTKWKQICEFGIRSFLVSITCAGAILIPRLDIVISFVGAVSSSTLALILPPLVEILTFSKEHYNIWMVLKNISIAFTGVVGFLLGTYITVEEIIYPTPKVVAGTPQSPFLNLNSTCLTSGLK

SEQ ID NO: 6745 - DNA, 2569 bp, Homo sapiens
cccaatgatgctttaaggaagttatcattgttctgcttttcaaatgctgcagccccattcggaatctccagatgaatcctcattttactccttgttatcccagagtttcgaacaggtcgtgctgaccagaatgaacaggagatacctgtagcttgctcacttggcaaagtttgtttgttttttgctgctttcctcccatcttgtttcttggcgacagggcgtgtttgtttacggtttcccgctgtccaaaataaaaaaatatggatgtaatgaggcccttgataaatgagcagaattttgatgggacatcagatgaagaacatgagcaagagcttctgcctgttcagaagcattaccaacttgatgatcaagagggcatttcatttgtacaaactcttatgcaccttcttaaaggaaatattggaactggccttttaggacttccattggcaataaaaaatgcaggcatagtgcttggaccaatcagccttgtgtttataggaattatttctgttcactgtatgcacatattggtacgttgcagtcactttctatgtctgaggtttaaaaagtcaacattaggttatagtgacactgtgagctttgctatggaagtgagtccttggagttgtcttcagaagcaagcagcatgggggcggagtgtggttgacttttttctggtgataacacagctgggattctgtagtgtttatattgtcttcttagctgaaaatgtgaaacaagttcatgaaggattcctggagagtaaagtgtttatttcaaatagtaccaattcatcaaacccttgtgagagaagaagtgttgacctaaggatatatatgctttgctttcttccatttataattcttttggtcttcattcgtgaactaaagaatctatttgtactttcattccttgccaacgtttccatggctgtcagtcttgtgataatttaccagtatgttgtcaggaacatgccagatccccacaaccttccaatagtggctggttggaagaaatacccactcttttttggtactgctgtatttgcttttgaaggcataggagtggtccttccactggaaaaccaaatgaaagaatcaaagcgtttccctcaagcgttgaatattggcatggggattgttacaactttgtatgtaacattagctactttaggatatatgtgtttccatgatgaaatcaaaggcagcataactttaaatcttccccaagatgtatggttatatcaatcagtgaaaattctatattcctttggcatttttgtgacatattcaattcagttctatgttccagcagagatcattatccctgggatcacatccaaatttcatactaaatggaagcaaatctgtgaatttgggataagatccttcttggttagtattacttgtgccggagcaattcttattcctcgtttagacattgtgatttccttcgttggagctgtgagcagcagcacattggccctaatcctgccacctttggttgaaattcttacattttcgaaggaacattataatatatggatggtcctgaaaaatatttctatagcattcactggagttgttggcttcttattaggtacatatataactgttgaagaaattatttatcctactcccaaagttgtagctggcactccacagagtccttttctaaatttgaattcaacatgcttaacatctggtttgaaatagtaaaagcagaatcatgagtcttctatttttgtcccatttctgaaaattatcaagataactagtaaaatacattgctatatacataaaaatggtaacaaactctgttttctttggcacgatattaatattttggaagtaatcataactctttaccagtagtggtaaacctatgaaaaatccttgcttttaagtgttagcaatagttcaaaaaattaagttctgaaaattgaaaaaattaaaatgtaaaaaaattaaagaataaaaatacttctattattcttttatctcagtaagaaataccttaaccaagttatctctcttttatgctactcttttgccactcacttgagaacagaataggatttcaacaataagagaataaaataagaacatgtataacaaaaagctctctccagatcatccctgtgaatgccaaagtaaactttatgtacagtgtaaaaaaaaaaaatctcagttatgtttttattagccaaattctaatgattggctcctggaagtatagaaaactcccattaacataatataagcatcagaaaattgcaaacactagaattaattttacactctaatggtagttgatcttcatagtcaagaggcactgttcaagatcatgacttagtgtttcaatgaaatttgaaaagggactttaaaacttatccagtgcaactcccttgtttttcgtcagaggaaaaggaggcctagaaaggttaagtaacttggtcgagaccactcagccttgagatcaagaaaacctaatcttctgactcccaggccaggatgttttatttctcacatcatgtccaagaaaaagaataaattatgttcagctt

SEQ ID NO: 6746 - protein, 485 aa, Homo sapiens; identical to SEQ ID NO: 6744

SEQ ID NO: 6747 - DNA, 2509 bp, Homo sapiens
gcggttggggagcgccggggcagggaggcgggcaccaggcgcgggtccctccgggcaggggaggtaggcctgggcctgacgccggccacgcagcggcgggagagtgagcactcgggcggcggcgtcctggagacccgcgagagatggaagcggcggcgacgccggcggctgccggggcggcgaggcgcgaggagctagatatggatgtaatgaggcccttgataaatgagcagaattttgatgggacatcagatgaagaacatgagcaagagcttctgcctgttcagaagcattaccaacttgatgatcaagagggcatttcatttgtacaaactcttatgcaccttcttaaaggaaatattggaactggccttttaggacttccattggcaataaaaaatgcaggcatagtgcttggaccaatcagccttgtgtttataggaattatttctgttcactgtatgcacatattggtacgttgcagtcactttctatgtctgaggtttaaaaagtcaacattaggttatagtgacactgtgagctttgctatggaagtgagtccttggagttgtcttcagaagcaagcagcatgggggcggagtgtggttgacttttttctggtgataacacagctgggattctgtagtgtttatattgtcttcttagctgaaaatgtgaaacaagttcatgaaggattcctggagagtaaagtgtttatttcaaatagtaccaattcatcaaacccttgtgagagaagaagtgttgacctaaggatatatatgctttgctttcttccatttataattcttttggtcttcattcgtgaactaaagaatctatttgtactttcattccttgccaacgtttccatggctgtcagtcttgtgataatttaccagtatgttgtcaggaacatgccagatccccacaaccttccaatagtggctggttggaagaaatacccactcttttttggtactgctgtatttgcttttgaaggcataggagtggtccttccactggaaaaccaaatgaaagaatcaaagcgtttccctcaagcgttgaatattggcatggggattgttacaactttgtatgtaacattagctactttaggatatatgtgtttccatgatgaaatcaaaggcagcataactttaaatcttccccaagatgtatggttatatcaatcagtgaaaattctatattcctttggcatttttgtgacatattcaattcagttctatgttccagcagagatcattatccctgggatcacatccaaatttcatactaaatggaagcaaatctgtgaatttgggataagatccttcttggttagtattacttgtgccggagcaattcttattcctcgtttagacattgtgatttccttcgttggagctgtgagcagcagcacattggccctaatcctgccacctttggttgaaattcttacattttcgaaggaacattataatatatggatggtcctgaaaaatatttctatagcattcactggagttgttggcttcttattaggtacatatataactgttgaagaaattatttatcctactcccaaagttgtagctggcactccacagagtccttttctaaatttgaattcaacatgcttaacatctggtttgaaatagtaaaagcagaatcatgagtcttctatttttgtcccatttctgaaaattatcaagataactagtaaaatacattgctatatacataaaaatggtaacaaactctgttttctttggcacgatattaatattttggaagtaatcataactctttaccagtagtggtaaacctatgaaaaatccttgcttttaagtgttagcaatagttcaaaaaattaagttctgaaaattgaaaaaattaaaatgtaaaaaaattaaagaataaaaatacttctattattcttttatctcagtaagaaataccttaaccaagttatctctcttttatgctactcttttgccactcacttgagaacagaataggatttcaacaataagagaataaaataagaacatgtataacaaaaagctctctccagatcatccctgtgaatgccaaagtaaactttatgtacagtgtaaaaaaaaaaaatctcagttatgtttttattagccaaattctaatgattggctcctggaagtatagaaaactcccattaacataatataagcatcagaaaattgcaaacactagaattaattttacactctaatggtagttgatcttcatagtcaagaggcactgttcaagatcatgacttagtgtttcaatgaaatttgaaaagggactttaaaacttatccagtgcaactcccttgtttttcgtcagaggaaaaggaggcctagaaaggttaagtaacttggtcgagaccactcagccttgagatcaagaaaacctaatcttctgactcccaggccaggatgttttatttctcacatcatgtccaagaaaaagaataaattatgttcagctt

SEQ ID NO: 6748 - protein, 504 aa, Homo sapiens; identical to SEQ ID NO: 914

SEQ ID NO: 6749 - DNA, 1887 bp, Homo sapiens
gcggttggggagcgccggggcagggaggcgggcaccaggcgcgggtccctccgggcaggggaggtaggcctgggcctgacgccggccacgcagcggcgggagagtgagcactcgggcggcggcgtcctggagacccgcgagagatggaagcggcggcgacgccggcggctgccggggcggcgaggcgcgaggagctagatatggatgtaatgaggcccttgataaatgagcagaattttgatgggacatcagatgaagaacatgagcaagagcttctgcctgttcagaagcattaccaacttgatgatcaagagggcatttcatttgtacaaactcttatgcaccttcttaaaggaaatattggaactggccttttaggacttccattggcaataaaaaatgcaggcatagtgcttggaccaatcagccttgtgtttataggaattatttctgttcactgtatgcacatattggtacgttgcagtcactttctatgtctgaggtttaaaaagtcaacattaggttatagtgacactgtgagctttgctatggaagtgagtccttggagttgtcttcagaagcaagcagcatgggggcggagtgtggttgacttttttctggtgataacacagctgggattctgtagtgtttatattgtcttcttagctgaaaatgtgaaacaagttcatgaaggattcctggagagtaaagtgtttatttcaaatagtaccaattcatcaaacccttgtgagagaagaagtgttgacctaaggatatatatgctttgctttcttccatttataattcttttggtcttcattcgtgaactaaagaatctatttgtactttcattccttgccaacgtttccatggctgtcagtcttgtgataatttaccagtatgttgtcaggaacatgccagatccccacaaccttccaatagtggctggttggaagaaatacccactcttttttggtactgctgtatttgcttttgaaggcataggagtggtccttccactggaaaaccaaatgaaagaatcaaagcgtttccctcaagcgttgaatattggcatggggattgttacaactttgtatgtaacattagctactttaggatatatgtgtttccatgatgaaatcaaaggcagcataactttaaatcttccccaagatgtatggttatatcaatcagtgaaaattctatattcctttggcatttttgtgacatattcaattcagttctatgttccagcagagatcattatccctgggatcacatccaaatttcatactaaatggaagcaaatctgtgaatttgggataagatccttcttggttagtattacttgtgccggagcaattcttattcctcgtttagacattgtgatttccttcgttggagctgtgagcagcagcacattggccctaatcctgccacctttggttgaaattcttacattttcgaaggaacattataatatatggatggtcctgaaaaatatttctatagcattcactggagttgttggcttcttattaggtacatatataactgttgaagaaattatttatcctactcccaaagttgtagctggcactccacagagtccttttctaaatttgaattcaacatgcttaacatctggtttgaaatagtaaaagcagaatcatgagtcttctatttttgtcccatttctgaaaattatcaagataactagtaaaatacattgctatatacataaaaatggtaacaaactctgttttctttggcacgatattaatattttggaagtaatcataactctttaccagtagtggtaaacctatgaaaaatccttgcttttaagtgttagcaatagttcaaaaaattaagttctgaaaattg

SEQ ID NO: 6750 - protein, 504 aa, Homo sapiens; identical to SEQ ID NO: 914

SEQ ID NO: 6751 - DNA, 747 bp, Homo sapiens
ccctccgggcaggggaggtaggcctgggcctgacgccggccacgcagcggcgggagagtgagcactcgggcggcggcgtcctggagacccgcgagagatggaagcggcggcgacgccggcggctgccggggcggcgaggcgcgaggagctagatatggatgtaatgaggcccttgataaatgagcagaattttgatgggacatcagatgaagaacatgagcaagagcttctgcctgttcagaagcattaccaacttgatgatcaagagggcatttcgtaagtgttatggtttataagtctccttttcttttaattcagtatgtattttgtaatcttcttctacaggcaagacattctattacattacaagacacaaatataagacatagtctccaccttcaatgagtttatagtctatttgggaaagaaatgcgtttaaatcacagagcagtgtataggaattactggagtgatgatgcgtaacaaatgctagggatcttgaaagaagggagatctgattaagtggaacaggaatgttaagagaagtgatgtctgaaatgatcaggaggtagtacatgcttctttatactgaaacaaagtcgtggaggtagaaatgcattgtaacttttgaaaaccttttttgacattttgtcatcgttaatagatttgagtaacttctcattctaataatagtttaatggttcagcaaagtaatatgcaattgatcagaaaagaagaatataaact

SEQ ID NO: 6752 - protein, 60 aa, Homo sapiens [sequence omitted]

SEQ ID NO: 6753 - DNA, 363 bp, Homo sapiens
tgatctcactgagaatgaaactaacgtagaagaaagcaaagataagagaggggagagcaagcgcacaagagtttgaactaggtttcctgatgcttgtctgcaaaagattattcactgatatcgagagagatgttacttgttgaagtaaagagtgaagatttgttctacatcctattctcttacctcctgtgctgcactgaaggaaggagcagagctgaaaatgaacttgataaaatacacaagattaaaattattatacaaaaataaaatagatttgagaaccagagcaatgtccaatgcttgtgatgaatcttagataaataatggctgctagacaaataaaaaggacaatattctgaaaga

SEQ ID NO: 6754 - protein, 45 aa, Homo sapiens
MLLVEVKSEDLFYILFSYLLCCTEGRSRAENELDKIHKIKIIIQK

SEQ ID NO: 6755 - DNA, 1871 bp, Homo sapiens
ctcctcttagaagctattctcttctccctgaagggaggcaacactgtccgttcgcctgactggcagtgttttaaggacccatcgcgcttgacgggaaagtcagattaaaaatcaagaaatataaaccagatgtagcagtttcttgacatggagaaccaagcccataatacgatgggaacttctccttgtgaggctgagcttcaggaattaatggaacaaattgacatcatggtaagcaacaagaaaatggattgggaaagaaagatgcgggctttggagacacgattagatcttcgggatcaagaattggcaaatgcacaaacttgtttggatcagaaaggtcaagaggtagggttacttcgacagaaattggacagtctggaaaaatgtaatttagcaatgactcagaattatgaaggacaactacaaagcctaaaggctcaattttccaaactaacaaataactttgaaaaactgagattacatcagatgaaacaaaacaaagttccacgaaaagaattaccacaccttaaagaagaaataccctttgaactgagcaatttgaaccagaaattagaggaatttagagcaaagtcaagagaatgggacaagcaagagatattatatcagactcatctgatttctttagatgctcaacaaaaattattatctgagaagtgtaatcagtttcagaaacaggcacaaagttaccaaactcaactaaatggtaaaaaacagtgcttagaagacagcagctctgaaattcctcgtttgatatgtgacccagatcccaattgtgaaatcaatgaaagagatgagttcattattgaaaaactgaaatcagctgtaaatgagatagcactaagcaggaataaattacaagatgaaaatcagaagctcttgcaagaactgaaaatgtaccaaagacagtgccaggccatggaagcaggtctctcagaggtaaaaagtgagttacagtcacgtgatgatctcttgagaattatagaaatggaacgattgcaattacacagagaattattaaaaataggagagtgccaaaatgctcaaggaaataaaacaagacttgaatcatcttatttgccttctattaaagaaccagaaaggaaaataaaagagctgttttcagtgatgcaagatcaaccaaatcatgaaaaagaattgaacaagataagaagccaactccaacaggtggaagagtaccataactctgagcaggaaagaatgaggaatgaaatctctgacctaacagaagagcttcatcagaaggagatcactatagcaactgtcacaaagaaagctgcccttctggaaaaacagttaaaaatggaattagaaataaaagaaaaaatgttagcaaaacaaaaggtctcagatatgaaatataaagctgtcagaactgaaaacacacatctaaaaggaatgatgggagatttagaccccggagaatacatgagtatggacttcactaacagggaacagtcaaggcatacatctattaataaactgcaatatgagaatgaaaggctccgaaatgatcttgcaaaacttcatgtcaatggaaaatcaacctggactaatcaaaacacctatgaagaaacaggaagatatgcctatcaaagccaaataaaagtggaacaaaatgaagagagacttagtcatgactgtgagccaaacagaagtacaatgcctcccttgccaccttcgacatttcaagccaaagaaatgacaagtcctttggttagtgatgatgatgtattcccactggtgagttgctggttgtgggctttttttttctttaatgggttattgctttactcttacactgatgtcaataaactgacgtacatagt

SEQ ID NO: 6756 - protein, 573 aa, Homo sapiens
MENQAHNTMGTSPCEAELQELMEQIDIMVSNKKMDWERKMRALETRLDLRDQELANAQTCLDQKGQEVGLLRQKLDSLEKCNLAMTQNYEGQLQSLKAQFSKLTNNFEKLRLHQMKQNKVPRKELPHLKEEIPFELSNLNQKLEEFRAKSREWDKQEILYQTHLISLDAQQKLLSEKCNQFQKQAQSYQTQLNGKKQCLEDSSSEIPRLICDPDPNCEINERDEFIIEKLKSAVNEIALSRNKLQDENQKLLQELKMYQRQCQAMEAGLSEVKSELQSRDDLLRIIEMERLQLHRELLKIGECQNAQGNKTRLESSYLPSIKEPERKIKELFSVMQDQPNHEKELNKIRSQLQQVEEYHNSEQERMRNEISDLTEELHQKEITIATVTKKAALLEKQLKMELEIKEKMLAKQKVSDMKYKAVRTENTHLKGMMGDLDPGEYMSMDFTNREQSRHTSINKLQYENERLRNDLAKLHVNGKSTWTNQNTYEETGRYAYQSQIKVEQNEERLSHDCEPNRSTMPPLPPSTFQAKEMTSPLVSDDDVFPLVSCWLWAFFFFNGLLLYSYTDVNKLTY

SEQ ID NO: 6757 - DNA, 1655 bp, Homo sapiens
agaagctattctcttctccctgaagggaggcaacactgtccgttcgcctgactggcagtgttttaaggacccatcgcgcttgacgggaaagtcaggtacaagctgatgctgttatcaccacaggaaccaggggctgagcggtgaaatccagctcctcccagctggaagacgctagggtgaacggagataaaagcagttctctttacccgaagtttatttctttttcatgccacttcaaatttggattaaaaatcaagaaatataaaccagatgtagcagtttcttgacatggagaaccaagcccataatacgatgggaacttctccttgtgaggctgagcttcaggaattaatggaacaaattgacatcatggtaagcaacaagaaaatggattgggaaagaaagatgcgggctttggagacacgattagatcttcgggatcaagaattggcaaatgcacaaacttgtttggatcagaaaggtcaagaggtagggttacttcgacagaaattggacagtctggaaaaatgtaatttagcaatgactcagaattatgaaggacaactacaaagcctaaaggctcaattttccaaactaacaaataactttgaaaaactgagattacatcagatgaaacaaaacaaagttccacgaaaagaattaccacaccttaaagaagaaataccctttgaactgagcaatttgaaccagaaattagaggaatttagagcaaagtcaagagaatgggacaagcaagagatattatatcagactcatctgatttctttagatgctcaacaaaaattattatctgagaagtgtaatcagtttcagaaacaggcacaaagttaccaaactcaactaaatggtaaaaaacagtgcttagaagacagcagctctgaaattcctcgtttgatatgtgacccagatcccaattgtgaaatcaatgaaagagatgagttcattattgaaaaactgaaatcagctgtaaatgagatagcactaagcaggaataaattacaagatgaaaatcagaagctcttgcaagaactgaaaatgtaccaaagacagtgccaggccatggaagcaggtctctcagaggtaaaaagtgagttacagtcacgtgatgatctcttgagaattatagaaatggaacgattgcaattacacagagaattattaaaaataggagagtgccaaaatgctcaaggaaataaaacaagacttgaatcatcttatttgccttctattaaagaaccagaaaggaaaataaaagagctgttttcagtgatgcaagatcaaccaaatcatgaaaaagaattgaacaagataagaagccaactccaacaggtggaagagtaccataactctgagcaggaaagaatgaggaatgaaatctctgacctaacagaagagcttcatcagaaggagatcactatagcaactgtcacaaagaaagctgcccttctggaaaaacagttaaaaatggaattagaaataaaagaaaaaatgttagcaaaacaaaaggtctcagatatgaaatataaagctgtcagaactgaaaacacacatctaaaaggaatgatgggagatttagaccccggagaatacatggtaatatgctgacatcattcaataaattgaacaaagagatt

SEQ ID NO: 6758 - protein, 445 aa, Homo sapiens
MENQAHNTMGTSPCEAELQELMEQIDIMVSNKKMDWERKMRALETRLDLRDQELANAQTCLDQKGQEVGLLRQKLDSLEKCNLAMTQNYEGQLQSLKAQFSKLTNNFEKLRLHQMKQNKVPRKELPHLKEEIPFELSNLNQKLEEFRAKSREWDKQEILYQTHLISLDAQQKLLSEKCNQFQKQAQSYQTQLNGKKQCLEDSSSEIPRLICDPDPNCEINERDEFIIEKLKSAVNEIALSRNKLQDENQKLLQELKMYQRQCQAMEAGLSEVKSELQSRDDLLRIIEMERLQLHRELLKIGECQNAQGNKTRLESSYLPSIKEPERKIKELFSVMQDQPNHEKELNKIRSQLQQVEEYHNSEQERMRNEISDLTEELHQKEITIATVTKKAALLEKQLKMELEIKEKMLAKQKVSDMKYKAVRTENTHLKGMMGDLDPGEYMVIC

SEQ ID NO: 6759 - DNA, 2854 bp, Homo sapiens
agctattctcttctccctgaagggaggcaacactgtccgttcgcctgactggcagtgttttaaggacccatcgcgcttgacgggaaagtcaggtacaagctgatgctgttatcaccacaggaaccaggggctgagcggtgaaatccagctcctcccagctggaagacgctagggtgaacggagataaaagcagttctctttacccgaagtttatttctttttcatgccacttcaaatttggattaaaaatcaagaaatataaaccagatgtagcagtttcttgacatggagaaccaagcccataatacgatgggaacttctccttgtgaggctgagcttcaggaattaatggaacaaattgacatcatggtaagcaacaagaaaatggattgggaaagaaagatgcgggctttggagacacgattagatcttcgggatcaagaattggcaaatgcacaaacttgtttggatcagaaaggtcaagaggtagggttacttcgacagaaattggacagtctggaaaaatgtaatttagcaatgactcagaattatgaaggacaactacaaagcctaaaggctcaattttccaaactaacaaataactttgaaaaactgagattacatcagatgaaacaaaacaaagttccacgaaaagaattaccacaccttaaagaagaaataccctttgaactgagcaatttgaaccagaaattagaggaatttagagcaaagtcaagagaatgggacaagcaagagatattatatcagactcatctgatttctttagatgctcaacaaaaattattatctgagaagtgtaatcagtttcagaaacaggcacaaagttaccaaactcaactaaatggtaaaaaacagtgcttagaagacagcagctctgaaattcctcgtttgatatgtgacccagatcccaattgtgaaatcaatgaaagagatgagttcattattgaaaaactgaaatcagctgtaaatgagatagcactaagcaggaataaattacaagatgaaaatcagaagctcttgcaagaactgaaaatgtaccaaagacagtgccaggccatggaagcaggtctctcagaggtaaaaagtgagttacagtcacgtgatgatctcttgagaattatagaaatggaacgattgcaattacacagagaattattaaaaataggagagtgccaaaatgctcaaggaaataaaacaagacttgaatcatcttatttgccttctattaaagaaccagaaaggaaaataaaagagctgttttcagtgatgcaagatcaaccaaatcatgaaaaagaattgaacaagataagaagccaactccaacaggtggaagagtaccataactctgagcaggaaagaatgaggaatgaaatctctgacctaacagaagagcttcatcagaaggagatcactatagcaactgtcacaaagaaagctgcccttctggaaaaacagttaaaaatggaattagaaataaaagaaaaaatgttagcaaaacaaaaggtctcagatatgaaatataaagctgtcagaactgaaaacacacatctaaaaggaatgatgggagatttagaccccggagaatacatgagtatggacttcactaacagggaacagtcaaggcatacatctattaataaactgcaatatgagaatgaaaggctccgaaatgatcttgcaaaacttcatgtcaatggaaaatcaacctggactaatcaaaacacctatgaagaaacaggaagatatgcctatcaaagccaaataaaagtggaacaaaatgaagagagacttagtcatgactgtgagccaaacagaagtacaatgcctcccttgccaccttcgacatttcaagccaaagaaatgacaagtcctttggttagtgatgatgatgtattcccactgtctcccccagatatgtccttcccagcatctttggctgcacagcatttccttctggaagaagagaaacgagcaaaagaacttgaaaaacttctaaatacacatattgatgaactgcaaagacacacagaatttactcttaataaatactccaagctaaaacaaaatagacacatatgagcttttaaacttttttatttgcttcccccccccacccccgccaagaaaaaaagctctggcaaaatatttacaaagctgattaatgaaaccaagaaattctgttctgtttccttgagtaaataatttccgtaaggcagctagaaaatagtaagtattttgttctataaagctgttcacatttctgcattaacatgctaaattgtcctgctgtagagttactataaaataaacatgactattccaaaagagatttttttccagtctaaggaatattttggaatcaaatatgcagttttttttccccacttgaatcatgtatactgaaaacccatttcctcagcaactacacaaaataagagaaagggaagtgctatattccagatacaaatgactcaaaggcagctcagttgtactggttttgaaaactcaaggattttataaataaaaatatttaagtatttccagttatgtaaacactctaaaattctataattttttggaaaaaaaaagctatagctttattgtttttacattcacctttataatgtctgtctgtttcaacacaatgaaggtatatggaatgtgcaatttacaaacctaaaatatatgtgccaaaaattaacgcttttttgttagtactaattacttcatggacacaaacaagataaaggaaatataaagcattactgttgctacattttcctttgtaatcacttctgtttttaatacaataaaggaatgtaaaattcaatgg

SEQ ID NO: 6760 - protein, 604 aa, Homo sapiens
MENQAHNTMGTSPCEAELQELMEQIDIMVSNKKMDWERKMRALETRLDLRDQELANAQTCLDQKGQEVGLLRQKLDSLEKCNLAMTQNYEGQLQSLKAQFSKLTNNFEKLRLHQMKQNKVPRKELPHLKEEIPFELSNLNQKLEEFRAKSREWDKQEILYQTHLISLDAQQKLLSEKCNQFQKQAQSYQTQLNGKKQCLEDSSSEIPRLICDPDPNCEINERDEFIIEKLKSAVNEIALSRNKLQDENQKLLQELKMYQRQCQAMEAGLSEVKSELQSRDDLLRIIEMERLQLHRELLKIGECQNAQGNKTRLESSYLPSIKEPERKIKELFSVMQDQPNHEKELNKIRSQLQQVEEYHNSEQERMRNEISDLTEELHQKEITIATVTKKAALLEKQLKMELEIKEKMLAKQKVSDMKYKAVRTENTHLKGMMGDLDPGEYMSMDFTNREQSRHTSINKLQYENERLRNDLAKLHVNGKSTWTNQNTYEETGRYAYQSQIKVEQNEERLSHDCEPNRSTMPPLPPSTFQAKEMTSPLVSDDDVFPLSPPDMSFPASLAAQHFLLEEEKRAKELEKLLNTHIDELQRHTEFTLNKYSKLKQNRHI

SEQ ID NO: 6761 - DNA, 374 bp, Homo sapiens
ggcggggccccttggggcgggcctggcggggcgggaggtgacatacgcggtcctgcgccctcgcctcagacctctcgggcgagcgcggcgcagcgcagattaaaaatcaagaaatataaaccagatgtagcagtttcttgacatggagaaccaagcccataatacgatggggctgaagtgtaagacctcaataactacctgcttatccagtctgagtgactggacttacaccagctccctggagaatgcttcagcttctttgaaaaagaactctgtagtgagagcacttaccaatctgtcttaacaacagttgctatagtcctagctgttatactaagcattttgtttgaaactcaataaaccctcctggaccc

SEQ ID NO: 6762 - protein, 53 aa, Homo sapiens
MENQAHNTMGLKCKTSITTCLSSLSDWTYTSSLENASASLKKNSVVRALTNLS

SEQ ID NO: 6763 - DNA, 2701 bp, Homo sapiens
cttggggcgggcctggcggggcgggaggtgacatacgcggtcctgcgccctcgcctcagacctctcgggcgagcgcggcgcagcgcagattaaaaatcaagaaatataaaccagatgtagcagtttcttgacatggagaaccaagcccataatacgatgggaacttctccttgtgaggctgagcttcaggaattaatggaacaaattgacatcatggtaagcaacaagaaaatggattgggaaagaaagatgcgggctttggagacacgattagatcttcgggatcaagaattggcaaatgcacaaacttgtttggatcagaaaggtcaagaggtagggttacttcgacagaaattggacagtctggaaaaatgtaatttagcaatgactcagaattatgaaggacaactacaaagcctaaaggctcaattttccaaactaacaaataactttgaaaaactgagattacatcagatgaaacaaaacaaagttccacgaaaagaattaccacaccttaaagaagaaataccctttgaactgagcaatttgaaccagaaattagaggaatttagagcaaagtcaagagaatgggacaagcaagagatattatatcagactcatctgatttctttagatgctcaacaaaaattattatctgagaagtgtaatcagtttcagaaacaggcacaaagttaccaaactcaactaaatggtaaaaaacagtgcttagaagacagcagctctgaaattcctcgtttgatatgtgacccagatcccaattgtgaaatcaatgaaagagatgagttcattattgaaaaactgaaatcagctgtaaatgagatagcactaagcaggaataaattacaagatgaaaatcagaagctcttgcaagaactgaaaatgtaccaaagacagtgccaggccatggaagcaggtctctcagaggtaaaaagtgagttacagtcacgtgatgatctcttgagaattatagaaatggaacgattgcaattacacagagaattattaaaaataggagagtgccaaaatgctcaaggaaataaaacaagacttgaatcatcttatttgccttctattaaagaaccagaaaggaaaataaaagagctgttttcagtgatgcaagatcaaccaaatcatgaaaaagaattgaacaagataagaagccaactccaacaggtggaagagtaccataactctgagcaggaaagaatgaggaatgaaatctctgacctaacagaagagcttcatcagaaggagatcactatagcaactgtcacaaagaaagctgcccttctggaaaaacagttaaaaatggaattagaaataaaagaaaaaatgttagcaaaacaaaaggtctcagatatgaaatataaagctgtcagaactgaaaacacacatctaaaaggaatgatgggagatttagaccccggagaatacatgagtatggacttcactaacagggaacagtcaaggcatacatctattaataaactgcaatatgagaatgaaaggctccgaaatgatcttgcaaaacttcatgtcaatggaaaatcaacctggactaatcaaaacacctatgaagaaacaggaagatatgcctatcaaagccaaataaaagtggaacaaaatgaagagagacttagtcatgactgtgagccaaacagaagtacaatgcctcccttgccaccttcgacatttcaagccaaagaaatgacaagtcctttggttagtgatgatgatgtattcccactgtctcccccagatatgtccttcccagcatctttggctgcacagcatttccttctggaagaagagaaacgagcaaaagaacttgaaaaacttctaaatacacatattgatgaactgcaaagacacacagaatttactcttaataaatactccaagctaaaacaaaatagacacatatgagcttttaaacttttttatttgcttcccccccccacccccgccaagaaaaaaagctctggcaaaatatttacaaagctgattaatgaaaccaagaaattctgttctgtttccttgagtaaataatttccgtaaggcagctagaaaatagtaagtattttgttctataaagctgttcacatttctgcattaacatgctaaattgtcctgctgtagagttactataaaataaacatgactattccaaaagagatttttttccagtctaaggaatattttggaatcaaatatgcagttttttttccccacttgaatcatgtatactgaaaacccatttcctcagcaactacacaaaataagagaaagggaagtgctatattccagatacaaatgactcaaaggcagctcagttgtactggttttgaaaactcaaggattttataaataaaaatatttaagtatttccagttatgtaaacactctaaaattctataattttttggaaaaaaaaagctatagctttattgtttttacattcacctttataatgtctgtctgtttcaacacaatgaaggtatatggaatgtgcaatttacaaacctaaaatatatgtgccaaaaattaacgcttttttgttagtactaattacttcatggacacaaacaagataaaggaaatataaagcattactgttgctacattttcctttgtaatcacttctgtttttaatacaataaaggaatgtaaaattcaatgg

SEQ ID NO: 6764 - protein, 604 aa, Homo sapiens; identical to SEQ ID NO: 6760

SEQ ID NO: 6765 - DNA, 767 bp, Homo sapiens
aatcaagaaatataaaccagatgtagcagtttcttgacatggagaaccaagcccataatacgatgggaacttctccttgtgaggctgagcttcaggaattaatggaacaaattgacatcatggtaagcaacaagaaaatggattgggaaagaaagatgcgggctttggagacacgattagatcttcgggatcaagaattggcaaatgcacaaacttgtttggatcagaaaggtcaagaggtagggttacttcgacagaaattggacagtctggaaaaatgtaatttagcaatgactcagaattatgaaggacaactacaaagcctaaaggctcaagtaagaaaacttattataatttaatatcacacattttgatatatttttttttacctgtagagttgtgttaactttaaactgttttcagtataaacaaatgtcttgtattttaattataagcttggtcatgtctttccctgttttatatgcattgattttgtctcttactagattgttgtcttgctatattttctgtgcctctgttagcacagtagtagacaaatggctttctatttctcaagagacttgttgatgaattaaataataattagctcacaaaaaataattctgtgagcaacaacaaaaaacaattattttttgtggttattactatctaataaagatgttctcaattctgtgataatttaaaatgtggaagtttgctgttatgaaatagataattgaaataataaaactggtctttattacctt

SEQ ID NO: 6766 - protein, 106 aa, Homo sapiens
MENQAHNTMGTSPCEAELQELMEQIDIMVSNKKMDWERKMRALETRLDLRDQELANAQTCLDQKGQEVGLLRQKLDSLEKCNLAMTQNYEGQLQSLKAQVRKLIII

SEQ ID NO: 6767 - DNA, 736 bp, Homo sapiens
ggatcatcttccgggagcgtggctaggggcggagcgactgccgcgcgatagtcagggagctgtgcgggtcctggttgcaagagaggaaggattaaaggaatggagggcatcataaacatgaagaaaaatgtgagagagtatgataattgaaagaagagtttgtgttcaaagggagagattaaagatgtgcaacttcagaccttggccaaagtgaaacatttcaccaagattcaggctgtgagaaacatcttgcctacccacctgaccacaaggcagacaaaggcccaacggaagaaacattcttatcataccctactcggcaaaggcccaacggaagaaacattcttatcataccctactcggcaaaggctcaactaaagaaacatctctatcatattctgttgggagaaagtgcaaagaaacaccacgttctggaggaataagagccagaactgcctcatcatgggaacatcttatgaatatcctgccgggcagccagctatatggcccagatctctgccgctcagacccattaagtaccccagcctgtaagcggcggtgagctctgtctggccctaagttagttggccctcaacttccgcaggtgtctgcaatatacctgtgttgctgtttgagctgccccctctctgtgtctttttttaaccctcgtctcccttcaaaacctaacagtaagcactcaattcttacttgttgaataaatgaatgatagacaatg

SEQ ID NO: 6768 - protein, 86 aa, Homo sapiens
RCATSDLGQSETFHQDSGCEKHLAYPPDHKADKGPTEETFLSYPTRQRPNGRNILIIPYSAKAQLKKHLYHILLGESAKKHHVLEE

SEQ ID NO: 6769 - DNA, 548 bp, Homo sapiens
tgggttttgaagtactgcgtgtcgtcttcagagttgttttcctggaggcgctgataccggacttggtggagaaggatggtatgaatgtgtttctaggtggctgcctggacaagggagttcagcctttgggagataaagcagaatataaagggtcacactctgtcacccagactggagtgcagtggcgcaatctcagctcgctgtagactcaacctcctgggctcaagcgattctcccacctcagccttctgactttgcctcgggagagaaaaagagagtcgattccgagtacagctgggccactgggactgcattcctgcctgtgaggaggacagcctgtcaatgagccagaaggggctaacagaggttgtacttacaggttctcaagttttgctatcataaacacccaaagtacaccacgccggcaagctgaaggctgacaggatagaaaacttgcacaagacagttaacattgtagcgatcatcttgccaaacagagggcagcaatgcttgtgtcttggtcggaaaggagttggagtgaagtcaca

SEQ ID NO: 6770 - protein, 41 aa, Homo sapiens
MNVFLGGCLDKGVQPLGDKAEYKGSHSVTQTGVQWRNLSSL

SEQ ID NO: 6771 - DNA, 393 bp, Homo sapiens
ctgcaagagaaaagcccaagggcctaggtaaacaatggacagcatcctggatgatgatgcaattttaagcctgaaaagaatatttggtcttcaatcttggcaagcatacctgtaaagtagatggtaaggctgctgatgagaaccatttgagaaaaaatgatcaatgagaaaattgcaccagaggacccacattgggacttttgagttgaacacattacttagcaaatgctaacatgggaacttgaggatatttagtgaacctgctgaagtcaacacattaatgcaactgaaaccaatagagaagaagctatctaaccttggcattttggggtctaaaaaaagcttttacccactattgtgctttgtaacctataaaataaatcaaaataaatc

SEQ ID NO: 6772 - protein, 36 aa, Homo sapiens
MQLKPIEKKLSNLGILGSKKSFYPLLCFVTYKINQN

SEQ ID NO: 6773 - DNA, 508 bp, Homo sapiens
caatggacagcatcctggatgatgatgcaattttaagcctgaaaagaatatttggtcttcaatcttggcaagcatacctgtaaagtagatggtaaggctgctgatgagcatgcttccccctctgcccttctggatgtatacgccagaaccatttgagtaatcaagtcatagctggaatgtgactgcctggctgatcttccaaggtccccttgcatctatgtgtggccttatgaatcaatccttgccaatggaaagtgaatggaagtgatgtgtgtcggtcccaggactgaccatagacctcctgcatgtgctcctttatgctatttcttcagttcagggtgggaatgggaatgcccagagcaactttggaagctatatgctgaggatgctagaactgccatcagcctgggaccctgaacaactgtatgaaaccaggtacctgtgggtgggaaaaaaactggctggaactattagatgaaagaaaaataaacatgtttttggtcattgc

SEQ ID NO: 6774 - protein, 52 aa, Homo sapiens
MEVMCVGPRTDHRPPACAPLCYFFSSGWEWECPEQLWKLYAEDARTAISLGP

SEQ ID NO: 6775 - DNA, 1646 bp, Homo sapiens
cactcccagagcccctggaactctggcccaaggctctctgactgactccctcccagatcttctcggcttagcagctgaagactgacactgcccgatcaccttggaagccccctagaccatcatggatgccgagcttcaggtaactctcacagtggaaggtagttcttcaatcaagactacattgaacaaggatggtgatgcagcttatacagcagaaaacactgttggtgctgaaatagttcgtacaagagaatgactatggatcacttaattaagctcctcttacttctaggccaggtccatggttagcaacatgatgaaggatgccagcttcccctgaagatcaacccatcatcgaagttgaaaactttgagatcacaagacaccaatagacgttccagtacatctttgtggattccaagacatcctcacagaatggagtctctgtcgcccggctggagtgcagtggtgcaatctcggctcactgcaacctccgcctcctgggttccagcgattctcctgcctcaacctcctgagtagctgggactacaggcatgcaccaccatgcacatgggcaattttttatagcagggagtggaatgtaacatttgtacttactgtatgagattcaagtgtaattagtctcctattatcaaatacattcagattcataaatcaaaggcctgtaattattgcctccagtatgtcaactgctaaaactacctttttttttccctaaaaacgattttgttactgctccatagattagctcccacaaaactgccaagtcaaaatgtaggctttatttttgctgtctagaaatgaacttctattaggaactactgtgatatttaattcttagcaaaatgcatccaatgaaaataaagtaatacattcagtttctgatttgaaaaggattcgcaatgtgttaggtggtggtgttttctgggttgcccccttgcagagctagagcaggcccttgctcttccttgatggctgggcatctgccatgacttctgtcactgcttgatagacaacactttttctcctctgcttgatgaaaccaattattttcttttcccgagagtgtgtcaattatgccattgtcatcgtggcagccaaaggcatattagtgctattttctgttaaattcactttgaaatctcagcatttggttccaagatcaatctgttccctcccctcctttttatttttatttttttctgtactgtaattgtattttgttatctcttttgatatgaaagtgtctgcacttgacatactgtcagagtatttttctttatctctaatactttattgtatatgtcactgtgattgtacgattgtgtcaaaatatttgtcacattctcacttttgatgtttagtatttgtcctattactgctacagatgcaagataaccttttatcaaatacttttatagacttcagaaagtctcaaagagtggtgaaagagaagttattcctgttatttctgaagcgttctgcatataatttaaaaacagagaaaagaagtttctcaaatacacagatttcccaggttgcttgttaaagttgtcaatttcactgaaccctcttcatgaattgttttcctgtcatgttaaataaataaagaatttttccatgtt

SEQ ID NO: 6776 - protein, 44 aa, Homo sapiens
MDAELQVTLTVEGSSSIKTTLNKDGDAAYTAENTVGAEIVRTRE

SEQ ID NO: 6777 - DNA, 663 bp, Homo sapiens
ctcttcagaatgccatctctaggatgccaatgggctgtgtctacagtactatgtaggaaagtgctgcaagaggtacttgcactgggactactaaaagaaacaactttacccatgaagaatgcagaaaagcaaggcaggatggtggcccaccctggaaggacatggagccaagggagcctcccccatccagggaggtggtgagtgaatgctgtggccctgggaacccacgcttctcccatgggtcttcgtacccttgggtcaggagatcccctcgtggacccactccaccagggccttcagtctgacacacagaactatgtggagtctcatcagagcagccattgagtttgccgagaatgatggtttccagcttcatccatgtccctgcaaaagacatgaactcatcattttttatggctccacagtattctatgaaattcctgttcctctacttcaagaccatgcagtagtgaggtgcagtggctcttacctgtaatcccagcaatttggaaggcagagaaaacttgctgcaattaaatgccctttttgggagaatatctagaagaaaattgaggaaggaagaagtgagagataaagggtattcacattttaaattttgatagaaatttcttgattactttataaaacttatattcaaacagt

SEQ ID NO: 6778 - protein, 96 aa, Homo sapiens
MLWPWEPTLLPWVFVPLGQEIPSWTHSTRAFSLTHRTMWSLIRAAIEFAENDGFQLHPCPCKRHELIIFYGSTVFYEIPVPLLQDHAVVRCSGSYL

SEQ ID NO: 6779 - DNA, 927 bp, Homo sapiens
atggaagcgggggtgtacgtggacgtctgtgaagtgtggaccgacacccctggcccctcctcaccagtctcctccgtctgcgcccggggtagcccaggcccgggagagagcagcggagattcgagcctcggagggtggttgccggctttcgagcaggcttggagactctgcctgcgtcctccacttcgtcccggcccttgtcctgtggcaggtgctccgctcaagatgaatctcaacttcacctctcctctacacccggcgtcttctcagaggcccacatccttcttcatcgaggacatcctgctgcacaagcccaagccgctgagagaggtggccccagaccatttcgccagctctctggcctctcgggtgcctctgctagactatggctaccccctcatgcccacacccaccctcttggctcctcacgcccatcaccctctgcataagggagaccaccatcatccttatttcctcaccacctcggggatgccagtcccagcgctgttcccgcacccgcagcacgcggagctgccggggaagcactgccgccgccgcaaagcccgcacggttttctctgactcgcagctctcgggcttggagaagaggttcgagatccagcgctacctgtccacgccagaacgagtggagctggccacggccctcagcctgtccgagacgcaggtgaaaacgtggttccagaaccggcggatgaagcataaaaagcaactgcggaaaagccaagacgaacccaaagcaccagacgggccagaaagccccgagggcagcccccgcggttcagaggccgccaccgccgccgaggctcggctgagcctgcccgccggtcccttcgtgctgaccgagccagaggacgaggtggacattggagacgagggggagctgggctcagggccgcacgtgctctga

SEQ ID NO: 6780 - protein, 308 aa, Homo sapiens
MEAGVYVDVCEVWTDTPGPSSPVSSVCARGSPGPGESSGDSSLGGWLPAFEQAWRLCLRPPLRPGPCPVAGAPLKMNLNFTSPLHPASSQRPTSFFIEDILLHKPKPLREVAPDHFASSLASRVPLLDYGYPLMPTPTLLAPHAHHPLHKGDHHHPYFLTTSGMPVPALFPHPQHAELPGKHCRRRKARTVFSDSQLSGLEKRFEIQRYLSTPERVELATALSLSETQVKTWFQNRRMKHKKQLRKSQDEPKAPDGPESPEGSPRGSEAATAAEARLSLPAGPFVLTEPEDEVDIGDEGELGSGPHVL

SEQ ID NO: 6781 - DNA, 1538 bp, Homo sapiens
ggcagccatcttgtctggagacaagtctgagaatgttcaagatttgctgctcttggatgtcactcctctttcccttggtattgaaactgctggtggagtcatgactgtcctcatcaagcgtaataccaccattcctaccaagcagacacagaccttcactacctattctgacaaccagcctggtgtgcttattcaggtttatgaaggcgagcgtgccatgacaaaggataacaacctgcttggcaagtttgaactcacaggcatacctcctgcaccccgaggtgttcctcagattgaagtcacttttgacattgatgccaatggtatactcaatgtctctgctgtggacaagagtacgggaaaagagaacaagattactatcactaatgacaagggtaaggaggcactgtcatctggtcttgacagggataatggtatttcaattgagttactggtgcctaagggcgtctagctaagagaaactagagttacacatacacaggtaatttaaggcttttacttagagttaatttctttcctaggccgtttgagcaaggaagacattgaacgtatggtccaggaagctgagaagtacaaagctgaagatgagaagcagagggacaaggtgtcatccaagaattcacttgagtcctatgccttcaacatgaaagcaactgttgaagatgagaaacttcaaggcaagattaacgatgaggacaaacagaagattctggacaagtgtaatgaaattatcaactggcttgataagaatcaggtttgtgttttttttttttttttttcctcccccactcaatggaggggaaggggatggtaaaccaagcttgagctggatttcagtgtagggtcacaatgatgaatggtccaaaacattcgcggtttccaccagaattcaaggtgttggcaactaccttccttggatgtctgagtgacccaagatgttaaggaagaataaggccctattttaatgttggtagtggccctcttgtaagagtttgcgccagacttttagtatcagattgcgtcagggagaaagaagggttattaacattaaaagaacttgcagtaattcctttttctcttcctcagactgctgagaaggaagaatttgaacatcaacagaaagagctggagaaagtttgcaaccccatcatcaccaagctgtaccagagtgcaggaggcatgccaggaggaatgcctgggggatttcctggtggtggagctcctccctctggtggtgcttcctcagggcccaccattgaagaggttgattaagccaaccaagtgtagatgtagcattgttccacacatttaaaacatttgaaggacctaaattcgtagcaaattctgtggcagttttaaaaagttaagctgctatagtaagttactgggcattctcaatacttgaatatggaacatatgcacaggggaaggaaataacattgcactttataaacactgtattgtaagtggaaaatgcaatgtcttaaataaaactatttaaaattggcaccatacaa

SEQ ID NO: 6782 - protein, 123 aa, Homo sapiens
MTVLIKRNTTIPTKQTQTFTTYSDNQPGVLIQVYEGERAMTKDNNLLGKFELTGIPPAPRGVPQIEVTFDIDANGILNVSAVDKSTGKENKITITNDKGKEALSSGLDRDNGISIELLVPKGV

SEQ ID NO: 6783 - DNA, 2880 bp, Homo sapiens
aagatagggtataagaggcagggtggcgggcggaaaccggtctcattgaactcgcctgcagctcttgggttttttgtggcttccttcgttattggagccaggcctacaccccagcaaccatgtccaagggacctgcagttggtattgatcttggcaccacctactcttgtgtgggtgttttccagcacggaaaagtcgagataattgccaatgatcagggaaaccgaaccactccaagctatgtcgcctttacggacactgaacggttgatcggtgatgccgcaaagaatcaagttgcaatgaaccccaccaacacagtttttgatgccaaacgtctgattggacgcagatttgatgatgctgttgtccagtctgatatgaaacattggccctttatggtggtgaatgatgctggcaggcccaaggtccaagtagaatacaagctggagacacccacttgggtggagaagattttgacaaccgaatggtcaaccattttattgctgagtttaagcgcaagcataagaaggacatcagtgagaacaagagagctgtaagacgcctccgtactgcttgtgaacgtgctaagcgtaccctctcttccagcacccaggccagtattgagatcgattctctctatgaaggaatcgacttctatacctccattacccgtgcccgatttgaagaactgaatgctgacctgttccgtggcaccctggacccagtagagaaagcccttcgagatgccaaactagacaagtcacagattcatgatattgtcctggttggtggttctactcgtatccccaagattcagaagcttctccaagacttcttcaatggaaaagaactgaataagagcatcaaccctgatgaagctgttgcttatggtgcaggtaacaatggtatctcaattaaccctaaaggcaggcaggcccaaggtgactcgctgtgatgagtgattgttaaacattcgtagtttccaccaaaagcttggctaatgatggcaacaccttccttggatgtctgagcgagtgatagttaaaacaggagctatgtactgggttttcttttaacttcttttaacgttaactttttgtttgctagctgtccaggcagccatcttgtctggagacaagtctgagaatgttcaagatttgctgctcttggatgtcactcctctttcccttggtattgaaactgctggtggagtcatgactgtcctcatcaagcgtaataccaccattcctaccaagcagacacagaccttcactacctattctgacaaccagcctggtgtgcttattcaggtatgtttctgtacttctcttgtttggcttactgataacagataaagggaagtcttgactgactcgctatgatgatggattccaaaaccattcgtagtttccaccagaaagtcttatgttggccagttccttccttggatgtttgagcgaccattcttccttagcaggaccctagcactgtcacagacctggagtccattgtagtaatttgttttatttcctaccaaggtttatgaaggcgagcgtgccatgacaaaggataacaacctgcttggcaagtttgaactcacaggcatacctcctgcaccccgaggtgttcctcagattgaagtcacttttgacattgatgccaatggtatactcaatgtctctgctgtggacaagagtacgggaaaagagaacaagattactatcactaatgacaagggtaaggaggcactgtcatctggtcttgacagggataatggtatttcaattgagttactggtgcctaagggcgtctagctaagagaaactagagttacacatacacaggtaatttaaggcttttacttagagttaatttctttcctaggccgtttgagcaaggaagacattgaacgtatggtccaggaagctgagaagtacaaagctgaagatgagaagcagagggacaaggtgtcatccaagaattcacttgagtcctatgccttcaacatgaaagcaactgttgaagatgagaaacttcaaggcaagattaacgatgaggacaaacagaagattctggacaagtgtaatgaaattatcaactggcttgataagaatcaggtttgtgttttttttttttttttttcctcccccactcaatggaggggaaggggatggtaaaccaagcttgagctggatttcagtgtagggtcacaatgatgaatggtccaaaacattcgcggtttccaccagaattcaaggtgttggcaactaccttccttggatgtctgagtgacccaagatgttaaggaagaataaggccctattttaatgttggtagtggccctcttgtaagagtttgcgccagacttttagtatcagattgcgtcagggagaaagaagggttattaacattaaaagaacttgcagtaattcctttttctcttcctcagactgctgagaaggaagaatttgaacatcaacagaaagagctggagaaagtttgcaaccccatcatcaccaagctgtaccagagtgcaggaggcatgccaggaggaatgcctgggggatttcctggtggtggagctcctccctctggtggtgcttcctcagggcccaccattgaagaggttgattaagccaaccaagtgtagatgtagcattgttccacacatttaaaacatttgaaggacctaaattcgtagcaaattctgtggcagttttaaaaagttaagctgctatagtaagttactgggcattctcaatacttgaatatggaacatatgcacaggggaaggaaataacattgcactttataaacactgtattgtaagtggaaaatgcaatgtcttaaataaaactatttaaaattggcaccatacaa

SEQ ID NO: 6784 - protein, 145 aa, Homo sapiens
MSKGPAVGIDLGTTYSCVGVFQHGKVEIIANDQGNRTTPSYVAFTDTERLIGDAAKNQVAMNPTNTVFDAKRLIGRRFDDAVVQSDMKHWPFMVVNDAGRPKVQVEYKLETPTWVEKILTTEWSTILLLSLSASIRRTSVRTREL

SEQ ID NO: 6785 - DNA, 3424 bp, Homo sapiens
gcccgaggagtggagccgggcttgtgattgggtcttgtaagggcagccgggcgtctattggccggggaagccgtaatggcaggcagcaggggcgggccccttctggaaggttctaagatagggtataagaggcagggtggcgggcggaaaccggtctcattgaactcgcctgcagctcttgggttttttgtggcttccttcgttattggagccaggcctacaccccagcaaccatgtccaagggacctgcagttggtattgatcttggcaccacctactcttgtgtgggtgttttccagcacggaaaagtcgagataattgccaatgatcagggaaaccgaaccactccaagctatgtcgcctttacggacactgaacggttgatcggtgatgccgcaaagaatcaagttgcaatgaaccccaccaacacagtttttgatgccaaacgtctgattggacgcagatttgatgatgctgttgtccagtctgatatgaaacattggccctttatggtggtgaatgatgctggcaggcccaaggtccaagtagaatacaagggagagaccaaaagcttctatccagaggaggtgtcttctatggttctgacaaagatgaaggaaattgcagaagcctaccttgggaagactgttaccaatgctgtggtcacagtgccagcttactttaatgactctcagcgtcaggctaccaaagatgctggaactattgctggtctcaatgtacttagaattattaatgagccaactgctgctgctattgcttacggcttagacaaaaaggtatgtaccatttgtgatgcaagttcggattattttaagattaatttgatccatcgtaaatttaaatgagattgtttttaacggcaggttggagcagaaagaaacgtgctcatctttgacctgggaggtggcacttttgatgtgtcaatcctcactattgaggatggaatctttgaggtcaagtctacagctggagacacccacttgggtggagaagattttgacaaccgaatggtcaaccattttattgctgagtttaagcgcaagcataagaaggacatcagtgagaacaagagagctgtaagacgcctccgtactgcttgtgaacgtgctaagcgtaccctctcttccagcacccaggccagtattgagatcgattctctctatgaaggaatcgacttctatacctccattacccgtgcccgatttgaagaactgaatgctgacctgttccgtggcaccctggacccagtagagaaagcccttcgagatgccaaactagacaagtcacagattcatgatattgtcctggttggtggttctactcgtatccccaagattcagaagcttctccaagacttcttcaatggaaaagaactgaataagagcatcaaccctgatgaagctgttgcttatggtgcaggtaacaatggtatctcaattaaccctaaaggcaggcaggcccaaggtgactcgctgtgatgagtgattgttaaacattcgtagtttccaccaaaagcttggctaatgatggcaacaccttccttggatgtctgagcgagtgatagttaaaacaggagctatgtactgggttttcttttaacttcttttaacgttaactttttgtttgctagctgtccaggcagccatcttgtctggagacaagtctgagaatgttcaagatttgctgctcttggatgtcactcctctttcccttggtattgaaactgctggtggagtcatgactgtcctcatcaagcgtaataccaccattcctaccaagcagacacagaccttcactacctattctgacaaccagcctggtgtgcttattcaggtatgtttctgtacttctcttgtttggcttactgataacagataaagggaagtcttgactgactcgctatgatgatggattccaaaaccattcgtagtttccaccagaaagtcttatgttggccagttccttccttggatgtttgagcgaccattcttccttagcaggaccctagcactgtcacagacctggagtccattgtagtaatttgttttatttcctaccaaggtttatgaaggcgagcgtgccatgacaaaggataacaacctgcttggcaagtttgaactcacaggcatacctcctgcaccccgaggtgttcctcagattgaagtcacttttgacattgatgccaatggtatactcaatgtctctgctgtggacaagagtacgggaaaagagaacaagattactatcactaatgacaagggtaaggaggcactgtcatctggtcttgacagggataatggtatttcaattgagttactggtgcctaagggcgtctagctaagagaaactagagttacacatacacaggtaatttaaggcttttacttagagttaatttctttcctaggccgtttgagcaaggaagacattgaacgtatggtccaggaagctgagaagtacaaagctgaagatgagaagcagagggacaaggtgtcatccaagaattcacttgagtcctatgccttcaacatgaaagcaactgttgaagatgagaaacttcaaggcaagattaacgatgaggacaaacagaagattctggacaagtgtaatgaaattatcaactggcttgataagaatcaggtttgtgttttttttttttttttttcctcccccactcaatggaggggaaggggatggtaaaccaagcttgagctggatttcagtgtagggtcacaatgatgaatggtccaaaacattcgcggtttccaccagaattcaaggtgttggcaactaccttccttggatgtctgagtgacccaagatgttaaggaagaataaggccctattttaatgttggtagtggccctcttgtaagagtttgcgccagacttttagtatcagattgcgtcagggagaaagaagggttattaacattaaaagaacttgcagtaattcctttttctcttcctcagactgctgagaaggaagaatttgaacatcaacagaaagagctggagaaagtttgcaaccccatcatcaccaagctgtaccagagtgcaggaggcatgccaggaggaatgcctgggggatttcctggtggtggagctcctccctctggtggtgcttcctcagggcccaccattgaagaggttgattaagccaaccaagtgtagatgtagcattgttccacacatttaaaacatttgaaggacctaaattcgtagcaaattctgtggcagttttaaaaagttaagctgctatagtaagttactgggcattctcaatacttgaatatggaacatatgcacaggggaaggaaataacattgcactttataaacactgtattgtaagtggaaaatgcaatgtcttaaataaaactatttaaaattggcaccatacaa

SEQ ID NO: 6786 - protein, 210 aa, Homo sapiens
MSKGPAVGIDLGTTYSCVGVFQHGKVEIIANDQGNRTTPSYVAFTDTERLIGDAAKNQVAMNPTNTVFDAKRLIGRRFDDAVVQSDMKHWPFMVVNDAGRPKVQVEYKGETKSFYPEEVSSMVLTKMKEIAEAYLGKTVTNAVVTVPAYFNDSQRQATKDAGTIAGLNVLRIINEPTAAAIAYGLDKKVCTICDASSDYFKINLIHRKFK

SEQ ID NO: 6787 - DNA, 3144 bp, Homo sapiens
gcccgaggagtggagccgggcttgtgattgggtcttgtaagggcagccgggcgtctattggccggggaagccgtaatggcaggcagcaggggcgggccccttctggaaggttctaagatagggtataagaggcagggtggcgggcggaaaccggtctcattgaactcgcctgcagctcttgggttttttgtggcttccttcgttattggagccaggcctacaccccagcaaccatgtccaagggacctgcagttggtattgatcttggcaccacctactcttgtgtgggtgttttccagcacggaaaagtcgagataattgccaatgatcagggaaaccgaaccactccaagctatgtcgcctttacggacactgaacggttgatcggtgatgccgcaaagaatcaagttgcaatgaaccccaccaacacagtttttgatgccaaacgtctgattggacgcagatttgatgatgctgttgtccagtctgatatgaaacattggccctttatggtggtgaatgatgctggcaggcccaaggtccaagtagaatacaagggagagaccaaaagcttctatccagaggaggtgtcttctatggttctgacaaagatgaaggaaattgcagaagcctaccttgggaaggtggcacttttgatgtgtcaatcctcactattgaggatggaatctttgaggtcaagtctacagctggagacacccacttgggtggagaagattttgacaaccgaatggtcaaccattttattgctgagtttaagcgcaagcataagaaggacatcagtgagaacaagagagctgtaagacgcctccgtactgcttgtgaacgtgctaagcgtaccctctcttccagcacccaggccagtattgagatcgattctctctatgaaggaatcgacttctatacctccattacccgtgcccgatttgaagaactgaatgctgacctgttccgtggcaccctggacccagtagagaaagcccttcgagatgccaaactagacaagtcacagattcatgatattgtcctggttggtggttctactcgtatccccaagattcagaagcttctccaagacttcttcaatggaaaagaactgaataagagcatcaaccctgatgaagctgttgcttatggtgcaggtaacaatggtatctcaattaaccctaaaggcaggcaggcccaaggtgactcgctgtgatgagtgattgttaaacattcgtagtttccaccaaaagcttggctaatgatggcaacaccttccttggatgtctgagcgagtgatagttaaaacaggagctatgtactgggttttcttttaacttcttttaacgttaactttttgtttgctagctgtccaggcagccatcttgtctggagacaagtctgagaatgttcaagatttgctgctcttggatgtcactcctctttcccttggtattgaaactgctggtggagtcatgactgtcctcatcaagcgtaataccaccattcctaccaagcagacacagaccttcactacctattctgacaaccagcctggtgtgcttattcaggtatgtttctgtacttctcttgtttggcttactgataacagataaagggaagtcttgactgactcgctatgatgatggattccaaaaccattcgtagtttccaccagaaagtcttatgttggccagttccttccttggatgtttgagcgaccattcttccttagcaggaccctagcactgtcacagacctggagtccattgtagtaatttgttttatttcctaccaaggtttatgaaggcgagcgtgccatgacaaaggataacaacctgcttggcaagtttgaactcacaggcatacctcctgcaccccgaggtgttcctcagattgaagtcacttttgacattgatgccaatggtatactcaatgtctctgctgtggacaagagtacgggaaaagagaacaagattactatcactaatgacaagggtaaggaggcactgtcatctggtcttgacagggataatggtatttcaattgagttactggtgcctaagggcgtctagctaagagaaactagagttacacatacacaggtaatttaaggcttttacttagagttaatttctttcctaggccgtttgagcaaggaagacattgaacgtatggtccaggaagctgagaagtacaaagctgaagatgagaagcagagggacaaggtgtcatccaagaattcacttgagtcctatgccttcaacatgaaagcaactgttgaagatgagaaacttcaaggcaagattaacgatgaggacaaacagaagattctggacaagtgtaatgaaattatcaactggcttgataagaatcaggtttgtgttttttttttttttttttcctcccccactcaatggaggggaaggggatggtaaaccaagcttgagctggatttcagtgtagggtcacaatgatgaatggtccaaaacattcgcggtttccaccagaattcaaggtgttggcaactaccttccttggatgtctgagtgacccaagatgttaaggaagaataaggccctattttaatgttggtagtggccctcttgtaagagtttgcgccagacttttagtatcagattgcgtcagggagaaagaagggttattaacattaaaagaacttgcagtaattcctttttctcttcctcagactgctgagaaggaagaatttgaacatcaacagaaagagctggagaaagtttgcaaccccatcatcaccaagctgtaccagagtgcaggaggcatgccaggaggaatgcctgggggatttcctggtggtggagctcctccctctggtggtgcttcctcagggcccaccattgaagaggttgattaagccaaccaagtgtagatgtagcattgttccacacatttaaaacatttgaaggacctaaattcgtagcaaattctgtggcagttttaaaaagttaagctgctatagtaagttactgggcattctcaatacttgaatatggaacatatgcacaggggaaggaaataacattgcactttataaacactgtattgtaagtggaaaatgcaatgtcttaaataaaactatttaaaattggcaccatacaa

SEQ ID NO: 6788 - protein, 195 aa, Homo sapiens
MSKGPAVGIDLGTTYSCVGVFQHGKVEIIANDQGNRTTPSYVAFTDTERLIGDAAKNQVAMNPTNTVFDAKRLIGRRFDDAVVQSDMKHWPFMVVNDAGRPKVQVEYKGETKSFYPEEVSSMVLTKMKEIAEAYLGKVALLMCQSSLLRMESLRSSLQLETPTWVEKILTTEWSTILLLSLSASIRRTSVRTREL

SEQ ID NO: 6789 - DNA, 3283 bp, Homo sapiens
gcccgaggagtggagccgggcttgtgattgggtcttgtaagggcagccgggcgtctattggccggggaagccgtaatggcaggcagcaggggcgggccccttctggaaggttctaagatagggtataagaggcagggtggcgggcggaaaccggtctcattgaactcgcctgcagctcttgggttttttgtggcttccttcgttattggagccaggcctacaccccagcaaccatgtccaagggacctgcagttggtattgatcttggcaccacctactcttgtgtgggtgttttccagcacggaaaagtcgagataattgccaatgatcagggaaaccgaaccactccaagctatgtcgcctttacggacactgaacggttgatcggtgatgccgcaaagaatcaagttgcaatgaaccccaccaacacagtttttgatgccaaacgtctgattggacgcagatttgatgatgctgttgtccagtctgatatgaaacattggccctttatggtggtgaatgatgctggcaggcccaaggtccaagtagaatacaagggagagaccaaaagcttctatccagaggaggtgtcttctatggttctgacaaagatgaaggaaattgcagaagcctaccttgggaagactgttaccaatgctgtggtcacagtgccagcttactttaatgactctcagcgtcaggctaccaaagatgctggaactattgctggtctcaatgtacttagaattattaatgagccaactgctgctgctattgcttacggcttagattttgatgtgtcaatcctcactattgaggatggaatctttgaggtcaagtctacagctggagacacccacttgggtggagaagattttgacaaccgaatggtcaaccattttattgctgagtttaagcgcaagcataagaaggacatcagtgagaacaagagagctgtaagacgcctccgtactgcttgtgaacgtgctaagcgtaccctctcttccagcacccaggccagtattgagatcgattctctctatgaaggaatcgacttctatacctccattacccgtgcccgatttgaagaactgaatgctgacctgttccgtggcaccctggacccagtagagaaagcccttcgagatgccaaactagacaagtcacagattcatgatattgtcctggttggtggttctactcgtatccccaagattcagaagcttctccaagacttcttcaatggaaaagaactgaataagagcatcaaccctgatgaagctgttgcttatggtgcaggtaacaatggtatctcaattaaccctaaaggcaggcaggcccaaggtgactcgctgtgatgagtgattgttaaacattcgtagtttccaccaaaagcttggctaatgatggcaacaccttccttggatgtctgagcgagtgatagttaaaacaggagctatgtactgggttttcttttaacttcttttaacgttaactttttgtttgctagctgtccaggcagccatcttgtctggagacaagtctgagaatgttcaagatttgctgctcttggatgtcactcctctttcccttggtattgaaactgctggtggagtcatgactgtcctcatcaagcgtaataccaccattcctaccaagcagacacagaccttcactacctattctgacaaccagcctggtgtgcttattcaggtatgtttctgtacttctcttgtttggcttactgataacagataaagggaagtcttgactgactcgctatgatgatggattccaaaaccattcgtagtttccaccagaaagtcttatgttggccagttccttccttggatgtttgagcgaccattcttccttagcaggaccctagcactgtcacagacctggagtccattgtagtaatttgttttatttcctaccaaggtttatgaaggcgagcgtgccatgacaaaggataacaacctgcttggcaagtttgaactcacaggcatacctcctgcaccccgaggtgttcctcagattgaagtcacttttgacattgatgccaatggtatactcaatgtctctgctgtggacaagagtacgggaaaagagaacaagattactatcactaatgacaagggtaaggaggcactgtcatctggtcttgacagggataatggtatttcaattgagttactggtgcctaagggcgtctagctaagagaaactagagttacacatacacaggtaatttaaggcttttacttagagttaatttctttcctaggccgtttgagcaaggaagacattgaacgtatggtccaggaagctgagaagtacaaagctgaagatgagaagcagagggacaaggtgtcatccaagaattcacttgagtcctatgccttcaacatgaaagcaactgttgaagatgagaaacttcaaggcaagattaacgatgaggacaaacagaagattctggacaagtgtaatgaaattatcaactggcttgataagaatcaggtttgtgttttttttttttttttttcctcccccactcaatggaggggaaggggatggtaaaccaagcttgagctggatttcagtgtagggtcacaatgatgaatggtccaaaacattcgcggtttccaccagaattcaaggtgttggcaactaccttccttggatgtctgagtgacccaagatgttaaggaagaataaggccctattttaatgttggtagtggccctcttgtaagagtttgcgccagacttttagtatcagattgcgtcagggagaaagaagggttattaacattaaaagaacttgcagtaattcctttttctcttcctcagactgctgagaaggaagaatttgaacatcaacagaaagagctggagaaagtttgcaaccccatcatcaccaagctgtaccagagtgcaggaggcatgccaggaggaatgcctgggggatttcctggtggtggagctcctccctctggtggtgcttcctcagggcccaccattgaagaggttgattaagccaaccaagtgtagatgtagcattgttccacacatttaaaacatttgaaggacctaaattcgtagcaaattctgtggcagttttaaaaagttaagctgctatagtaagttactgggcattctcaatacttgaatatggaacatatgcacaggggaaggaaataacattgcactttataaacactgtattgtaagtggaaaatgcaatgtcttaaataaaactatttaaaattggcaccatacaa

SEQ ID NO: 6790 - protein, 374 aa, Homo sapiens
MSKGPAVGIDLGTTYSCVGVFQHGKVEIIANDQGNRTTPSYVAFTDTERLIGDAAKNQVAMNPTNTVFDAKRLIGRRFDDAVVQSDMKHWPFMVVNDAGRPKVQVEYKGETKSFYPEEVSSMVLTKMKEIAEAYLGKTVTNAVVTVPAYFNDSQRQATKDAGTIAGLNVLRIINEPTAAAIAYGLDFDVSILTIEDGIFEVKSTAGDTHLGGEDFDNRMVNHFIAEFKRKHKKDISENKRAVRRLRTACERAKRTLSSSTQASIEIDSLYEGIDFYTSITRARFEELNADLFRGTLDPVEKALRDAKLDKSQIHDIVLVGGSTRIPKIQKLLQDFFNGKELNKSINPDEAVAYGAGNNGISINPKGRQAQGDSL

SEQ ID NO: 6791 - DNA, 1960 bp, Homo sapiens
gcccgaggagtggagccgggcttgtgattgggtcttgtaagggcagccgggcgtctattggccggggaagccgtaatggcaggcagcaggggcgggccccttctggaaggttctaagatagggtataagaggcagggtggcgggcggaaaccggtctcattgaactcgcctgcagctcttgggttttttgtggcttccttcgttattggagccaggcctacaccccagcaaccatgtccaagggacctgcagttggtattgatcttggcaccacctactcttgtgtgggtgttttccagcacggaaaagtcgagataattgccaatgatcagggaaaccgaaccactccaagctatgtcgcctttacggacactgaacggttgatcggtgatgccgcaaagaatcaagttgcaatgaaccccaccaacacagtttttgatgccaaacgtctgattggacgcagatttgatgatgctgttgtccagtctgatatgaaacattggccctttatggtggtgaatgatgctggcaggcccaaggtccaagtagaatacaagggagagaccaaaagcttctatccagaggaggtgtcttctatggttctgacaaagatgaaggaaattgcagaagcctaccttgggaagactgttaccaatgctgtggtcacagtgccagcttactttaatgactctcagcgtcaggctaccaaagatgctggaactattgctggtctcaatgtacttagaattattaatgagccaactgctgctgctattgcttacggcttagacaaaaaggttggagcagaaagaaacgtgctcatctttgacctgggaggtggcacttttgatgtgtcaatcctcactattgaggatggaatctttgaggtcaagtctacagctggagacacccacttgggtggagaagattttgacaaccgaatggtcaaccattttattgctgagtttaagcgcaagcataagaaggacatcagtgagaacaagagagctgtaagacgcctccgtactgcttgtgaacgtgctaagcgtaccctctcttccagcacccaggccagtattgagatcgattctctctatgaaggaatcgacttctatacctccattacccgtgcccgatttgaagaactgaatgctgacctgttccgtggcaccctggacccagtagagaaagcccttcgagatgccaaactagacaagtcacagattcatgatattgtcctggttggtggttctactcgtatccccaagattcagaagcttctccaagacttcttcaatggaaaagaactgaataagagcatcaaccctgatgaagctgttgcttatggtgcagctgtccaggcagccatcttgtctggagacaagtctgagaatgttcaagatttgctgctcttggatgtcactcctctttcccttggtattgaaactgctggtggagtcatgactgtcctcatcaagcgtaataccaccattcctaccaagcagacacagaccttcactacctattctgacaaccagcctggtgtgcttattcaggtttatgaaggcgagcgtgccatgacaaaggataacaacctgcttggcaagtttgaactcacaggcatgccaggaggaatgcctgggggatttcctggtggtggagctcctccctctggtggtgcttcctcagggcccaccattgaagaggttgattaagccaaccaagtgtagatgtagcattgttccacacatttaaaacatttgaaggacctaaattcgtagcaaattctgtggcagttttaaaaagttaagctgctatagtaagttactgggcattctcaatacttgaatatggaacatatgcacaggggaaggaaataacattgcactttataaacactgtattgtaagtggaaaatgcaatgtcttaaataaaactatttaaaattggcaccatacaa

SEQ ID NO: 6792 - protein, 493 aa, Homo sapiens; identical to SEQ ID NO: 922

SEQ ID NO: 6793 - DNA, 2419 bp, Homo sapiens
gcccgaggagtggagccgggcttgtgattgggtcttgtaagggcagccgggcgtctattggccggggaagccgtaatggcaggcagcaggggcgggccccttctggaaggttctaagatagggtataagaggcagggtggcgggcggaaaccggtctcattgaactcgcctgcagctcttgggttttttgtggcttccttcgttattggagccaggcctacaccccagcaaccatgtccaagggacctgcagttggtattgatcttggcaccacctactcttgtgtgggtgttttccagcacggaaaagtcgagataattgccaatgatcagggaaaccgaaccactccaagctatgtcgcctttacggacactgaacggttgatcggtgatgccgcaaagaatcaagttgcaatgaaccccaccaacacagtttttgatgccaaacgtctgattggacgcagatttgatgatgctgttgtccagtctgatatgaaacattggccctttatggtggtgaatgatgctggcaggcccaaggtccaagtagaatacaagggagagaccaaaagcttctatccagaggaggtgtcttctatggttctgacaaagatgaaggaaattgcagaagcctaccttgggaagactgttaccaatgctgtggtcacagtgccagcttactttaatgactctcagcgtcaggctaccaaagatgctggaactattgctggtctcaatgtacttagaattattaatgagccaactgctgctgctattgcttacggcttagacaaaaaggttggagcagaaagaaacgtgctcatctttgacctgggaggtggcacttttgatgtgtcaatcctcactattgaggatggaatctttgaggtcaagtctacagctggagacacccacttgggtggagaagattttgacaaccgaatggtcaaccattttattgctgagtttaagcgcaagcataagaaggacatcagtgagaacaagagagctgtaagacgcctccgtactgcttgtgaacgtgctaagcgtaccctctcttccagcacccaggccagtattgagatcgattctctctatgaaggaatcgacttctatacctccattacccgtgcccgatttgaagaactgaatgctgacctgttccgtggcaccctggacccagtagagaaagcccttcgagatgccaaactagacaagtcacagattcatgatattgtcctggttggtggttctactcgtatccccaagattcagaagcttctccaagacttcttcaatggaaaagaactgaataagagcatcaaccctgatgaagctgttgcttatggtgcagctgtccaggcagccatcttgtctggagacaagtctgagaatgttcaagatttgctgctcttggatgtcactcctctttcccttggtattgaaactgctggtggagtcatgactgtcctcatcaagcgtaataccaccattcctaccaagcagacacagaccttcactacctattctgacaaccagcctggtgtgcttattcaggtttatgaaggcgagcgtgccatgacaaaggataacaacctgcttggcaagtttgaactcacaggcatacctcctgcaccccgaggtgttcctcagattgaagtcacttttgacattgatgccaatggtatactcaatgtctctgctgtggacaagagtacgggaaaagagaacaagattactatcactaatgacaagggccgtttgagcaaggaagacattgaacgtatggtccaggaagctgagaagtacaaagctgaagatgagaagcagagggacaaggtgtcatccaagaattcacttgagtcctatgccttcaacatgaaagcaactgttgaagatgagaaacttcaaggcaagattaacgatgaggacaaacagaagattctggacaagtgtaatgaaattatcaactggcttgataagaatcagactgctgagaaggaagaatttgaacatcaacagaaagagctggagaaagtttgcaaccccatcatcaccaagctgtaccagagtgcaggaggcatgccaggaggaatgcctgggggatttcctggtggtggagctcctccctctggtggtgcttcctcagggcccaccattgaagaggttgattaagccaaccaagtgtagatgtagcattgttccacacatttaaaacatttgaaggacctaaattcgtagcaaattctgtggcagttttaaaaagttaagctgctatagtaagttactgggcattctcaatacttgaatatggaacatatgcacaggggaaggaaataacattgcactttataaacactgtattgtaagtggaaaatgcaatgtcttaaataaaactatttaaaattggcaccatacaa

SEQ ID NO: 6794 - protein, 646 aa, Homo sapiens; identical to SEQ ID NO: 920

SEQ ID NO: 6795 - DNA, 1253 bp, Homo sapiens
ctaaaggcaggcaggcccaaggtgactcgctgtgatgagtgattgttaaacattcgtagtttccaccaaaagcttggctaatgatggcaacaccttccttggatgtctgagcgagtgatagttaaaacaggagctatgtactgggttttcttttaacttcttttaacgttaactttttgtttgctagctgtccaggcagccatcttgtctggagacaagtctgagaatgttcaagatttgctgctcttggatgtcactcctctttcccttggtattgaaactgctggtggagtcatgactgtcctcatcaagcgtaataccaccattcctaccaagcagacacagaccttcactacctattctgacaaccagcctggtgtgcttattcaggtttatgaaggcgagcgtgccatgacaaaggataacaacctgcttggcaagtttgaactcacaggcatacctcctgcaccccgaggtgttcctcagattgaagtcacttttgacattgatgccaatggtatactcaatgtctctgctgtggacaagagtacgggaaaagagaacaagattactatcactaatgacaagggccgtttgagcaaggaagacattgaacgtatggtccaggaagctgagaagtacaaagctgaagatgagaagcagagggacaaggtgtcatccaagaattcacttgagtcctatgccttcaacatgaaagcaactgttgaagatgagaaacttcaaggcaagattaacgatgaggacaaacagaagattctggacaagtgtaatgaaattatcaactggcttgataagaatcagactgctgagaaggaagaatttgaacatcaacagaaagagctggagaaagtttgcaaccccatcatcaccaagctgtaccagagtgcaggaggcatgccaggaggaatgcctgggggatttcctggtggtggagctcctccctctggtggtgcttcctcagggcccaccattgaagaggttgattaagccaaccaagtgtagatgtagcattgttccacacatttaaaacatttgaaggacctaaattcgtagcaaattctgtggcagttttaaaaagttaagctgctatagtaagttactgggcattctcaatacttgaatatggaacatatgcacaggggaaggaaataacattgcactttataaacactgtattgtaagtggaaaatgcaatgtcttaaataaaactatttaaaattggcaccatacaa

SEQ ID NO: 6796 - protein, 237 aa, Homo sapiens
MTVLIKRNTTIPTKQTQTFTTYSDNQPGVLIQVYEGERAMTKDNNLLGKFELTGIPPAPRGVPQIEVTFDIDANGILNVSAVDKSTGKENKITITNDKGRLSKEDIERMVQEAEKYKAEDEKQRDKVSSKNSLESYAFNMKATVEDEKLQGKINDEDKQKILDKCNEIINWLDKNQTAEKEEFEHQQKELEKVCNPIITKLYQSAGGMPGGMPGGFPGGGAPPSGGASSGPTIEEVD

SEQ ID NO: 6797 - DNA, 2049 bp, Homo sapiens
aggttggagcagaaagaaacgtgctcatctttgacctgggaggtggcacttttgatgtgtcaatcctcactattgaggatggaatctttgaggtcaagtctacagctggagacacccacttgggtggagaagattttgacaaccgaatggtcaaccattttattgctgagtttaagcgcaagcataagaaggacatcagtgagaacaagagagctgtaagacgcctccgtactgcttgtgaacgtgctaagcgtaccctctcttccagcacccaggccagtattgagatcgattctctctatgaaggaatcgacttctatacctccattacccgtgcccgatttgaagaactgaatgctgacctgttccgtggcaccctggacccagtagagaaagcccttcgagatgccaaactagacaagtcacagattcatgatattgtcctggttggtggttctactcgtatccccaagattcagaagcttctccaagacttcttcaatgctgtccaggcagccatcttgtctggagacaagtctgagaatgttcaagatttgctgctcttggatgtcactcctctttcccttggtattgaaactgctggtggagtcatgactgtcctcatcaagcgtaataccaccattcctaccaagcagacacagaccttcactacctattctgacaaccagcctggtgtgcttattcaggtttatgaaggcgagcgtgccatgacaaaggataacaacctgcttggcaagtttgaactcacaggcatacctcctgcaccccgaggtgttcctcagattgaagtcacttttgacattgatgccaatggtatactcaatgtctctgctgtggacaagagtacgggaaaagagaacaagattactatcactaatgacaagggtaaggaggcactgtcatctggtcttgacagggataatggtatttcaattgagttactggtgcctaagggcgtctagctaagagaaactagagttacacatacacaggtaatttaaggcttttacttagagttaatttctttcctaggccgtttgagcaaggaagacattgaacgtatggtccaggaagctgagaagtacaaagctgaagatgagaagcagagggacaaggtgtcatccaagaattcacttgagtcctatgccttcaacatgaaagcaactgttgaagatgagaaacttcaaggcaagattaacgatgaggacaaacagaagattctggacaagtgtaatgaaattatcaactggcttgataagaatcaggtttgtgttttttttttttttttttcctcccccactcaatggaggggaaggggatggtaaaccaagcttgagctggatttcagtgtagggtcacaatgatgaatggtccaaaacattcgcggtttccaccagaattcaaggtgttggcaactaccttccttggatgtctgagtgacccaagatgttaaggaagaataaggccctattttaatgttggtagtggccctcttgtaagagtttgcgccagacttttagtatcagattgcgtcagggagaaagaagggttattaacattaaaagaacttgcagtaattcctttttctcttcctcagactgctgagaaggaagaatttgaacatcaacagaaagagctggagaaagtttgcaaccccatcatcaccaagctgtaccagagtgcaggaggcatgccaggaggaatgcctgggggatttcctggtggtggagctcctccctctggtggtgcttcctcagggcccaccattgaagaggttgattaagccaaccaagtgtagatgtagcattgttccacacatttaaaacatttgaaggacctaaattcgtagcaaattctgtggcagttttaaaaagttaagctgctatagtaagttactgggcattctcaatacttgaatatggaacatatgcacaggggaaggaaataacattgcactttataaacactgtattgtaagtggaaaatgcaatgtcttaaataaaactatttaaaattggcaccatacaa

SEQ ID NO: 6798 - protein, 278 aa, Homo sapiens
MVNHFIAEFKRKHKKDISENKRAVRRLRTACERAKRTLSSSTQASIEIDSLYEGIDFYTSITRARFEELNADLFRGTLDPVEKALRDAKLDKSQIHDIVLVGGSTRIPKIQKLLQDFFNAVQAAILSGDKSENVQDLLLLDVTPLSLGIETAGGVMTVLIKRNTTIPTKQTQTFTTYSDNQPGVLIQVYEGERAMTKDNNLLGKFELTGIPPAPRGVPQIEVTFDIDANGILNVSAVDKSTGKENKITITNDKGKEALSSGLDRDNGISIELLVPKGV

SEQ ID NO: 6799 - DNA, 2277 bp, Homo sapiens
aggttggagcagaaagaaacgtgctcatctttgacctgggaggtggcacttttgatgtgtcaatcctcactattgaggatggaatctttgaggtcaagtctacagctggagacacccacttgggtggagaagattttgacaaccgaatggtcaaccattttattgctgagtttaagcgcaagcataagaaggacatcagtgagaacaagagagctgtaagacgcctccgtactgcttgtgaacgtgctaagcgtaccctctcttccagcacccaggccagtattgagatcgattctctctatgaaggaatcgacttctatacctccattacccgtgcccgatttgaagaactgaatgctgacctgttccgtggcaccctggacccagtagagaaagcccttcgagatgccaaactagacaagtcacagattcatgatattgtcctggttggtggttctactcgtatccccaagattcagaagcttctccaagacttcttcaatgctgtccaggcagccatcttgtctggagacaagtctgagaatgttcaagatttgctgctcttggatgtcactcctctttcccttggtattgaaactgctggtggagtcatgactgtcctcatcaagcgtaataccaccattcctaccaagcagacacagaccttcactacctattctgacaaccagcctggtgtgcttattcaggtatgtttctgtacttctcttgtttggcttactgataacagataaagggaagtcttgactgactcgctatgatgatggattccaaaaccattcgtagtttccaccagaaagtcttatgttggccagttccttccttggatgtttgagcgaccattcttccttagcaggaccctagcactgtcacagacctggagtccattgtagtaatttgttttatttcctaccaaggtttatgaaggcgagcgtgccatgacaaaggataacaacctgcttggcaagtttgaactcacaggcatacctcctgcaccccgaggtgttcctcagattgaagtcacttttgacattgatgccaatggtatactcaatgtctctgctgtggacaagagtacgggaaaagagaacaagattactatcactaatgacaagggtaaggaggcactgtcatctggtcttgacagggataatggtatttcaattgagttactggtgcctaagggcgtctagctaagagaaactagagttacacatacacaggtaatttaaggcttttacttagagttaatttctttcctaggccgtttgagcaaggaagacattgaacgtatggtccaggaagctgagaagtacaaagctgaagatgagaagcagagggacaaggtgtcatccaagaattcacttgagtcctatgccttcaacatgaaagcaactgttgaagatgagaaacttcaaggcaagattaacgatgaggacaaacagaagattctggacaagtgtaatgaaattatcaactggcttgataagaatcaggtttgtgttttttttttttttttttcctcccccactcaatggaggggaaggggatggtaaaccaagcttgagctggatttcagtgtagggtcacaatgatgaatggtccaaaacattcgcggtttccaccagaattcaaggtgttggcaactaccttccttggatgtctgagtgacccaagatgttaaggaagaataaggccctattttaatgttggtagtggccctcttgtaagagtttgcgccagacttttagtatcagattgcgtcagggagaaagaagggttattaacattaaaagaacttgcagtaattcctttttctcttcctcagactgctgagaaggaagaatttgaacatcaacagaaagagctggagaaagtttgcaaccccatcatcaccaagctgtaccagagtgcaggaggcatgccaggaggaatgcctgggggatttcctggtggtggagctcctccctctggtggtgcttcctcagggcccaccattgaagaggttgattaagccaaccaagtgtagatgtagcattgttccacacatttaaaacatttgaaggacctaaattcgtagcaaattctgtggcagttttaaaaagttaagctgctatagtaagttactgggcattctcaatacttgaatatggaacatatgcacaggggaaggaaataacattgcactttataaacactgtattgtaagtggaaaatgcaatgtcttaaataaaactatttaaaattggcaccatacaa

SEQ ID NO: 6800 - protein, 201 aa, Homo sapiens
MVNHFIAEFKRKHKKDISENKRAVRRLRTACERAKRTLSSSTQASIEIDSLYEGIDFYTSITRARFEELNADLFRGTLDPVEKALRDAKLDKSQIHDIVLVGGSTRIPKIQKLLQDFFNAVQAAILSGDKSENVQDLLLLDVTPLSLGIETAGGVMTVLIKRNTTIPTKQTQTFTTYSDNQPGVLIQVCFCTSLVWLTDNR

SEQ ID NO: 6801 - DNA, 2823 bp, Homo sapiens
cagatttgatgatgctgttgtccagtctgatatgaaacattggccctttatggtggtgaatgatgctggcaggcccaaggtccaagtagaatacaagggagagaccaaaagcttctatccagaggaggtgtcttctatggttctgacaaagatgaaggaaattgcagaagcctaccttgggaagactgttaccaatgctgtggtcacagtgccagcttactttaatgactctcagcgtcaggctaccaaagatgctggaactattgctggtctcaatgtacttagaattattaatgagccaactgctgctgctattgcttacggcttagattttgatgtgtcaatcctcactattgaggatggaatctttgaggtcaagtctacagctggagacacccacttgggtggagaagattttgacaaccgaatggtcaaccattttattgctgagtttaagcgcaagcataagaaggacatcagtgagaacaagagagctgtaagacgcctccgtactgcttgtgaacgtgctaagcgtaccctctcttccagcacccaggccagtattgagatcgattctctctatgaaggaatcgacttctatacctccattacccgtgcccgatttgaagaactgaatgctgacctgttccgtggcaccctggacccagtagagaaagcccttcgagatgccaaactagacaagtcacagattcatgatattgtcctggttggtggttctactcgtatccccaagattcagaagcttctccaagacttcttcaatggaaaagaactgaataagagcatcaaccctgatgaagctgttgcttatggtgcaggtaacaatggtatctcaattaaccctaaaggcaggcaggcccaaggtgactcgctgtgatgagtgattgttaaacattcgtagtttccaccaaaagcttggctaatgatggcaacaccttccttggatgtctgagcgagtgatagttaaaacaggagctatgtactgggttttcttttaacttcttttaacgttaactttttgtttgctagctgtccaggcagccatcttgtctggagacaagtctgagaatgttcaagatttgctgctcttggatgtcactcctctttcccttggtattgaaactgctggtggagtcatgactgtcctcatcaagcgtaataccaccattcctaccaagcagacacagaccttcactacctattctgacaaccagcctggtgtgcttattcaggtatgtttctgtacttctcttgtttggcttactgataacagataaagggaagtcttgactgactcgctatgatgatggattccaaaaccattcgtagtttccaccagaaagtcttatgttggccagttccttccttggatgtttgagcgaccattcttccttagcaggaccctagcactgtcacagacctggagtccattgtagtaatttgttttatttcctaccaaggtttatgaaggcgagcgtgccatgacaaaggataacaacctgcttggcaagtttgaactcacaggcatacctcctgcaccccgaggtgttcctcagattgaagtcacttttgacattgatgccaatggtatactcaatgtctctgctgtggacaagagtacgggaaaagagaacaagattactatcactaatgacaagggtaaggaggcactgtcatctggtcttgacagggataatggtatttcaattgagttactggtgcctaagggcgtctagctaagagaaactagagttacacatacacaggtaatttaaggcttttacttagagttaatttctttcctaggccgtttgagcaaggaagacattgaacgtatggtccaggaagctgagaagtacaaagctgaagatgagaagcagagggacaaggtgtcatccaagaattcacttgagtcctatgccttcaacatgaaagcaactgttgaagatgagaaacttcaaggcaagattaacgatgaggacaaacagaagattctggacaagtgtaatgaaattatcaactggcttgataagaatcaggtttgtgttttttttttttttttttcctcccccactcaatggaggggaaggggatggtaaaccaagcttgagctggatttcagtgtagggtcacaatgatgaatggtccaaaacattcgcggtttccaccagaattcaaggtgttggcaactaccttccttggatgtctgagtgacccaagatgttaaggaagaataaggccctattttaatgttggtagtggccctcttgtaagagtttgcgccagacttttagtatcagattgcgtcagggagaaagaagggttattaacattaaaagaacttgcagtaattcctttttctcttcctcagactgctgagaaggaagaatttgaacatcaacagaaagagctggagaaagtttgcaaccccatcatcaccaagctgtaccagagtgcaggaggcatgccaggaggaatgcctgggggatttcctggtggtggagctcctccctctggtggtgcttcctcagggcccaccattgaagaggttgattaagccaaccaagtgtagatgtagcattgttccacacatttaaaacatttgaaggacctaaattcgtagcaaattctgtggcagttttaaaaagttaagctgctatagtaagttactgggcattctcaatacttgaatatggaacatatgcacaggggaaggaaataacattgcactttataaacactgtattgtaagtggaaaatgcaatgtcttaaataaaactatttaaaattggcaccatacaa

SEQ ID NO: 6802 - protein, 288 aa, Homo sapiens
MKHWPFMVVNDAGRPKVQVEYKGETKSFYPEEVSSMVLTKMKEIAEAYLGKTVTNAVVTVPAYFNDSQRQATKDAGTIAGLNVLRIINEPTAAAIAYGLDFDVSILTIEDGIFEVKSTAGDTHLGGEDFDNRMVNHFIAEFKRKHKKDISENKRAVRRLRTACERAKRTLSSSTQASIEIDSLYEGIDFYTSITRARFEELNADLFRGTLDPVEKALRDAKLDKSQIHDIVLVGGSTRIPKIQKLLQDFFNGKELNKSINPDEAVAYGAGNNGISINPKGRQAQGDSL

SEQ ID NO: 6803 - DNA, 2190 bp, Homo sapiens
tctcattgaactcgcctgcagctcttgggttttttgtggcttccttcgttattggagccaggcctacaccccagcaaccatgtccaagggacctgcagttggtattgatcttggcaccacctactcttgtgtgggtgttttccagcacggaaaagtcgagataattgccaatgatcagggaaaccgaaccactccaagctatgtcgcctttacggacactgaacggttgatcggtgatgccgcaaagaatcaagttgcaatgaaccccaccaacacagtttttgtggtgaatgatgctggcaggcccaaggtccaagtagaatacaagggagagaccaaaagcttctatccagaggaggtgtcttctatggttctgacaaagatgaaggaaattgcagaagcctaccttgggaagactgttaccaatgctgtggtcacagtgccagcttactttaatgactctcagcgtcaggctaccaaagatgctggaactattgctggtctcaatgtacttagaattattaatgagccaactgctgctgctattgcttacggcttagacaaaaaggttggagcagaaagaaacgtgctcatctttgacctgggaggtggcacttttgatgtgtcaatcctcactattgaggatggaatctttgaggtcaagtctacagctggagacacccacttgggtggagaagattttgacaaccgaatggtcaaccattttattgctgagtttaagcgcaagcataagaaggacatcagtgagaacaagagagctgtaagacgcctccgtactgcttgtgaacgtgctaagcgtaccctctcttccagcacccaggccagtattgagatcgattctctctatgaaggaatcgacttctatacctccattacccgtgcccgatttgaagaactgaatgctgacctgttccgtggcaccctggacccagtagagaaagcccttcgagatgccaaactagacaagtcacagattcatgatattgtcctggttggtggttctactcgtatccccaagattcagaagcttctccaagacttcttcaatggaaaagaactgaataagagcatcaaccctgatgaagctgttgcttatggtgcagctgtccaggcagccatcttgtctggagacaagtctgagaatgttcaagatttgctgctcttggatgtcactcctctttcccttggtattgaaactgctggtggagtcatgactgtcctcatcaagcgtaataccaccattcctaccaagcagacacagaccttcactacctattctgacaaccagcctggtgtgcttattcaggtttatgaaggcgagcgtgccatgacaaaggataacaacctgcttggcaagtttgaactcacaggcatacctcctgcaccccgaggtgttcctcagattgaagtcacttttgacattgatgccaatggtatactcaatgtctctgctgtggacaagagtacgggaaaagagaacaagattactatcactaatgacaagggccgtttgagcaaggaagacattgaacgtatggtccaggaagctgagaagtacaaagctgaagatgagaagcagagggacaaggtgtcatccaagaattcacttgagtcctatgccttcaacatgaaagcaactgttgaagatgagaaacttcaaggcaagattaacgatgaggacaaacagaagattctggacaagtgtaatgaaattatcaactggcttgataagaatcagactgctgagaaggaagaatttgaacatcaacagaaagagctggagaaagtttgcaaccccatcatcaccaagctgtaccagagtgcaggaggcatgccaggaggaatgcctgggggatttcctggtggtggagctcctccctctggtggtgcttcctcagggcccaccattgaagaggttgattaagccaaccaagtgtagatgtagcattgttccacacatttaaaacatttgaaggacctaaattcgtagcaaattctgtggcagttttaaaaagttaagctgctatagtaagttactgggcattctcaatacttgaatatggaacatatgcacaggggaaggaaataacattgcactttataaacactgtattgtaagtggaaaatgcaatgtcttaaataaaactatttaaaattggcaccatacaa

SEQ ID NO: 6804 - protein, 621 aa, Homo sapiens
MSKGPAVGIDLGTTYSCVGVFQHGKVEIIANDQGNRTTPSYVAFTDTERLIGDAAKNQVAMNPTNTVFVVNDAGRPKVQVEYKGETKSFYPEEVSSMVLTKMKEIAEAYLGKTVTNAVVTVPAYFNDSQRQATKDAGTIAGLNVLRIINEPTAAAIAYGLDKKVGAERNVLIFDLGGGTFDVSILTIEDGIFEVKSTAGDTHLGGEDFDNRMVNHFIAEFKRKHKKDISENKRAVRRLRTACERAKRTLSSSTQASIEIDSLYEGIDFYTSITRARFEELNADLFRGTLDPVEKALRDAKLDKSQIHDIVLVGGSTRIPKIQKLLQDFFNGKELNKSINPDEAVAYGAAVQAAILSGDKSENVQDLLLLDVTPLSLGIETAGGVMTVLIKRNTTIPTKQTQTFTTYSDNQPGVLIQVYEGERAMTKDNNLLGKFELTGIPPAPRGVPQIEVTFDIDANGILNVSAVDKSTGKENKITITNDKGRLSKEDIERMVQEAEKYKAEDEKQRDKVSSKNSLESYAFNMKATVEDEKLQGKINDEDKQKILDKCNEIINWLDKNQTAEKEEFEHQQKELEKVCNPIITKLYQSAGGMPGGMPGGFPGGGAPPSGGASSGPTIEEVD

SEQ ID NO: 6805 - DNA, 1105 bp, Homo sapiens
ggtctcattgaactcgcctgcagctcttgggttttttgtggcttccttcgttattggagccaggcctacaccccagcaaccatgtccaagggacctgcagttggtattgatcttggcaccacctactcttgtgtgggtgttttccagcacggaaaagtcgagataattgccaatgatcagggaaaccgaaccactccaagctataattcacttgagtcctatgccttcaacatgaaagcaactgttgaagatgagaaacttcaaggcaagattaacgatgaggacaaacagaagattctggacaagtgtaatgaaattatcaactggcttgataagaatcaggtttgtgttttttttttttttttttcctcccccactcaatggaggggaaggggatggtaaaccaagcttgagctggatttcagtgtagggtcacaatgatgaatggtccaaaacattcgcggtttccaccagaattcaaggtgttggcaactaccttccttggatgtctgagtgacccaagatgttaaggaagaataaggccctattttaatgttggtagtggccctcttgtaagagtttgcgccagacttttagtatcagattgcgtcagggagaaagaagggttattaacattaaaagaacttgcagtaattcctttttctcttcctcagactgctgagaaggaagaatttgaacatcaacagaaagagctggagaaagtttgcaaccccatcatcaccaagctgtaccagagtgcaggaggcatgccaggaggaatgcctgggggatttcctggtggtggagctcctccctctggtggtgcttcctcagggcccaccattgaagaggttgattaagccaaccaagtgtagatgtagcattgttccacacatttaaaacatttgaaggacctaaattcgtagcaaattctgtggcagttttaaaaagttaagctgctatagtaagttactgggcattctcaatacttgaatatggaacatatgcacaggggaaggaaataacattgcactttataaacactgtattgtaagtggaaaatgcaatgtcttaaataaaactatttaaaattggcaccatacaa

SEQ ID NO: 6806 - protein, 106 aa, Homo sapiens
MSKGPAVGIDLGTTYSCVGVFQHGKVEIIANDQGNRTTPSYNSLESYAFNMKATVEDEKLQGKINDEDKQKILDKCNEIINWLDKNQVCVFFFFFSSPTQWRGRGW

SEQ ID NO: 6807 - DNA, 1769 bp, Homo sapiens
ccggtctcattgaactcgcctgcagctcttgggttttttgtggcttccttcgttattggagccaggcctacaccccagcaaccatgtccaagggacctgcagttggtattgatcttggcaccacctactcttgtgtgggtgttttccagcacggaaaagtcgagataattgccaatgatcagggaaaccgaaccactccaagctatgtcgcctttacggacactgaacggttgatcggtgatgccgcaaagaatcaagttgcaatgaaccccaccaacacagtttttgatgccaaacgtctgattggacgcagatttgatgatgctgttgtccagtctgatatgaaacattggccctttatggtggtgaatgatgctggcagaccttcactacctattctgacaaccagcctggtgtgcttattcaggtttatgaaggcgagcgtgccatgacaaaggataacaacctgcttggcaagtttgaactcacaggcatacctcctgcaccccgaggtgttcctcagattgaagtcacttttgacattgatgccaatggtatactcaatgtctctgctgtggacaagagtacgggaaaagagaacaagattactatcactaatgacaagggtaaggaggcactgtcatctggtcttgacagggataatggtatttcaattgagttactggtgcctaagggcgtctagctaagagaaactagagttacacatacacaggtaatttaaggcttttacttagagttaatttctttcctaggccgtttgagcaaggaagacattgaacgtatggtccaggaagctgagaagtacaaagctgaagatgagaagcagagggacaaggtgtcatccaagaattcacttgagtcctatgccttcaacatgaaagcaactgttgaagatgagaaacttcaaggcaagattaacgatgaggacaaacagaagattctggacaagtgtaatgaaattatcaactggcttgataagaatcaggtttgtgttttttttttttttttttcctcccccactcaatggaggggaaggggatggtaaaccaagcttgagctggatttcagtgtagggtcacaatgatgaatggtccaaaacattcgcggtttccaccagaattcaaggtgttggcaactaccttccttggatgtctgagtgacccaagatgttaaggaagaataaggccctattttaatgttggtagtggccctcttgtaagagtttgcgccagacttttagtatcagattgcgtcagggagaaagaagggttattaacattaaaagaacttgcagtaattcctttttctcttcctcagactgctgagaaggaagaatttgaacatcaacagaaagagctggagaaagtttgcaaccccatcatcaccaagctgtaccagagtgcaggaggcatgccaggaggaatgcctgggggatttcctggtggtggagctcctccctctggtggtgcttcctcagggcccaccattgaagaggttgattaagccaaccaagtgtagatgtagcattgttccacacatttaaaacatttgaaggacctaaattcgtagcaaattctgtggcagttttaaaaagttaagctgctatagtaagttactgggcattctcaatacttgaatatggaacatatgcacaggggaaggaaataacattgcactttataaacactgtattgtaagtggaaaatgcaatgtcttaaataaaactatttaaaattggcaccatacaa

SEQ ID NO: 6808 - protein, 122 aa, Homo sapiens
MSKGPAVGIDLGTTYSCVGVFQHGKVEIIANDQGNRTTPSYVAFTDTERLIGDAAKNQVAMNPTNTVFDAKRLIGRRFDDAVVQSDMKHWPFMVVNDAGRPSLPILTTSLVCLFRFMKASVP

SEQ ID NO: 6809 - DNA, 821 bp, Homo sapiens
ggaaaccggtctcattgaactcgcctgcagctcttgggttttttgtggcttccttcgttattggagccaggcctacaccccagcaaccatgtccaagggacctgcagttggtattgatcttggcaccacctactcttgtgtgggtgttttccagcacggaaaagtcgagataattgccaatgatcagggaaaccgaaccactccaagctatgtcgcctttacggacactgaacggttgatcggtgatgccgcaaagaatcaaatttgctgctcttggatgtcactcctctttcccttggtattgaaactgctggtggagtcatgactgtcctcatcaagcgtaataccaccattcctaccaagcagacacagaccttcactacctattctgacaaccagcctggtgtgcttattcaggtttatgaaggcgagcgtgccatgacaaaggataacaacctgcttggcaagtttgaactcacaggcatgccaggaggaatgcctgggggatttcctggtggtggagctcctccctctggtggtgcttcctcagggcccaccattgaagaggttgattaagccaaccaagtgtagatgtagcattgttccacacatttaaaacatttgaaggacctaaattcgtagcaaattctgtggcagttttaaaaagttaagctgctatagtaagttactgggcattctcaatacttgaatatggaacatatgcacaggggaaggaaataacattgcactttataaacactgtattgtaagtggaaaatgcaatgtcttaaataaaactatttaaaattggcaccatacaa

SEQ ID NO: 6810 - protein, 84 aa, Homo sapiens
MTVLIKRNTTIPTKQTQTFTTYSDNQPGVLIQVYEGERAMTKDNNLLGKFELTGMPGGMPGGFPGGGAPPSGGASSGPTIEEVD

SEQ ID NO: 6811 - DNA, 707 bp, Homo sapiens
aggttggagcagaaagaaacgtgctcatctttgacctgggaggtggcacttttgatgtgtcaatcctcactattgaggatggaatctttgaggtcaagtctacagctggagacacccacttgggtggagaagattttgacaaccgaatggtcaaccattttattgctgagtttaagcgcaagcataagaaggacatcagtgagaacaagagagctgtaagacgcctccgtactgcttgtgaacgtgctaagcgtaccctctcttccagcacccaggccagtattgagatcgattctctctatgaaggaatcgacttctatacctccattacccgtgcccgatttgaagaactgaatgctgacctgttccgtggcaccctggacccagtagagaaagcccttcgagatgccaaactagacaagtcacagattcatgatattgtcctggttggtggttctactcgtatccccaagtgtagatgtagcattgttccacacatttaaaacatttgaaggacctaaattcgtagcaaattctgtggcagttttaaaaagttaagctgctatagtaagttactgggcattctcaatacttgaatatggaacatatgcacaggggaaggaaataacattgcactttataaacactgtattgtaagtggaaaatgcaatgtcttaaataaaactatttaaaattggcaccataca

SEQ ID NO: 6812 - protein, 118 aa, Homo sapiens
MVNHFIAEFKRKHKKDISENKRAVRRLRTACERAKRTLSSSTQASIEIDSLYEGIDFYTSITRARFEELNADLFRGTLDPVEKALRDAKLDKSQIHDIVLVGGSTRIPKCRCSIVPHI

SEQ ID NO: 6813 - DNA, 737 bp, Homo sapiens
atggtgccaattttaaatagttttatttaagacattgcattttccacttacaatacagtgtttataaagtgcaatgttatttccttcccctgtgcatatgttccatattcaagtattgagaatgcccagtaacttactatagcagcttaactttttaaaactgccacagaatttgctacgaatttaggtccttcaaatgttttaaatgtgtggaacaatgctacatctacacttggttggcttaatcaacctcttcaatggtgggccctgaggaagcaccaccagagggaggagctccaccaccaggaaatcccccaggcattcctcctggcatgcctcctgcactctggtacagcttggtgatgatggggttgcaaactttctccagctctttctgttgatgttcaaattcttccttctcagcagtctgaggaagagaaaaaggaattactgcaagttcttttaatgttaataacccttctttctccctgacgcaatctgatactaaaagtctggcgcaaactcttacaagagggccactaccaacattaaaatagggccttattcttccttaacatcttgggtcactcagacatccaaggaaggtagttgccaacaccttgaattctggtggaaaccgcgaatgttttggaccattcatcattgtgaccctacactgaaatccagctcaagcttggtttaccatccccttcccctccattgagtgggggaggaaa

SEQ ID NO: 6814 - protein, 47 aa, Homo sapiens
MVGPEEAPPEGGAPPPGNPPGIPPGMPPALWYSLVMMGLQTFSSSFC

SEQ ID NO: 6815 - DNA, 399 bp, Homo sapiens
gtatgtttctgtacttctcttgtttggcttactgataacagataaagggaagtcttgactgactcgctatgatgatggattccaaaaccattcgtagtttccaccagaaagtcttatgttggccagttccttccttggatgtttgagcgaccattcttccttagcaggaccctagcactgtcacagacctggagtccattgtagtaatttgttttatttcctaccaaggtttatgaaggcgagcgtgccatgacaaaggataacaacctgcttggcaagtttgaactcacaggcatacctcctgcaccccgaggtgttcctcagattgaagtcacttttgacattgatgccaatggtatactcaatgtctctgctgtggacaagagtacgggaaaagag

SEQ ID NO: 6816 - protein, 49 aa, Homo sapiens
MTKDNNLLGKFELTGIPPAPRGVPQIEVTFDIDANGILNVSAVDKSTGK

SEQ ID NO: 6817 - DNA, 211 bp, Homo sapiens; identical to SEQ ID NO: 924

SEQ ID NO: 6818 - DNA, 1087 bp, Homo sapiens
gcccgaggagtggagccgggcttgtgattgggtcttgtaagggcagccgggcgtctattggccggggaagccgtaatggcaggcagcaggggcgggccccttctggaaggttctaagatagggtataagaggcagggtggcgggcggaaaccggtctcattgaactcgcctgcagctcttgggttttttgtggcttccttcgttattggagccaggcctacaccccagcaaccatgtccaagggacctgcagttggtattgatcttggcaccacctactcttgtgtgggtgttttccagcacggaaaagtcgagataattgccaatgatcagggaaaccgaaccactccaagctatgtcgcctttacggacactgaacggttgatcggtgatgccgcaaagaatcaagttgcaatgaaccccaccaacacagtttttgatgccaaacgtctgattggacgcagatttgatgatgctgttgtccagtctgatatgaaacattggccctttatggtggtgaatgatgctggcaggcccaaggtccaagtagaatacaagggagagaccaaaagcttctatccagaggaggtgtcttctatggttctgacaaagatgaaggaaattgcagaagcctaccttgggaagactgttaccaatgctgtggtcacagtgccagcttactttaatgactctcagcgtcaggctaccaaagatgctggaactattgctggtctcaatgtacttagaattattaatgagccaactgctgctgctattgcttacggcttagacaaaaagcacccaggccagtattgagatcgattctctctatgaaggaatcgacttctatacctccattacccgtgcccgatttgaagaactgaatgctgacctgttccgtggcaccctggacccagtagagaaagcccttcgagatgccaaactagacaagtcacagattcatgatattgtcctggttggtggttctactcgtatccccaagattcagaagcttctccaagacttcttcaatggaaaagaactgaataagagcatcaaccctgatgaagctgttgcttatggtgcag

SEQ ID NO: 6819 - protein, 193 aa, Homo sapiens
MSKGPAVGIDLGTTYSCVGVFQHGKVEIIANDQGNRTTPSYVAFTDTERLIGDAAKNQVAMNPTNTVFDAKRLIGRRFDDAVVQSDMKHWPFMVVNDAGRPKVQVEYKGETKSFYPEEVSSMVLTKMKEIAEAYLGKTVTNAVVTVPAYFNDSQRQATKDAGTIAGLNVLRIINEPTAAAIAYGLDKKHPGQY

SEQ ID NO: 6820 - DNA, 894 bp, Homo sapiens
tctcattgaactcgcctgcagctcttgggttttttgtggcttccttcgttattggagccaggcctacaccccagcaaccatgtccaagggacctgcagttggtattgatcttggcaccacctactcttgtgtgggtgttttccagcacggaaaagtcgagataattgccaatgatcagggaaaccgaaccactccaagctatgtcgcctttacggacactgaacggttgatcggtgatgccgcaaagaatcaagttgcaatgaaccccaccaacacagtttttgatgccaaacgtctgattggacgcagatttgatgatgctgttgtccagtctgatatgaaacattggccctttatggtggtgaatgatgctggcaggcccaaggtccaagtagaatacaagggagagaccaaaagcttctatccagaggaggtgtcttctatggttctgacaaagatgaaggaaattgcagaagcctaccttgggaaggtgaggttggtttttcagtatggggtgcattccggagtagttaaaagcccgatgactcccgggggcactggcacctggcgagggaggggaacagatggggctcagctcagggttaagaccacgtgcccaacagtgccctaggctctctaggtagatgggtctgtcaacaccagaaaccagtgaatcttgacaattacacagtaatttacattttggtggggggggtgctccagctgttctttcaccagcattaatccatttgctggagtttgcatatatgtaagtataatagttaccaatctgtggtcttttccttattcctagactgttaccaatgctgtggtcacagtgccagcttactttaatgactctcagcgtcaggctaccaaagatgctggaactat

SEQ ID NO: 6821 - protein, 183 aa, Homo sapiens
MSKGPAVGIDLGTTYSCVGVFQHGKVEIIANDQGNRTTPSYVAFTDTERLIGDAAKNQVAMNPTNTVFDAKRLIGRRFDDAVVQSDMKHWPFMVVNDAGRPKVQVEYKGETKSFYPEEVSSMVLTKMKEIAEAYLGKVRLVFQYGVHSGVVKSPMTPGGTGTWRGRGTDGAQLRVKTTCPTVP

SEQ ID NO: 6822 - DNA, 414 bp, Homo sapiens
cagcaaccatgtccaagggacctgcagttggtattgatcttggcaccacctactcttgtgtgggtgttttccagcacggaaaagtcgagataattgccaatgatcagggaaaccgaaccactccaagctatgtcgcctttacggacactgaacggttgatcggtgatgccgcaaagaatcaagttgcaatgaaccccaccaacacagtttttgatgccaaacgtctgattggacgcagatttgatgatgctgttgtccagtctgatatgaaacattggccctttatggtggtgaatgatgctggcaggcccaaggtccaagtagaatacaagggagagaccaaaagcttctatccagaggaggtgtcttctatggttctgacaaagatgaaggaaattgcagaagcctaccttg

SEQ ID NO: 6823 - protein, 134 aa, Homo sapiens
MSKGPAVGIDLGTTYSCVGVFQHGKVEIIANDQGNRTTPSYVAFTDTERLIGDAAKNQVAMNPTNTVFDAKRLIGRRFDDAVVQSDMKHWPFMVVNDAGRPKVQVEYKGETKSFYPEEVSSMVLTKMKEIAEAY

SEQ ID NO: 6824 - DNA, 634 bp, Homo sapiens
gcaggtgctgggaggcctgccgagctaacccgccccaccccgcggcggcctggcggctccctccaatcccaatcctggggggccgtgagcgagcagccctagtggcaccctgaagccggaaccttcgccccagcccctcggggtcagcccttgtccaaagccacgctatgaaatacagattcgcgaaacccggggcacttagaggcccgtctggaacacgaagcaaccatgtccaagggacctgcagttggtattgatcttggcaccacctactcttgtgtgggtgttttccagcacggaaaagtcgagataattgccaatgatcagggaaaccgaaccactccaagctatgtcgcctttacggacactgaacggttgatcggtgatgccgcaaagaatcaagttgcaatgaaccccaccaacacagtttttgatgccaaacgtctgattggacgcagatttgatgatgctgttgtccagtctgatatgaaacattggccctttatggtggtgaatgatgctggcaggcccaaggtccaagtagaatacaagggagagaccaaaagcttctatccagaggaggtgtcttctatggttctgacaaagatgaaggaaattgcagaagcctaccttg

SEQ ID NO: 6825 - protein, 134 aa, Homo sapiens; identical to SEQ ID NO: 6823

SEQ ID NO: 6826 - DNA, 1062 bp, Homo sapiens
ctcccgacagttgccgtagggaaatgcaggtgctgggaggcctgccgagctaacccgccccaccccgcggcggcctggcggctccctccaatcccaatcctggggggccgtgagcgagcagccctagtggcaccctgaagccggaaccttcgccccagcccctcggggtcagcccttgtccaaagccacgctatgaaatacagattcgcgaaacccggggcacttagaggcccgtctggaacacgaaggtggggcatggaaaggaggattcggacgtgggtgggggaggggagcaacaaccttcgcagccattttgtcctcgctccacttccgtcttctcctgcccggctcccgcgcccaaacccctcccttcaggccccgcgcgattccgcccccagttctgtgccggccaagatcccggctagcgccgctatcattggttagttccaagtttgcccgcccctcttcctcctcctttttccgccccctccctcccgcggaagctgggggcgcatgcgtagaggtggacgctcccctcccccgcccggggtaactgaggactcccgcgcgcggactcgctgcgccccaccctccctttccccggggccgtccggagagcgggggcgagcttgaaagttccagaacgctgcgcaaccatgtccaagggacctgcagttggtattgatcttggcaccacctactcttgtgtgggtgttttccagcacggaaaagtcgagataattgccaatgatcagggaaaccgaaccactccaagctatgtcgcctttacggacactgaacggttgatcggtgatgccgcaaagaatcaagttgcaatgaaccccaccaacacagtttttgatgccaaacgtctgattggacgcagatttgatgatgctgttgtccagtctgatatgaaacattggccctttatggtggtgaatgatgctggcaggcccaaggtccaagtagaatacaagggagagaccaaaagcttctatccagaggaggtgtcttctatggttctgacaaagatgaaggaaattgcagaagcctaccttg

SEQ ID NO: 6827 - protein, 134 aa, Homo sapiens; identical to SEQ ID NO: 6823

SEQ ID NO: 6828 - DNA, 581 bp, Homo sapiens
ggtctcattgaactcgcctgcagctcttgggttttttgtggcttccttcgttattggagccaggcctacaccccagcaaccatgtccaagggacctgcagttggtattgatcttggcaccacctactcttgtgtgggtgttttccagcacggaaaagtcgagataattgccaatgatcagggaaaccgaaccactccaagctatgtcgcctttacggacactgaacggttgatcggtgatgccgcaaagaatcaagttgcaatgaaccccaccaacacagtttttggtgagttcctaattttaaatgacagaacaaatataacagggctaggaagcacaaaagtttatgaaacgtgaggagggaactttttgattttagaaaaactgagctgagagacttgttatcaagtctgttataaaacaggttgtagaaacctttcaggctgaaatctggataacgtaggaggttgaagtttgaacctttgctacctatatggtagttgaattcacctacctatgaactgttaggtatttgagtaatcatggacttgagttttatcagaagagctatgaaattgaaa

SEQ ID NO: 6829 - protein, 91 aa, Homo sapiens
MSKGPAVGIDLGTTYSCVGVFQHGKVEIIANDQGNRTTPSYVAFTDTERLIGDAAKNQVAMNPTNTVFGEFLILNDRTNITGLGSTKVYET

SEQ ID NO: 6830 - DNA, 686 bp, Homo sapiens
gacggaagtggagcgaggacaaaatggctgcgaaggttgttgctcccctcccccacccacgtccgaatcctcctttccttccccaactagcccaagccctacatttccccgttgtttataaaataaacaggtttaaatggtggcgagtgtgttcttggttaggtgaaccaggcattaggaatcataggttccagtagccgtgcgtccttgatttagactttctgaacgtttgtattttcagtaacatgaggtgatatctttcctggtttgactttcatcaaaaattaaacgacagaccataccgacgctttgaaaacgtgactgagctggtgcacaaaacaatggtgcctagaattttgaattgtgcaatgttgtgcatggccgcggatatgtggggccttgtggttccaagagcctgtctcaggtaccttgaacactccctgtatcctttcaagcaggcgaggtagctgttattcctatttagtagataaataggcaccgatgggggaaaagattttttaaggctacaccaaaagaacttttagtagcagggctggaattagaaggtctctagactgcgaaaaaggctgtcagaagagcgaggacatcttgtccttgtcaaagccagtaaagggtagagacagactcaaacatatgaagaatttccttttcatattttccttttg

SEQ ID NO: 6831 - protein, 57 aa, Homo sapiens
MAAKVVAPLPHPRPNPPFLPQLAQALHFPVVYKINRFKWWRVCSWLGEPGIRNHRFQ

SEQ ID NO: 6832 - DNA, 500 bp, Homo sapiens
agtaacatgaggtgatatctttcctggtttgactttcatcaaaaattaaacgacagaccataccgacgctttgaaaacgtgactgagctggtgcacaaaacaatggtgcctagaattttgaattgtgcaatgttgtgcatggccgcggatatgtggggccttgtggttccaagagcctgtctcaggtgtaccggccctcatcactgggcttcagaggttcaatctgcaaggaggcatctcctgccaggaaattggaagcaaaggccactcggcccttctgttcctcagtcaagttattgtagacatgacgactggagtaagtgatcacctgtgggatagaccgaggcagagtcaagcagcgtaactctcagcctgcctttcctgatggtgtgaagaagaggaaagggagtactcccagtggcacaaagtagtcaagcctggggctgagagtccaagagacctctgttctaaataaaagttaaaaatacagtacatttgca

SEQ ID NO: 6833 - protein, 73 aa, Homo sapiens
MVPRILNCAMLCMAADMWGLVVPRACLRCTGPHHWASEVQSARRHLLPGNWKQRPLGPSVPQSSYCRHDDWSK

SEQ ID NO: 6834 - DNA, 2432 bp, Homo sapiens
accacttctaagaaactccaaaaaaggaaacatgtgtcttctattctgacttaacttcatttgtcataaggtttggatattaatttcaaggggagttgaaatagtgggagatggagaagagtgaatgagtttctcccactctatactaatctcactatttgtattgagcccaaaataactatgaaaggagacaaaaatttgtgacaaaggattgtgaagagctttccatcttcatgatgttatgaggattgttgacaaacattagaaatatataatggagcaattgtggatttcccctcaaatcagatgcctctaaggactttcctgctagatatttctggaaggagaaaatacaacatgtcatttatcaacgtccttagaaagaattcttctagagaaaaagggatctaggaatgctgaaagattacccaacataccattatagtctcttctttctgagaaaatgtgaaaccagaattgcaagactgggtggactagaaagggagattagatcagttttctcttaatatgtcaaggaaggtagccgggcatggtgccaggcacctgtaggaaaatccagcaggtggaggttgcatggcaccatctcagctcactgcagcgtccgcctcttgggttcaagtgattctcctgccttgtcctcctgagtcgctggtattacaggtgcctgccatcacacccagctaatttttggagttctgatagagacagggtttctccatgttggccaggcttgtctcaagctcctgacctcaagtgacctacccacccttggcctcccacagtgctggaagccactgcacctggctcagaatacttttttttttgagatgcagtcttgctctcatcacgcaggctggagtgcagtggcgtatctcggctcactgcgacctccacctcccgagttcaagcgattctccttcctcagtcccccaagtagcttggattataggtgtgcgccaccacgtacagctaatttttgtatttttagtagagatggggtttcgccatgttgaccaggctggtctcaaaacgcctgacctcaggtgatccacccacctcggccccacaaagtgctaggattacaggtgtgagccaccatgcccggcccagaatactttttaaaagaagagcaggttagaggaaagaaaaaaattgatgctgaatgtggtgatgaaagcatgtttctaaaatgggaagcagatgcttaaagaggaaagactaatctgggattttgccccatttctctggtttttcactcctatatttaattctcacaatcgtgtcgtcacatagtgcaaaaaacaaaattcttgtaaagtccccaggagtttatgcttgggtgaaagttttagcctgagtattttcttcctctaaaaaaggtgggaaatgagacattgaggaattaacatataaatgtctgctatgggtttaagagaactggcgtatttggaatgcttcttacactaacactgtctcattgtaaaatataaaaccccttactctaactacatttttattcctctggtagtgtggtatccaggcaacatatcacttctgctatgtaattctaagaattctcatttctagagtacctgagccaaacaaatacacaacggaagctgcagctgtatcatcactagcaatttgctcatcattatttactacctttgaacctaaggtttcctgcctatgcttttgaaagcaaaaatcagtctcctttgcatgaaaaagagccttagatttttaaacatgttagttaccagaatgctaaaataccagttgattacccaaattattttggaaatctatccataatggaagtctacaacaaacacataaaacagattacactaagagctgagaaattcaaaggaactgaagattctgagagataaactgttcaagtcttagcaatgatactgcacttctctttgacaggttctgggcttaagttagaggccctactggttccaaaccatattccactgactttgcaagtaaaataaatttgattctgaaataggaaacaaaaaaaggagaaataaccgaatagtagaagaaaaactgtttgtaggaagacgatgcagatggaatgatgtggacattgagtaaccatgtcaataaaatatataaaccaaacttaaatttgtgaaataaggaagttggtacctttgttgttacagtgtataaaaacaatttcggaactgctgttgcaaaaagacatatatagttttgcttccttctggtgttaagctgtttatatttcagtttcagttttaacttctaagttgccttgtaattgggactgtgtttcagcatcacaaaaaccaaatatttattatggatgcatctgtatcagcaattaaaaaataaacaagtaaaagtgatactgtaggagaagctgaagctca

SEQ ID NO: 6835 - protein, 36 aa, Homo sapiens
MAPSQLTAASASWVQVILLPCPPESLVLQVPAITPS

SEQ ID NO: 6836 - DNA, 3514 bp, Homo sapiens
accccagccagggctggccacccaggcatacagcctagtggggccagaggtgagaggttctgaaccaaagaaagtccaccatgctaatctgaccaaagcagaaaccacacccagcatgatccccaggaaagcaggagtccaaatctatttgttgaccaggacctgtggtgagaaggttggggaaaggtgaggtgaatatacctaaaacttttaatgtgggatattttgtatcagtgctttgattcacaattttcaagaggaaatgggatgctgtttgtaaattttctatgcatttctgcaaacttattggattattagttattcagacagtcaagcagaacccacagccttattacacctgtctacaccatgtactgagctaaccacttctaagaaactccaaaaaaggaaacatgtgtcttctattctgacttaacttcatttgtcataaggtttggatattaatttcaaggggagttgaaatagtgggagatggagaagagtgaatgagtttctcccactctatactaatctcactatttgtattgagcccaaaataactatgaaaggagacaaaaatttgtgacaaaggattgtgaagagctttccatcttcatgatgttatgaggattgttgacaaacattagaaatatataatggagcaattgtggatttcccctcaaatcagatgcctctaaggactttcctgctagatatttctggaaggagaaaatacaacatgtcatttatcaacgtccttagaaagaattcttctagagaaaaagggatctaggaatgctgaaagattacccaacataccattatagtctcttctttctgagaaaatgtgaaaccagaattgcaagactgggtggactagaaagggagattagatcagttttctcttaatatgtcaaggaaggtagccgggcatggtgccaggcacctgtaggaaaatccagcaggtggaggttgcagtgagccaagattatgccattgcactccagcctgggtgacaaagcaagactccatctcaaaaaaaaaaaaaaatcaaggaaggataaaaggaagttcagtattgtaccacacttggaacttcctccatttcttccattttagaaggatatgaacctggaacttttgatgattctaagccttaaactatcaaaaagatcagggattgccaatgcttctaatggcactgcaagtatatgccataaccgttccctcctaaaagtgaaaaatgagagaaattcagtattttcccaggctcagcatccagaagtctagctctgggctggaagaaaagggtactaatatttagggaagagatgagaataagtagtgggtggcaggagagggctgagctagtgcctgctaacattttagttgtatcttggaaagatttagcaaaaataactcaccaggatagctgctgaagagttgatgaatgggagaagaaagatgtttgagaaataaagaaaacagcagcctgcaatacaataacttgcctttttaatagttttgattactcttgatacctacagcacaaatgctggacctgaatcagctcttcaaggaccctagcacaaatgtcaactgatcacctctgggagagtagaaaacttttttttttttgagacgaagtctcgctctgttgcccaggctggagtgcagtggcaccatctcagctcactgcagcgtccgcctcttgggttcaagtgattctcctgccttgtcctcctgagtcgctggtattacaggtgcctgccatcacacccagctaatttttggagttctgatagagacagggtttctccatgttggccaggcttgtctcaagctcctgacctcaagtgacctacccacccttggcctcccacagtgctggaagccactgcacctggctcagaatacttttttttttgagatgcagtcttgctctcatcacgcaggctggagtgcagtggcgtatctcggctcactgcgacctccacctcccgagttcaagcgattctccttcctcagtcccccaagtagcttggattataggtgtgcgccaccacgtacagctaatttttgtatttttagtagagatggggtttcgccatgttgaccaggctggtctcaaaacgcctgacctcaggtgatccacccacctcggccccacaaagtgctaggattacaggtgtgagccaccatgcccggcccagaatactttttaaaagaagagcaggttagaggaaagaaaaaaattgatgctgaatgtggtgatgaaagcatgtttctaaaatgggaagcagatgcttaaagaggaaagactaatctgggattttgccccatttctctggtttttcactcctatatttaattctcacaatcgtgtcgtcacatagtgcaaaaaacaaaattcttgtaaagtccccaggagtttatgcttgggtgaaagttttagcctgagtattttcttcctctaaaaaaggtgggaaatgagacattgaggaattaacatataaatgtctgctatgggtttaagagaactggcgtatttggaatgcttcttacactaacactgtctcattgtaaaatataaaaccccttactctaactacatttttattcctctggtagtgtggtatccaggcaacatatcacttctgctatgtaattctaagaattctcatttctagagtacctgagccaaacaaatacacaacggaagctgcagctgtatcatcactagcaatttgctcatcattatttactacctttgaacctaaggtttcctgcctatgcttttgaaagcaaaaatcagtctcctttgcatgaaaaagagccttagatttttaaacatgttagttaccagaatgctaaaataccagttgattacccaaattattttggaaatctatccataatggaagtctacaacaaacacataaaacagattacactaagagctgagaaattcaaaggaactgaagattctgagagataaactgttcaagtcttagcaatgatactgcacttctctttgacaggttctgggcttaagttagaggccctactggttccaaaccatattccactgactttgcaagtaaaataaatttgattctgaaataggaaacaaaaaaaggagaaataaccgaatagtagaagaaaaactgtttgtaggaagacgatgcagatggaatgatgtggacattgagtaaccatgtcaataaaatatataaaccaaacttaaatttgtgaaataaggaagttggtacctttgttgttacagtgtataaaaacaatttcggaactgctgttgcaaaaagacatatatagttttgcttccttctggtgttaagctgtttatatttcagtttcagttttaacttctaagttgccttgtaattgggactgtgtttcagcatcacaaaaaccaaatatttattatggatgcatctgtatcagcaattaaaaaataaacaagtaaaagtgatactgtaggagaagctgaagctca

SEQ ID NO: 6837 - protein, 61 aa, Homo sapiens
MQSCSHHAGWSAVAYLGSLRPPPPEFKRFSFLSPPSSLDYRCAPPRTANFCIFSRDGVSPC

SEQ ID NO: 6838 - DNA, 2232 bp, Homo sapiens
ctccactcgctccacagcaaatagtgcctcacgcagccagcggacactgtcaactgacgcagcaccccagccagggctggccacccaggcatacagcctagtggggccagaggtgagaggttctgaaccaaagaaagtccaccatgctaatctgaccaaagcagaaaccacacccagcatgatccccagccagagcagagccttccaaacggtctgaattacaatggacttgactcccacgctttcctaggagtcagggtctttggactcttctcgtcattggagctcaagtcaccagccacacaaccagatgagaggtcatctaagtagcagtgagcattgcacggaacagattcagatgagcattttccttatacaataccaaacaagcaaaaggatgtaagctgattcatctgtaaaaaggcatcttattgtgcctttagaccagagtaagggaaagcaggagtccaaatctatttgttgaccaggacctgtggtgagaaggttggggaaaggtgaggtgaatatacctaaaacttttaatgtgggatattttgtatcagtgctttgattcacaattttcaagaggaaatgggatgctgtttgtaaattttctatgcatttctgcaaacttattggattattagttattcagacagtcaagcagaacccacagccttattacacctgtctacaccatgtatgcgacctccacctcccgagttcaagcgattctccttcctcagtcccccaagtagcttggattataggtgtgcgccaccacgtacagctaatttttgtatttttagtagagatggggtttcgccatgttgaccaggctggtctcaaaacgcctgacctcaggtgatccacccacctcggccccacaaagtgctaggattacaggtgtgagccaccatgcccggcccagaatactttttaaaagaagagcaggttagaggaaagaaaaaaattgatgctgaatgtggtgatgaaagcatgtttctaaaatgggaagcagatgcttaaagaggaaagactaatctgggattttgccccatttctctggtttttcactcctatatttaattctcacaatcgtgtcgtcacatagtgcaaaaaacaaaattcttgtaaagtccccaggagtttatgcttgggtgaaagttttagcctgagtattttcttcctctaaaaaaggtgggaaatgagacattgaggaattaacatataaatgtctgctatgggtttaagagaactggcgtatttggaatgcttcttacactaacactgtctcattgtaaaatataaaaccccttactctaactacatttttattcctctggtagtgtggtatccaggcaacatatcacttctgctatgtaattctaagaattctcatttctagagtacctgagccaaacaaatacacaacggaagctgcagctgtatcatcactagcaatttgctcatcattatttactacctttgaacctaaggtttcctgcctatgcttttgaaagcaaaaatcagtctcctttgcatgaaaaagagccttagatttttaaacatgttagttaccagaatgctaaaataccagttgattacccaaattattttggaaatctatccataatggaagtctacaacaaacacataaaacagattacactaagagctgagaaattcaaaggaactgaagattctgagagataaactgttcaagtcttagcaatgatactgcacttctctttgacaggttctgggcttaagttagaggccctactggttccaaaccatattccactgactttgcaagtaaaataaatttgattctgaaataggaaacaaaaaaaggagaaataaccgaatagtagaagaaaaactgtttgtaggaagacgatgcagatggaatgatgtggacattgagtaaccatgtcaataaaatatataaaccaaacttaaatttgtgaaataaggaagttggtacctttgttgttacagtgtataaaaacaatttcggaactgctgttgcaaaaagacatatatagttttgcttccttctggtgttaagctgtttatatttcagtttcagttttaacttctaagttgccttgtaattgggactgtgtttcagcatcacaaaaaccaaatatttattatggatgcatctgtatcagcaattaaaaaataaacaagtaaaagtgatactgtaggagaagctgaagctca

SEQ ID NO: 6839 - protein, 83 aa, Homo sapiens
MHFCKLIGLLVIQTVKQNPQPYYTCLHHVCDLHLPSSSDSPSSVPQVAWIIGVRHHVQLIFVFLVEMGFRHVDQAGLKTPDLR

SEQ ID NO: 6840 - DNA, 5113 bp, Homo sapiens
ggtaggaggcaaccatgtggttccagctgaattttttttttccctctctctttcttcactcctttttctttccaaacagggaaaagtgttccacgaagcggtagcgccttttcgcctcgcgttttcctccctgaccctggtcccggctcccgtccgggcgccagctggtggggcgagcgccgggagcccatctgcccccaggggcacggggcgcggggccggctcccgcccggcacatggctgcagccacctcgcgcgcaccccgaggcgccgcgcccagctcgcccgaggtccgtcggaggcgcccggccgccccggagccaagcagcagctgagcggggaagcgcccgcgtccggggatcgggatgtccctcctccttctcctcttgctagtttcctactatgttggaaccttggggactcacactgagatcaagagagtggcagaggaaaaggtcactttgccctgccaccatcaactggggcttccagaaaaagacactctggatattgaatggctgctcaccgataatgaagggaaccaaaaagtggtgatcacttactccagtcgtcatgtctacaataacttgactgaggaacagaagggccgagtggcctttgcttccaatttcctggcaggagatgcctccttgcagattgaacctctgaagcccagtgatgagggccggtacacctgtaaggttaagaattcagggcgctacgtgtggagccatgtcatcttaaaagtcttagtgagaccatccaagcccaagtgtgagttggaaggagagctgacagaaggaagtgacctgactttgcagtgtgagtcatcctctggcacagagcccattgtgtattactggcagcgaatccgagagaaagagggagaggatgaacgtctgcctcccaaatctaggattgactacaaccaccctggacgagttctgctgcagaatcttaccatgtcctactctggactgtaccagtgcacagcaggcaacgaagctgggaaggaaagctgtgtggtgcgagtaactgtacagtatgtacaaagcatcggcatggttgcaggagcagtgacaggcatagtggctggagccctgctgattttcctcttggtgtggctgctaatccgaaggaaagacaaagaaagatatgaggaagaagagagacctaatgaaattcgagaagatgctgaagctccaaaagcccgtcttgtgaaacccagctcctcttcctcaggctctcggagctcacgctctggttcttcctccactcgctccacagcaaatagtgcctcacgcagccagcggacactgtcaactgacgcagcaccccagccagggctggccacccaggcatacagcctagtggggccagaggtgagaggttctgaaccaaagaaagtccaccatgctaatctgaccaaagcagaaaccacacccagcatgatccccagccagagcagagccttccaaacggtctgaattacaatggacttgactcccacgctttcctaggagtcagggtctttggactcttctcgtcattggagctcaagtcaccagccacacaaccagatgagaggtcatctaagtagcagtgagcattgcacggaacagattcagatgagcattttccttatacaataccaaacaagcaaaaggatgtaagctgattcatctgtaaaaaggcatcttattgtgcctttagaccagagtaagggaaagcaggagtccaaatctatttgttgaccaggacctgtggtgagaaggttggggaaaggtgaggtgaatatacctaaaacttttaatgtgggatattttgtatcagtgctttgattcacaattttcaagaggaaatgggatgctgtttgtaaattttctatgcatttctgcaaacttattggattattagttattcagacagtcaagcagaacccacagccttattacacctgtctacaccatgtactgagctaaccacttctaagaaactccaaaaaaggaaacatgtgtcttctattctgacttaacttcatttgtcataaggtttggatattaatttcaaggggagttgaaatagtgggagatggagaagagtgaatgagtttctcccactctatactaatctcactatttgtattgagcccaaaataactatgaaaggagacaaaaatttgtgacaaaggattgtgaagagctttccatcttcatgatgttatgaggattgttgacaaacattagaaatatataatggagcaattgtggatttcccctcaaatcagatgcctctaaggactttcctgctagatatttctggaaggagaaaatacaacatgtcatttatcaacgtccttagaaagaattcttctagagaaaaagggatctaggaatgctgaaagattacccaacataccattatagtctcttctttctgagaaaatgtgaaaccagaattgcaagactgggtggactagaaagggagattagatcagttttctcttaatatgtcaaggaaggtagccgggcatggtgccaggcacctgtaggaaaatccagcaggtggaggttgcagtgagccaagattatgccattgcactccagcctgggtgacaaagcaagactccatctcaaaaaaaaaaaaaaatcaaggaaggataaaaggaagttcagtattgtaccacacttggaacttcctccatttcttccattttagaaggatatgaacctggaacttttgatgattctaagccttaaactatcaaaaagatcagggattgccaatgcttctaatggcactgcaagtatatgccataaccgttccctcctaaaagtgaaaaatgagagaaattcagtattttcccaggctcagcatccagaagtctagctctgggctggaagaaaagggtactaatatttagggaagagatgagaataagtagtgggtggcaggagagggctgagctagtgcctgctaacattttagttgtatcttggaaagatttagcaaaaataactcaccaggatagctgctgaagagttgatgaatgggagaagaaagatgtttgagaaataaagaaaacagcagcctgcaatacaataacttgcctttttaatagttttgattactcttgatacctacagcacaaatgctggacctgaatcagctcttcaaggaccctagcacaaatgtcaactgatcacctctgggagagtagaaaacttttttttttttgagacgaagtctcgctctgttgcccaggctggagtgcagtggcaccatctcagctcactgcagcgtccgcctcttgggttcaagtgattctcctgccttgtcctcctgagtcgctggtattacaggtgcctgccatcacacccagctaatttttggagttctgatagagacagggtttctccatgttggccaggcttgtctcaagctcctgacctcaagtgacctacccacccttggcctcccacagtgctggaagccactgcacctggctcagaatacttttttttttgagatgcagtcttgctctcatcacgcaggctggagtgcagtggcgtatctcggctcactgcgacctccacctcccgagttcaagcgattctccttcctcagtcccccaagtagcttggattataggtgtgcgccaccacgtacagctaatttttgtatttttagtagagatggggtttcgccatgttgaccaggctggtctcaaaacgcctgacctcaggtgatccacccacctcggccccacaaagtgctaggattacaggtgtgagccaccatgcccggcccagaatactttttaaaagaagagcaggttagaggaaagaaaaaaattgatgctgaatgtggtgatgaaagcatgtttctaaaatgggaagcagatgcttaaagaggaaagactaatctgggattttgccccatttctctggtttttcactcctatatttaattctcacaatcgtgtcgtcacatagtgcaaaaaacaaaattcttgtaaagtccccaggagtttatgcttgggtgaaagttttagcctgagtattttcttcctctaaaaaaggtgggaaatgagacattgaggaattaacatataaatgtctgctatgggtttaagagaactggcgtatttggaatgcttcttacactaacactgtctcattgtaaaatataaaaccccttactctaactacatttttattcctctggtagtgtggtatccaggcaacatatcacttctgctatgtaattctaagaattctcatttctagagtacctgagccaaacaaatacacaacggaagctgcagctgtatcatcactagcaatttgctcatcattatttactacctttgaacctaaggtttcctgcctatgcttttgaaagcaaaaatcagtctcctttgcatgaaaaagagccttagatttttaaacatgttagttaccagaatgctaaaataccagttgattacccaaattattttggaaatctatccataatggaagtctacaacaaacacataaaacagattacactaagagctgagaaattcaaaggaactgaagattctgagagataaactgttcaagtcttagcaatgatactgcacttctctttgacaggttctgggcttaagttagaggccctactggttccaaaccatattccactgactttgcaagtaaaataaatttgattctgaaataggaaacaaaaaaaggagaaataaccgaatagtagaagaaaaactgtttgtaggaagacgatgcagatggaatgatgtggacattgagtaaccatgtcaataaaatatataaaccaaacttaaatttgtgaaataaggaagttggtacctttgttgttacagtgtataaaaacaatttcggaactgctgttgcaaaaagacatatatagttttgcttccttctggtgttaagctgtttatatttcagtttcagttttaacttctaagttgccttgtaattgggactgtgtttcagcatcacaaaaaccaaatatttattatggatgcatctgtatcagcaattaaaaaataaacaagtaaaagtgatactgtaggagaagctgaagctca

SEQ ID NO: 6841 - protein, 373 aa, Homo sapiens; identical to SEQ ID NO: 926

SEQ ID NO: 6842 - DNA, 2179 bp, Homo sapiens
accacttctaagaaactccaaaaaaggaaacatgtgtcttctattctgacttaacttcatttgtcataaggtttggatattaatttcaaggggagttgaaatagtgggagatggagaagagtgaatgagtttctcccactctatactaatctcactatttgtattgagcccaaaataactatgaaaggagacaaaaatttgtgacaaaggattgtgaagagctttccatcttcatgatgttatgaggattgttgacaaacattagaaatatataatggagcaattgtggatttcccctcaaatcagatgcctctaaggactttcctgctagatatttctggaaggagaaaatacaacatgtcatttatcaacgtccttagaaagaattcttctagagaaaaagggatctaggaatgctgaaagattacccaacataccattatagtctcttctttctgagaaaatgtgaaaccagaattgcaagactgggtggactagaaagggagattagatcagttttctcttaatatgtcaaggaaggtagccgggcatggtgccaggcacctgtaggaaaatccagcaggtggaggttgcatggcaccatctcagctcactgcagcgtccgcctcttgggttcaagtgattctcctgccttgtcctcctgagtcgctggtattacaggtgcctgccatcacacccagctaatttttggagttctgatagagacagggtttctccatgttggccaggcttgtctcaagctcctgacctcaagtgacctacccacccttggcctcccacagtgctggaagccactgcacctggctcagaatacttttttttttgagatgcagtcttgctctcatcacgcaggctggagtgcagtggcgtatctcggctcactgcgacctccacctcccgagttcaagcgattctccttcctcagtcccccaagtagcttggattataggtgtgcgccaccacgtacagctaatttttgtatttttagtagagatggggtttcgccatgttgaccaggctggtctcaaaacgcctgacctcaggtgatccacccacctcggccccacaaagtgctaggattacaggtgtgagccaccatgcccggcccagaatactttttaaaagaagagcaggttagaggaaagaaaaaaattgatgctgaatgtggtgatgaaagcatgtttctaaaatgggaagcagatgcttaaagaggaaagactaatctgggattttgccccatttctctggtttttcactcctatatttaattctcacaatcgtgtcgtcacatagtgcaaaaaacaaaattcttgtaaagtccccaggagtttatgcttgggtgaaagttttagcctgagtattttcttcctctaaaaaaggtgggaaatgagacattgaggaattaacatataaatgtctgctatgggtttaagagaactggcgtatttggaatgcttcttacactaacactgtctcattgtaaaatataaaaccccttactctaactacatttttattcctctggtagtgtggtatccaggcaacatatcacttctgctatgtaattctaagaattctcatttctagagtacctgagccaaacaaatacacaacggaagctgcagctgtatcatcactagcaatttgctcatcattatttactacctttgaacctaaggtttcctgcctatgcttttgaaagcaaaaatcagtctcctttgcatgaaaaagagccttagatttttaaacatgttagttaccagaatgctaaaataccagttgattacccaaattattttggaaatctatccataatggaagtctacaacaaacacataaaacagattacactaagagctgagaaattcaaaggaactgaagattctgagagataaactgttcaagtcttagcaatgatactgcacttctctttgacaggttctgggcttaagttagaggccctactggttccaaaccatattccactgactttgcaagtaaaataaatttgattctgaaataggaaacaaaaaaaggagaaataaccgaatagtagaagaaaaactgtttgtaggaagacgatgcagatggaatgatgtggacattgagtaaccatgtcaataaaatatataaaccaaacttaaatttgtgaaataag

SEQ ID NO: 6843 - protein, 36 aa, Homo sapiens; identical to SEQ ID NO: 6835

SEQ ID NO: 6844 - DNA, 3261 bp, Homo sapiens
accccagccagggctggccacccaggcatacagcctagtggggccagaggtgagaggttctgaaccaaagaaagtccaccatgctaatctgaccaaagcagaaaccacacccagcatgatccccaggaaagcaggagtccaaatctatttgttgaccaggacctgtggtgagaaggttggggaaaggtgaggtgaatatacctaaaacttttaatgtgggatattttgtatcagtgctttgattcacaattttcaagaggaaatgggatgctgtttgtaaattttctatgcatttctgcaaacttattggattattagttattcagacagtcaagcagaacccacagccttattacacctgtctacaccatgtactgagctaaccacttctaagaaactccaaaaaaggaaacatgtgtcttctattctgacttaacttcatttgtcataaggtttggatattaatttcaaggggagttgaaatagtgggagatggagaagagtgaatgagtttctcccactctatactaatctcactatttgtattgagcccaaaataactatgaaaggagacaaaaatttgtgacaaaggattgtgaagagctttccatcttcatgatgttatgaggattgttgacaaacattagaaatatataatggagcaattgtggatttcccctcaaatcagatgcctctaaggactttcctgctagatatttctggaaggagaaaatacaacatgtcatttatcaacgtccttagaaagaattcttctagagaaaaagggatctaggaatgctgaaagattacccaacataccattatagtctcttctttctgagaaaatgtgaaaccagaattgcaagactgggtggactagaaagggagattagatcagttttctcttaatatgtcaaggaaggtagccgggcatggtgccaggcacctgtaggaaaatccagcaggtggaggttgcagtgagccaagattatgccattgcactccagcctgggtgacaaagcaagactccatctcaaaaaaaaaaaaaaatcaaggaaggataaaaggaagttcagtattgtaccacacttggaacttcctccatttcttccattttagaaggatatgaacctggaacttttgatgattctaagccttaaactatcaaaaagatcagggattgccaatgcttctaatggcactgcaagtatatgccataaccgttccctcctaaaagtgaaaaatgagagaaattcagtattttcccaggctcagcatccagaagtctagctctgggctggaagaaaagggtactaatatttagggaagagatgagaataagtagtgggtggcaggagagggctgagctagtgcctgctaacattttagttgtatcttggaaagatttagcaaaaataactcaccaggatagctgctgaagagttgatgaatgggagaagaaagatgtttgagaaataaagaaaacagcagcctgcaatacaataacttgcctttttaatagttttgattactcttgatacctacagcacaaatgctggacctgaatcagctcttcaaggaccctagcacaaatgtcaactgatcacctctgggagagtagaaaacttttttttttttgagacgaagtctcgctctgttgcccaggctggagtgcagtggcaccatctcagctcactgcagcgtccgcctcttgggttcaagtgattctcctgccttgtcctcctgagtcgctggtattacaggtgcctgccatcacacccagctaatttttggagttctgatagagacagggtttctccatgttggccaggcttgtctcaagctcctgacctcaagtgacctacccacccttggcctcccacagtgctggaagccactgcacctggctcagaatacttttttttttgagatgcagtcttgctctcatcacgcaggctggagtgcagtggcgtatctcggctcactgcgacctccacctcccgagttcaagcgattctccttcctcagtcccccaagtagcttggattataggtgtgcgccaccacgtacagctaatttttgtatttttagtagagatggggtttcgccatgttgaccaggctggtctcaaaacgcctgacctcaggtgatccacccacctcggccccacaaagtgctaggattacaggtgtgagccaccatgcccggcccagaatactttttaaaagaagagcaggttagaggaaagaaaaaaattgatgctgaatgtggtgatgaaagcatgtttctaaaatgggaagcagatgcttaaagaggaaagactaatctgggattttgccccatttctctggtttttcactcctatatttaattctcacaatcgtgtcgtcacatagtgcaaaaaacaaaattcttgtaaagtccccaggagtttatgcttgggtgaaagttttagcctgagtattttcttcctctaaaaaaggtgggaaatgagacattgaggaattaacatataaatgtctgctatgggtttaagagaactggcgtatttggaatgcttcttacactaacactgtctcattgtaaaatataaaaccccttactctaactacatttttattcctctggtagtgtggtatccaggcaacatatcacttctgctatgtaattctaagaattctcatttctagagtacctgagccaaacaaatacacaacggaagctgcagctgtatcatcactagcaatttgctcatcattatttactacctttgaacctaaggtttcctgcctatgcttttgaaagcaaaaatcagtctcctttgcatgaaaaagagccttagatttttaaacatgttagttaccagaatgctaaaataccagttgattacccaaattattttggaaatctatccataatggaagtctacaacaaacacataaaacagattacactaagagctgagaaattcaaaggaactgaagattctgagagataaactgttcaagtcttagcaatgatactgcacttctctttgacaggttctgggcttaagttagaggccctactggttccaaaccatattccactgactttgcaagtaaaataaatttgattctgaaataggaaacaaaaaaaggagaaataaccgaatagtagaagaaaaactgtttgtaggaagacgatgcagatggaatgatgtggacattgagtaaccatgtcaataaaatatataaaccaaacttaaatttgtgaaataag

SEQ ID NO: 6845 - protein, 61 aa, Homo sapiens; identical to SEQ ID NO: 6837

SEQ ID NO: 6846 - DNA, 1979 bp, Homo sapiens
ctccactcgctccacagcaaatagtgcctcacgcagccagcggacactgtcaactgacgcagcaccccagccagggctggccacccaggcatacagcctagtggggccagaggtgagaggttctgaaccaaagaaagtccaccatgctaatctgaccaaagcagaaaccacacccagcatgatccccagccagagcagagccttccaaacggtctgaattacaatggacttgactcccacgctttcctaggagtcagggtctttggactcttctcgtcattggagctcaagtcaccagccacacaaccagatgagaggtcatctaagtagcagtgagcattgcacggaacagattcagatgagcattttccttatacaataccaaacaagcaaaaggatgtaagctgattcatctgtaaaaaggcatcttattgtgcctttagaccagagtaagggaaagcaggagtccaaatctatttgttgaccaggacctgtggtgagaaggttggggaaaggtgaggtgaatatacctaaaacttttaatgtgggatattttgtatcagtgctttgattcacaattttcaagaggaaatgggatgctgtttgtaaattttctatgcatttctgcaaacttattggattattagttattcagacagtcaagcagaacccacagccttattacacctgtctacaccatgtatgcgacctccacctcccgagttcaagcgattctccttcctcagtcccccaagtagcttggattataggtgtgcgccaccacgtacagctaatttttgtatttttagtagagatggggtttcgccatgttgaccaggctggtctcaaaacgcctgacctcaggtgatccacccacctcggccccacaaagtgctaggattacaggtgtgagccaccatgcccggcccagaatactttttaaaagaagagcaggttagaggaaagaaaaaaattgatgctgaatgtggtgatgaaagcatgtttctaaaatgggaagcagatgcttaaagaggaaagactaatctgggattttgccccatttctctggtttttcactcctatatttaattctcacaatcgtgtcgtcacatagtgcaaaaaacaaaattcttgtaaagtccccaggagtttatgcttgggtgaaagttttagcctgagtattttcttcctctaaaaaaggtgggaaatgagacattgaggaattaacatataaatgtctgctatgggtttaagagaactggcgtatttggaatgcttcttacactaacactgtctcattgtaaaatataaaaccccttactctaactacatttttattcctctggtagtgtggtatccaggcaacatatcacttctgctatgtaattctaagaattctcatttctagagtacctgagccaaacaaatacacaacggaagctgcagctgtatcatcactagcaatttgctcatcattatttactacctttgaacctaaggtttcctgcctatgcttttgaaagcaaaaatcagtctcctttgcatgaaaaagagccttagatttttaaacatgttagttaccagaatgctaaaataccagttgattacccaaattattttggaaatctatccataatggaagtctacaacaaacacataaaacagattacactaagagctgagaaattcaaaggaactgaagattctgagagataaactgttcaagtcttagcaatgatactgcacttctctttgacaggttctgggcttaagttagaggccctactggttccaaaccatattccactgactttgcaagtaaaataaatttgattctgaaataggaaacaaaaaaaggagaaataaccgaatagtagaagaaaaactgtttgtaggaagacgatgcagatggaatgatgtggacattgagtaaccatgtcaataaaatatataaaccaaacttaaatttgtgaaataag

SEQ ID NO: 6847 - protein, 83 aa, Homo sapiens; identical to SEQ ID NO: 6839

SEQ ID NO: 6848 - DNA, 4860 bp, Homo sapiens
ggtaggaggcaaccatgtggttccagctgaattttttttttccctctctctttcttcactcctttttctttccaaacagggaaaagtgttccacgaagcggtagcgccttttcgcctcgcgttttcctccctgaccctggtcccggctcccgtccgggcgccagctggtggggcgagcgccgggagcccatctgcccccaggggcacggggcgcggggccggctcccgcccggcacatggctgcagccacctcgcgcgcaccccgaggcgccgcgcccagctcgcccgaggtccgtcggaggcgcccggccgccccggagccaagcagcagctgagcggggaagcgcccgcgtccggggatcgggatgtccctcctccttctcctcttgctagtttcctactatgttggaaccttggggactcacactgagatcaagagagtggcagaggaaaaggtcactttgccctgccaccatcaactggggcttccagaaaaagacactctggatattgaatggctgctcaccgataatgaagggaaccaaaaagtggtgatcacttactccagtcgtcatgtctacaataacttgactgaggaacagaagggccgagtggcctttgcttccaatttcctggcaggagatgcctccttgcagattgaacctctgaagcccagtgatgagggccggtacacctgtaaggttaagaattcagggcgctacgtgtggagccatgtcatcttaaaagtcttagtgagaccatccaagcccaagtgtgagttggaaggagagctgacagaaggaagtgacctgactttgcagtgtgagtcatcctctggcacagagcccattgtgtattactggcagcgaatccgagagaaagagggagaggatgaacgtctgcctcccaaatctaggattgactacaaccaccctggacgagttctgctgcagaatcttaccatgtcctactctggactgtaccagtgcacagcaggcaacgaagctgggaaggaaagctgtgtggtgcgagtaactgtacagtatgtacaaagcatcggcatggttgcaggagcagtgacaggcatagtggctggagccctgctgattttcctcttggtgtggctgctaatccgaaggaaagacaaagaaagatatgaggaagaagagagacctaatgaaattcgagaagatgctgaagctccaaaagcccgtcttgtgaaacccagctcctcttcctcaggctctcggagctcacgctctggttcttcctccactcgctccacagcaaatagtgcctcacgcagccagcggacactgtcaactgacgcagcaccccagccagggctggccacccaggcatacagcctagtggggccagaggtgagaggttctgaaccaaagaaagtccaccatgctaatctgaccaaagcagaaaccacacccagcatgatccccagccagagcagagccttccaaacggtctgaattacaatggacttgactcccacgctttcctaggagtcagggtctttggactcttctcgtcattggagctcaagtcaccagccacacaaccagatgagaggtcatctaagtagcagtgagcattgcacggaacagattcagatgagcattttccttatacaataccaaacaagcaaaaggatgtaagctgattcatctgtaaaaaggcatcttattgtgcctttagaccagagtaagggaaagcaggagtccaaatctatttgttgaccaggacctgtggtgagaaggttggggaaaggtgaggtgaatatacctaaaacttttaatgtgggatattttgtatcagtgctttgattcacaattttcaagaggaaatgggatgctgtttgtaaattttctatgcatttctgcaaacttattggattattagttattcagacagtcaagcagaacccacagccttattacacctgtctacaccatgtactgagctaaccacttctaagaaactccaaaaaaggaaacatgtgtcttctattctgacttaacttcatttgtcataaggtttggatattaatttcaaggggagttgaaatagtgggagatggagaagagtgaatgagtttctcccactctatactaatctcactatttgtattgagcccaaaataactatgaaaggagacaaaaatttgtgacaaaggattgtgaagagctttccatcttcatgatgttatgaggattgttgacaaacattagaaatatataatggagcaattgtggatttcccctcaaatcagatgcctctaaggactttcctgctagatatttctggaaggagaaaatacaacatgtcatttatcaacgtccttagaaagaattcttctagagaaaaagggatctaggaatgctgaaagattacccaacataccattatagtctcttctttctgagaaaatgtgaaaccagaattgcaagactgggtggactagaaagggagattagatcagttttctcttaatatgtcaaggaaggtagccgggcatggtgccaggcacctgtaggaaaatccagcaggtggaggttgcagtgagccaagattatgccattgcactccagcctgggtgacaaagcaagactccatctcaaaaaaaaaaaaaaatcaaggaaggataaaaggaagttcagtattgtaccacacttggaacttcctccatttcttccattttagaaggatatgaacctggaacttttgatgattctaagccttaaactatcaaaaagatcagggattgccaatgcttctaatggcactgcaagtatatgccataaccgttccctcctaaaagtgaaaaatgagagaaattcagtattttcccaggctcagcatccagaagtctagctctgggctggaagaaaagggtactaatatttagggaagagatgagaataagtagtgggtggcaggagagggctgagctagtgcctgctaacattttagttgtatcttggaaagatttagcaaaaataactcaccaggatagctgctgaagagttgatgaatgggagaagaaagatgtttgagaaataaagaaaacagcagcctgcaatacaataacttgcctttttaatagttttgattactcttgatacctacagcacaaatgctggacctgaatcagctcttcaaggaccctagcacaaatgtcaactgatcacctctgggagagtagaaaacttttttttttttgagacgaagtctcgctctgttgcccaggctggagtgcagtggcaccatctcagctcactgcagcgtccgcctcttgggttcaagtgattctcctgccttgtcctcctgagtcgctggtattacaggtgcctgccatcacacccagctaatttttggagttctgatagagacagggtttctccatgttggccaggcttgtctcaagctcctgacctcaagtgacctacccacccttggcctcccacagtgctggaagccactgcacctggctcagaatacttttttttttgagatgcagtcttgctctcatcacgcaggctggagtgcagtggcgtatctcggctcactgcgacctccacctcccgagttcaagcgattctccttcctcagtcccccaagtagcttggattataggtgtgcgccaccacgtacagctaatttttgtatttttagtagagatggggtttcgccatgttgaccaggctggtctcaaaacgcctgacctcaggtgatccacccacctcggccccacaaagtgctaggattacaggtgtgagccaccatgcccggcccagaatactttttaaaagaagagcaggttagaggaaagaaaaaaattgatgctgaatgtggtgatgaaagcatgtttctaaaatgggaagcagatgcttaaagaggaaagactaatctgggattttgccccatttctctggtttttcactcctatatttaattctcacaatcgtgtcgtcacatagtgcaaaaaacaaaattcttgtaaagtccccaggagtttatgcttgggtgaaagttttagcctgagtattttcttcctctaaaaaaggtgggaaatgagacattgaggaattaacatataaatgtctgctatgggtttaagagaactggcgtatttggaatgcttcttacactaacactgtctcattgtaaaatataaaaccccttactctaactacatttttattcctctggtagtgtggtatccaggcaacatatcacttctgctatgtaattctaagaattctcatttctagagtacctgagccaaacaaatacacaacggaagctgcagctgtatcatcactagcaatttgctcatcattatttactacctttgaacctaaggtttcctgcctatgcttttgaaagcaaaaatcagtctcctttgcatgaaaaagagccttagatttttaaacatgttagttaccagaatgctaaaataccagttgattacccaaattattttggaaatctatccataatggaagtctacaacaaacacataaaacagattacactaagagctgagaaattcaaaggaactgaagattctgagagataaactgttcaagtcttagcaatgatactgcacttctctttgacaggttctgggcttaagttagaggccctactggttccaaaccatattccactgactttgcaagtaaaataaatttgattctgaaataggaaacaaaaaaaggagaaataaccgaatagtagaagaaaaactgtttgtaggaagacgatgcagatggaatgatgtggacattgagtaaccatgtcaataaaatatataaaccaaacttaaatttgtgaaataag

SEQ ID NO: 6849 - protein, 373 aa, Homo sapiens; identical to SEQ ID NO: 926

SEQ ID NO: 6850 - DNA, 495 bp, Homo sapiens
gctctccaagatattcccactttgtggatgaggaacctggggctctgaggaattaaggaacttgccaaagaccataaaactcctaagtgacagagccaggattctgccagctgtctggttgcccagtggagtctctgtccatcttgtcaccagcccccgcactgtgtacaggaatggaatcagcattcattgctataaactgcagtaaggtcaaggaggcagaatttgctgcaaggaagtaaagagtcccttctacctttgccagtgctacttaccagttaaaaaaagacatcgttttttgtgatccatactcctgaaggccaaaagcacccagtggacagacgatggctcttacgcctccaatgccaaggcaaatggtcagcagtgctacataaaacagcctgtgctgctctgtttttgctggatggagccttctttgccacaaacagagttgagaaagctggggacagaggagtgtgagtggaaggagagggg

SEQ ID NO: 6851 - protein, 65 aa, Homo sapiens
KKTSFFVIHTPEGQKHPVDRRWLLRLQCQGKWSAVLHKTACAALFLLDGAFFATNRVEKAGDRGV

SEQ ID NO: 6852 - DNA, 903 bp, Homo sapiens
tcgtgacaaagcaaattgtctggtatcatgaatttggaacaccattccagaccaaaattgaaaaaatggttgacctcacccaggtaatggatgatgaagtattcatggcttttgcatcctatgcaacaattattctttcaaaaatgatgcttatgagtactgcaactgcattctatagattgacaagaaaggtttttgccaatccagaagactgtgtagcatttggcaaaggagaaaatgccaagaagtatcttcgaacagatgacagagtagaacgtgtacgcagagcccacctgaatgaccttgaaaatattattccatttcttggaattggcctcctgtattccttgagtggtcccgacccctctacagccatcctgcacttcagactatttgtcggagcacggatctaccacaccattgcatatttgacaccccttccccagccaaatagagctttgagtttttttgttggatatggagttactctttccatggcttacaggttgctgaaaagtaaattgtacctgtaaagaaaatcatacaactcagcatccagttggctttttaagaattctgtacttccaatttataatgaatactttcttagattttaggtaggaggggagcagaggaattatgaactggggtaaacccattttgaatattagcattgccaatatcctgtattcttgttttacatttggattagaaatttaacatagtaattcttaagtcttttgtctgatttttaaagtactttcttataaatttggatcatgttatgatttgtaacattcacacaacacctcacttttgaatctataaaagaattgcacgtatgagaaacctatatttcaatactgctgaaacagacatgaaataaagaatttaaagaatgat

SEQ ID NO: 6853 - protein, 155 aa, Homo sapiens; identical to SEQ ID NO: 928

SEQ ID NO: 6854 - DNA, 965 bp, Homo sapiens
actggagaggggcggtgcctgcgtccggcccgcgcggccacagtccctgcattgcgcgcgacccggcggcgggacaggcttgctgcttcctcctcctcggcctcaccattccagaccaaaattgaaaaaatggttgacctcacccaggtaatggatgatgaagtattcatggcttttgcatcctatgcaacaattattctttcaaaaatgatgcttatgagtactgcaactgcattctatagattgacaagaaaggtttttgccaatccagaagactgtgtagcatttggcaaaggagaaaatgccaagaagtatcttcgaacagatgacagagtagaacgtgtacgcagagcccacctgaatgaccttgaaaatattattccatttcttggaattggcctcctgtattccttgagtggtcccgacccctctacagccatcctgcacttcagactatttgtcggagcacggatctaccacaccattgcatatttgacaccccttccccagccaaatagagctttgagtttttttgttggatatggagttactctttccatggcttacaggttgctgaaaagtaaattgtacctgtaaagaaaatcatacaactcagcatccagttggctttttaagaattctgtacttccaatttataatgaatactttcttagattttaggtaggaggggagcagaggaattatgaactggggtaaacccattttgaatattagcattgccaatatcctgtattcttgttttacatttggattagaaatttaacatagtaattcttaagtcttttgtctgatttttaaagtactttcttataaatttggatcatgttatgatttgtaacattcacacaacacctcacttttgaatctataaaagaattgcacgtatgagaaacctatatttcaatactgctgaaacagacatgaaataaagaatttaaagaatg

SEQ ID NO: 6855 - protein, 155 aa, Homo sapiens; identical to SEQ ID NO: 928

SEQ ID NO: 6856 - DNA, 1022 bp, Homo sapiens
actggagaggggcggtgcctgcgtccggcccgcgcggccacagtccctgcattgcgcgcgacccggcggcgggacaggcttgctgcttcctcctcctcggcctcaccattccagaccaaaattgaaaaaatggttgacctcacccaggtaatggatgatgaagtattcatggcttttgcatcctatgcaacaattattctttcaaaaatgatgcttatgagtactgcaactgcattctatagattgacaagaaaggtttttgccaatccagaagactgtgtagcatttggcaaaggagaaaatgccaagaagtatcttcgaacagatgacagagtagaacgtgtacgcagagcccacctgaatgaccttgaaaatattattccatttcttggaattggcctcctgtattccttgagtggtcccgacccctctacagccatcctgcacttcagactatttgtcggagcacggatctaccacaccattgcatatttgacaccccttccccagccaaatagagctttgagtttttttgttggatatggagttactctttccatggcttacaggttgctgaaaagtaaattgtacctgtaaagaaaatcatacaactcagcatccagttggctttttaagaattctgtacttccaatttataatgaatactttcttagattttaggtaggaggggagcagaggaattatgaactggggtaaacccattttgaatattagcattgccaatatcctgtattcttgttttacatttggattagaaatttaacatagtaattcttaagtcttttgtctgatttttaaagtactttcttataaatttggatcatgttatgatttgtaacattcacacaacacctcacttttgaatctataaaagaattgcacgtatgagaaacctatatttcaatactgctgaaacagacatgaaataaagaatttaaagaatgattttgtttggttttatttttcccaacattttattttcaaaagtttcaaacctaggg

SEQ ID NO: 6857 - protein, 155 aa, Homo sapiens; identical to SEQ ID NO: 928

SEQ ID NO: 6858 - DNA, 833 bp, Homo sapiens
acagtccctgcattgcgcgcgacccggcggcgggacaggcttgctgcttcctcctcctcggcctcaccattccagaccaaaattgaaaaaatggttgacctcacccaggtaatggatgatgaagtattcatggcttttgcatcctatgcaacaattattctttcaaaaatgatgcttatgagtactgcaactgcattctatagattgacaagaaagagcccacctgaatgaccttgaaaatattattccatttcttggaattggcctcctgtattccttgagtggtcccgacccctctacagccatcctgcacttcagactatttgtcggagcacggatctaccacaccattgcatatttgacaccccttccccagccaaatagagctttgagtttttttgttggatatggagttactctttccatggcttacaggttgctgaaaagtaaattgtacctgtaaagaaaatcatacaactcagcatccagttggctttttaagaattctgtacttccaatttataatgaatactttcttagattttaggtaggaggggagcagaggaattatgaactggggtaaacccattttgaatattagcattgccaatatcctgtattcttgttttacatttggattagaaatttaacatagtaattcttaagtcttttgtctgatttttaaagtactttcttataaatttggatcatgttatgatttgtaacattcacacaacacctcacttttgaatctataaaagaattgcacgtatgagaaacctatatttcaatactgctgaaacagacatgaaataaagaatttaaagaatgat

SEQ ID NO: 6859 - protein, 46 aa, Homo sapiens
MVDLTQVMDDEVFMAFASYATIILSKMMLMSTATAFYRLTRKSPPE

SEQ ID NO: 6860 - DNA, 1070 bp, Homo sapiens
agtccctgcattgcgcgcgacccggcggcgggacaggcttgctgcttcctcctcctcggcctcaccattccagaccaaaattgaaaaaatggttgacctcacccaggtaatggatgatgaagtattcatggcttttgcatcctatgcaacaattattctttcaaaaatgatgcttatgagtactgcaactgcattctatagattgacaagaaaggtttttgccaatccagaagactgtgtagcatttggcaaaggagaaaatgccaagaagtatcttcgaacagatgacagagtagaacgtgtacgcagtcattgtaaagctgttacgattagcatatttgaacggcagagccagaatggggctacaaatgaagtgaaaagtatgctttaccgtgtgcaacaattgtgaaagttaatacatacacatatggaacaattaactaaaaacttaagagcccacctgaatgaccttgaaaatattattccatttcttggaattggcctcctgtattccttgagtggtcccgacccctctacagccatcctgcacttcagactatttgtcggagcacggatctaccacaccattgcatatttgacaccccttccccagccaaatagagctttgagtttttttgttggatatggagttactctttccatggcttacaggttgctgaaaagtaaattgtacctgtaaagaaaatcatacaactcagcatccagttggctttttaagaattctgtacttccaatttataatgaatactttcttagattttaggtaggaggggagcagaggaattatgaactggggtaaacccattttgaatattagcattgccaatatcctgtattcttgttttacatttggattagaaatttaacatagtaattcttaagtcttttgtctgatttttaaagtactttcttataaatttggatcatgttatgatttgtaacattcacacaacacctcacttttgaatctataaaagaattgcacgtatgagaaacctatatttcaatactgctgaaacagacatgaaataaagaatttaaagaatgat

SEQ ID NO: 6861 - protein, 106 aa, Homo sapiens
MVDLTQVMDDEVFMAFASYATIILSKMMLMSTATAFYRLTRKVFANPEDCVAFGKGENAKKYLRTDDRVERVRSHCKAVTISIFERQSQNGATNEVKSMLYRVQQL

SEQ ID NO: 6862 - DNA, 581 bp, Homo sapiens
agtccctgcattgcgcgcgacccggcggcgggacaggcttgctgcttcctcctcctcggcctcaccattccagaccaaaattgaaaaaatggttgacctcacccaggtaatggatgatgaagtattcatggcttttgcatcctatgcaacaattattctttcaaaaatgatgcttatgagtactgcaactgcattctatagattgacaagaaaggtttttgccaatccagaagactgtgtagcatttggcaaaggagaaaatgccaagaagtatcttcgaacagatgacagagtagaacgtgtacgcagacggagttttgttcttgttgtccaggatggagtgcaatggcatgatctcagctcaccgcaacctctgcctcccggattcaagtgattctcctgcctcagcctcttgatagctgggattacaggtctgccatagcaactcaagtaatgcaactttactcagcatggaccgtcactttctccagacttctaagagatgccatagcagaaaatttatgcctttccctgcagtccttgtcaagtgttaaatcccatggccttatatcctgagagga

SEQ ID NO: 6863 - protein, 101 aa, Homo sapiens
MVDLTQVMDDEVFMAFASYATIILSKMMLMSTATAFYRLTRKVFANPEDCVAFGKGENAKKYLRTDDRVERVRRRSFVLVVQDGVQWHDLSSPQPLPPGFK

SEQ ID NO: 6864 - DNA, 343 bp, Homo sapiens
ccggcggcgggacaggcttgctgcttcctcctcctcggcctcaccattccagaccaaaattgaaaaaatggttgacctcacccaggtaatggatgatgaagtattcatggcttttgcatcctatgcaacaattattctttcaaaaatgatgcttatgagtactgcaactgcattctatagattgacaagaaagggcacaggagatcttaggcccagaaaggcagattcagaagaacctacatgtaaatgagactggagtggaaatgagaatggcaggaaatgcatggaaacagacttgtaactgtctcatggcctggtcgtccaaatcccagaggttagtcca

SEQ ID NO: 6865 - protein, 60 aa, Homo sapiens
MVDLTQVMDDEVFMAFASYATIILSKMMLMSTATAFYRLTRKGTGDLRPRKADSEEPTCK

SEQ ID NO: 6866 - DNA, 981 bp, Homo sapiens
ggcagatggaagacttgggggggtctctgccagctggaagtgcttggctccacttagcagctaaacttagcttttcaatcgatcgcttttgaaagggaattgtatttctgtccccgtgcggattccagaccaaaattgaaaaaatggttgacctcacccaggtaatggatgatgaagtattcatggcttttgcatcctatgcaacaattattctttcaaaaatgatgcttatgagtactgcaactgcattctatagattgacaagaaaggtttttgccaatccagaagactgtgtagcatttggcaaaggagaaaatgccaagaagtatcttcgaacagatgacagagtagaacgtgtacgcagagcccacctgaatgaccttgaaaatattattccatttcttggaattggcctcctgtattccttgagtggtcccgacccctctacagccatcctgcacttcagactatttgtcggagcacggatctaccacaccattgcatatttgacaccccttccccagccaaatagagctttgagtttttttgttggatatggagttactctttccatggcttacaggttgctgaaaagtaaattgtacctgtaaagaaaatcatacaactcagcatccagttggctttttaagaattctgtacttccaatttataatgaatactttcttagattttaggtaggaggggagcagaggaattatgaactggggtaaacccattttgaatattagcattgccaatatcctgtattcttgttttacatttggattagaaatttaacatagtaattcttaagtcttttgtctgatttttaaagtactttcttataaatttggatcatgttatgatttgtaacattcacacaacacctcacttttgaatctataaaagaattgcacgtatgagaaacctatatttcaatactgctgaaacagacatgaaataaagaatttaaagaatgat

SEQ ID NO: 6867 - protein, 155 aa, Homo sapiens; identical to SEQ ID NO: 928

SEQ ID NO: 6868 - DNA, 886 bp, Homo sapiens
ggcagatggaagacttgggggggtctctgccagctggaagtgcttggctccacttagcagctaaacttagcttttcaatcgatcgcttttgaaagggaattgtatttctgtccccgtgcggattccagaccaaaattgaaaaaatggttgacctcacccaggtaatggatgatgaagtattcatggcttttgcatcctatgcaacaattattctttcaaaaatgatgcttatgagtactgcaactgcattctatagattgacaagaaagagcccacctgaatgaccttgaaaatattattccatttcttggaattggcctcctgtattccttgagtggtcccgacccctctacagccatcctgcacttcagactatttgtcggagcacggatctaccacaccattgcatatttgacaccccttccccagccaaatagagctttgagtttttttgttggatatggagttactctttccatggcttacaggttgctgaaaagtaaattgtacctgtaaagaaaatcatacaactcagcatccagttggctttttaagaattctgtacttccaatttataatgaatactttcttagattttaggtaggaggggagcagaggaattatgaactggggtaaacccattttgaatattagcattgccaatatcctgtattcttgttttacatttggattagaaatttaacatagtaattcttaagtcttttgtctgatttttaaagtactttcttataaatttggatcatgttatgatttgtaacattcacacaacacctcacttttgaatctataaaagaattgcacgtatgagaaacctatatttcaatactgctgaaacagacatgaaataaagaatttaaagaatgat

SEQ ID NO: 6869 - protein, 46 aa, Homo sapiens; identical to SEQ ID NO: 6859

SEQ ID NO: 6870 - DNA, 911 bp, Homo sapiens
gaattcaagtcctaaagcctacagttttgaatactactgaaatgacaagttattccagaccaaaattgaaaaaatggttgacctcacccaggtaatggatgatgaagtattcatggcttttgcatcctatgcaacaattattctttcaaaaatgatgcttatgagtactgcaactgcattctatagattgacaagaaaggtttttgccaatccagaagactgtgtagcatttggcaaaggagaaaatgccaagaagtatcttcgaacagatgacagagtagaacgtgtacgcagagcccacctgaatgaccttgaaaatattattccatttcttggaattggcctcctgtattccttgagtggtcccgacccctctacagccatcctgcacttcagactatttgtcggagcacggatctaccacaccattgcatatttgacaccccttccccagccaaatagagctttgagtttttttgttggatatggagttactctttccatggcttacaggttgctgaaaagtaaattgtacctgtaaagaaaatcatacaactcagcatccagttggctttttaagaattctgtacttccaatttataatgaatactttcttagattttaggtaggaggggagcagaggaattatgaactggggtaaacccattttgaatattagcattgccaatatcctgtattcttgttttacatttggattagaaatttaacatagtaattcttaagtcttttgtctgatttttaaagtactttcttataaatttggatcatgttatgatttgtaacattcacacaacacctcacttttgaatctataaaagaattgcacgtatgagaaacctatatttcaatactgctgaaacagacatgaaataaagaatttaaagaatgat

SEQ ID NO: 6871 - protein, 155 aa, Homo sapiens; identical to SEQ ID NO: 928

SEQ ID NO: 6872 - DNA, 806 bp, Homo sapiens
ctgcctcagcctcacaaagcgctggaattacaggtgtgagctattgctcctggccagtatttgaaataagttttttttcttggtatttggataggtttttgccaatccagaagactgtgtagcatttggcaaaggagaaaatgccaagaagtatcttcgaacagatgacagagtagaacgtgtacgcagagcccacctgaatgaccttgaaaatattattccatttcttggaattggcctcctgtattccttgagtggtcccgacccctctacagccatcctgcacttcagactatttgtcggagcacggatctaccacaccattgcatatttgacaccccttccccagccaaatagagctttgagtttttttgttggatatggagttactctttccatggcttacaggttgctgaaaagtaaattgtacctgtaaagaaaatcatacaactcagcatccagttggctttttaagaattctgtacttccaatttataatgaatactttcttagattttaggtaggaggggagcagaggaattatgaactggggtaaacccattttgaatattagcattgccaatatcctgtattcttgttttacatttggattagaaatttaacatagtaattcttaagtcttttgtctgatttttaaagtactttcttataaatttggatcatgttatgatttgtaacattcacacaacacctcacttttgaatctataaaagaattgcacgtatgagaaacctatatttcaatactgctgaaacagacatgaaataaagaatttaaagaatgat

SEQ ID NO: 6873 - protein, 48 aa, Homo sapiens
KYYSISWNWPPVFLEWSRPLYSHPALQTICRSTDLPHHCIFDTPSPAK

SEQ ID NO: 6874 - DNA, 2152 bp, Homo sapiens
acaactaactcagcaatggtgggcgcccctcccccagcctcgctgctgccttgcagtttgatctcggactgctgtgctagcaatgagcgagactccgtgggcatgggaccctccgagccaggtgcgagatataatctcctggtgtgccttgttttaagcccattggaaaagcacagtattagagtgggagagacctgattttccaggtgccgtctctcacccctttctttgactaggaaagggaattccctgaccccttgcacttcctgggtgaggcgatgcctcgccttgctttggctcgtgcacggtgcactgcacccactgacctgcgcctactgtctggcactccccagcgagatgaacctggtacctcagttggaaatgcagaaatcacccgttttctgcctcactcacgctgggagctgtagaccggagctgttcctattcggccatcttggcttctctctgagctaatacttttaaaatattttgcactccacagaggaaggttttatatgtaagtctgagttttgtttttctgagttgttttcagttggtccatgtgattacatttttatacatggtaaaaatttatatatttttttccaagtctttttctttttcttttcttttcttttttctttttatttttgagacggagttttgttcttgttgtccaggatggagtgcaatggcatgatctcagctcaccgcaacctctgcctcccggattcaagtgattctcctgcctcagcctcttgagtagctgggattacaggtctagtggcacttgaatctttagcacaacagggagcctctgtgcccagggttcagtggcttccaggaattcttcccagaataaacctcaacattctgcagtcttcatgggtgctggcgcaagttgcttttcaagttcttcatactctactgacctcagacttcttctcagcccgaggaaaacagcttcctcttcctcctggccattcaccaagacacaccattctcttctctccttgtccagggcgcttagcatggtcacttccaaagtttgtgcattttcaaaagaaaatgaagacatccttccatgctgttgcaaacatgccctgaggcaagaaatcacaaaggctctttggaaaacaggaataagtgactgcaggtatgacagaaagtgaaacagaataaatgaaaattaacgccccacagatgtatttatccacaaattttatcataaggtgacttgttggtagtcacataaaaagtagaaaaaaacccctctgaatcaagtattttaaagtattcctgggtatctttcctctaagtctcagattatccacacagggtccacatagttttaagaatagttggcatgcctaggcttaactctgtgggacagtaaatttttttaaaaaaaagcttttgcctgctcttggaagacaatattgtgttcaatatagtgcagtgctccacagcttgtaaaatcaactatgtggcacaaatctgaagacgtcttcaaaagatatatggcaagaaagatatgttgccggctttagtcatctttgccatttctcttatggaatttcactatagtggctggacatgtgcaacccacatcctgtctggccttaatgtgatttttctacaaaaggagaggaggacaaaagtaaaagcaaaatatgctttacaatgaaaaatgcaaccctcagccactgggataaaattacattgacagtgggggagttattttcttccttcaaagaacgatgtttgatgttccaactagactctatggtgatgaagctcataatttgggagctgaatcagattcgaatttagaaaaggggtttcagacgttgcttagcagggtgattttaggggttaacatatgaatagagattacattataactcatctgccctgtgtttgttggacacagcttatatgacctattcctgatggttgctcatagaaggatatttaaattctgttgtaattcttccttataaaatctgtgacattctaatagatagaaaatgtttaaatcttgtctagtttctgcttcgtttccttctttatgttgatttcttcctatttatctcttttgtgcatcacacatatttcactataaactcgatttttgtgggtgaaaggccac

SEQ ID NO: 6875 - protein, 95 aa, Homo sapiens
MGAGASCFSSSSYSTDLRLLLSPRKTASSSSWPFTKTHHSLLSLSRALSMVTSKVCAFSKENEDILPCCCKHALRQEITKALWKTGISDCRYDRK

SEQ ID NO: 6876 - DNA, 4054 bp, Homo sapiens
gagcgagcgagggagccagcgagagagggagggagagaaggaaagaagaggggaggggtgggggcgagaggtaaatagtcttaaatcggaagggagctgcttctctgtggtcttgacaagcgctgcctgggctccgccggctcactaataactgagtgaccttttctttggctgtattatgtctggctgggaagggattgcattttgcagctgagagccggagcttccttcagctcggctcctcgcacgctgctggggtaagttgtcttgaaccaggacggagagagacagcctcggactgcagttgcctaaaaggaggacacctgtggctcagatgcggtcaacaccattgcttggcgtatccttgaggacctcattattttaaacttaaaaaaaaatagacattccctcccccgtcttttttttttttttcaaacaatgcttctttttgacctttcccaaggagaagcgctacaaagcagccactgtgcttactgaacggcctccccctgtatcgcttaattgagaaggtatacaaatgctctcagtccagccagacaccaagccgaaaggttgtgctggctgcaaccgaaagatcaaggaccggtatcttctaaaggcactggacaaatactggcatgaagactgcctgaagtgtgcctgctgtgactgtcgcttgggagaggtgggctccaccctgtacactaaagctaatcttatcctttgtcgcagagactatctgaggctctttggtgtaacgggaaactgcgctgcctgtagtaagctcatccctgcctttgagatggtgatgcgtgccaaggacaatgtttaccacctggactgctttgcatgtcagctttgtaatcagagattttgtgttggagacaaatttttcctaaagaataacatgatcctttgccagacggactacgaggaaggtttaatgaaagaaggttatgcaccccaggttcgctgatctatcaacatcaccccattaagaatacaaagcactacattcttttatcttttttgctccacatgtacataagaattgacacaggaacctactgaatagcgtagatataggaaggcaggatggttatatggaataaaaggcggactgcatctgtatgtagtgaaattgccccagttcagagttgaatgtttattattaaagaaaaaagtaatgtacatatggctggatttttttgcttgctattcgtttttgtgtcacttggcatgagatgtttattttggactattgtatataatgtattgtaatatttgaagcacaaatgtaatacagttttattgtgttaccatttgtgttccatttgcttctttgtattgttgcatttagtacaatcagtgtttaaacttactgtatatttatgctttctgtatttaccagctattttaaatgagctgtaactttctagtaaagaattgaaaagcaaatctcactaatgatacacagatagataaagcaagtctatcaacattaaaaatactaaaaaataaagacacacacagagcattttagtgacatccactacttattgccgctatgagttagagtctatcagtgttcttgttataaccccctattttcagggggttaaaaatcagctttaaaaaaatacataaaaatttcatcttaaagcactttcattttataccaacgtgaaaagtgccatttttagaataactttaaagcttaacaggtttccttttaatatcctttttttgtgtgctctttacttacacaatggctttgttttgctttttcagccacaccccttatgtgaactagtgcctttgggtatcacgtaaaattttttccaaagggttactttaaaaatctgttaccacaattatgagatgatttttaagtgataaattaaacttcttcttgtataaattctgcccagatctctccacaagagctgagggtttcataactttatggcttaataaatgtatgacactgaaaagatttgagtgtgaatctactgaaatcactataatgcacattgaagctatgatggtatttgagtagtgaggttacttttgatcggagcaacataatgctcatagaatcttctagaagaagagaaacaaagggattgataaaatgctgagaactagtgattatatatttttctgtatttacctgacatttattttaatgttcaaaaagtaaacactttaagtttgatgtgttttactctctcattgttttaagtaattgccaactcagaatacatcattcttaggctgaaatttgtctttccattttttaaggtgaaatagtactaccttacgtgatagcatacaaagaagaaagctctagaaagagaaattatggagaatgattatttaaattacaattaaggaaatgagaatatgatcccctcttccgagttgcccacaaacttgcttctttgcttttgctccctgtaatagaactacttttcaacaaatctaattttgcacggcaccgttaaccatattttcactacagcaaacttagtgctatgggttttctttttctttgtttttttcttgatcacttgtataggaaacaatattttccagtgttatttgcatatatattttgtccttccaatatatgcattacagatgaaaattaaatgttatacctgaattcttgggttggggccaaaatattaagctgaaaataatgctggtgtggatttgttttaaaacaaagctttattatgaacatgcatgtgaatctggatattgcctcttatttttaagaaaatggttctgtgaaaagtgaatgatatgtatttttccaaatgcttcatggttaggagtcttcaagttccatgttccccagatttgagatatactaaagaaagaaattcaaaagtagctatttggggcccacaaaaataactattattttagccttagagccttacacttgtttcatgaagagaaaggacttgcataaccaaaataaacaaagcaagacaaattaaaaatatgtgggggagagatcagtgaaaagtggttttcttaatgcagccctgctggtccccattaacaattgcttgaaattcacatggatgtaaaattataattgtcaggatcttattcagatgatcttttaaggtttaactggttttgcttttgtttatctatatgtcaaaatacttgtaaattgggaacaaacttctctcagcttcttgaagttgttcaactatccttgccactggaagaccaaacaaggttttcactgctttttcttttacataatatgctgagaattatttcttatgctttttactacaaacaaaattactcacctggattaaagattaaggccttaatctgtttagattatctttaatctccatgaaatcgtgaaataagacaagaatagtgtttcagctgtaggccattttacagctaattgcccataaattgtagcatttattgacctgaagtactaagctaattgtcttgactactcaaagcccctgaattgttgtcaactttcccctttgtgttgtgtagccctaacgtcatttagcttgttgtctgatgcctccagtaggacacctccgatggagctttgatttctgagcagcgaaagctcccttcctaagatgcatctcgcataggctgcctatgatgaaggaccgtgcacctccactccaacagagtgctgagtttaaaagttgacctgtgtttgtaatttcactttcatcttgcttaataaatatctgctggattctttcattcacttttttacatttggatttatgtttttaataaaaggggtgttacactatttgattgcacttaattggcaaaatttaagatgatctctagaaagcatatgttaagtccatgaaaagaaaaaaaaggtgtgtaaggacatttactttctaaagctaagtcataacaagcatagacaaagcaccccaaatgtttctctgaatgtaatgtttaggatctctgcgctaggtcgtttaccgctatttatttttatggggaaaataaaactctcaaaaatgaa

SEQ ID NO: 6877 - protein, 145 aa, Homo sapiens; identical to SEQ ID NO: 936

SEQ ID NO: 6878 - DNA, 3642 bp, Homo sapiens
gtcgactcctgcagaggtcacattttgtgtgcgggtttgtccccagcgtttgagaagcgctacaaagcagccactgtgcttactgaacggcctccccctgtatcgcttaattgagaaggtatacaaatgctctcagtccagccagacaccaagccgaaaggttgtgctggctgcaaccgaaagatcaaggaccggtatcttctaaaggcactggacaaatactggcatgaagactgcctgaagtgtgcctgctgtgactgtcgcttgggagaggtgggctccaccctgtacactaaagctaatcttatcctttgtcgcagagactatctgaggctctttggtgtaacgggaaactgcgctgcctgtagtaagctcatccctgcctttgagatggtgatgcgtgccaaggacaatgtttaccacctggactgctttgcatgtcagctttgtaatcagagattttgtgttggagacaaatttttcctaaagaataacatgatcctttgccagacggactacgaggaaggtttaatgaaagaaggttatgcaccccaggttcgctgatctatcaacatcaccccattaagaatacaaagcactacattcttttatcttttttgctccacatgtacataagaattgacacaggaacctactgaatagcgtagatataggaaggcaggatggttatatggaataaaaggcggactgcatctgtatgtagtgaaattgccccagttcagagttgaatgtttattattaaagaaaaaagtaatgtacatatggctggatttttttgcttgctattcgtttttgtgtcacttggcatgagatgtttattttggactattgtatataatgtattgtaatatttgaagcacaaatgtaatacagttttattgtgttaccatttgtgttccatttgcttctttgtattgttgcatttagtacaatcagtgtttaaacttactgtatatttatgctttctgtatttaccagctattttaaatgagctgtaactttctagtaaagaattgaaaagcaaatctcactaatgatacacagatagataaagcaagtctatcaacattaaaaatactaaaaaataaagacacacacagagcattttagtgacatccactacttattgccgctatgagttagagtctatcagtgttcttgttataaccccctattttcagggggttaaaaatcagctttaaaaaaatacataaaaatttcatcttaaagcactttcattttataccaacgtgaaaagtgccatttttagaataactttaaagcttaacaggtttccttttaatatcctttttttgtgtgctctttacttacacaatggctttgttttgctttttcagccacaccccttatgtgaactagtgcctttgggtatcacgtaaaattttttccaaagggttactttaaaaatctgttaccacaattatgagatgatttttaagtgataaattaaacttcttcttgtataaattctgcccagatctctccacaagagctgagggtttcataactttatggcttaataaatgtatgacactgaaaagatttgagtgtgaatctactgaaatcactataatgcacattgaagctatgatggtatttgagtagtgaggttacttttgatcggagcaacataatgctcatagaatcttctagaagaagagaaacaaagggattgataaaatgctgagaactagtgattatatatttttctgtatttacctgacatttattttaatgttcaaaaagtaaacactttaagtttgatgtgttttactctctcattgttttaagtaattgccaactcagaatacatcattcttaggctgaaatttgtctttccattttttaaggtgaaatagtactaccttacgtgatagcatacaaagaagaaagctctagaaagagaaattatggagaatgattatttaaattacaattaaggaaatgagaatatgatcccctcttccgagttgcccacaaacttgcttctttgcttttgctccctgtaatagaactacttttcaacaaatctaattttgcacggcaccgttaaccatattttcactacagcaaacttagtgctatgggttttctttttctttgtttttttcttgatcacttgtataggaaacaatattttccagtgttatttgcatatatattttgtccttccaatatatgcattacagatgaaaattaaatgttatacctgaattcttgggttggggccaaaatattaagctgaaaataatgctggtgtggatttgttttaaaacaaagctttattatgaacatgcatgtgaatctggatattgcctcttatttttaagaaaatggttctgtgaaaagtgaatgatatgtatttttccaaatgcttcatggttaggagtcttcaagttccatgttccccagatttgagatatactaaagaaagaaattcaaaagtagctatttggggcccacaaaaataactattattttagccttagagccttacacttgtttcatgaagagaaaggacttgcataaccaaaataaacaaagcaagacaaattaaaaatatgtgggggagagatcagtgaaaagtggttttcttaatgcagccctgctggtccccattaacaattgcttgaaattcacatggatgtaaaattataattgtcaggatcttattcagatgatcttttaaggtttaactggttttgcttttgtttatctatatgtcaaaatacttgtaaattgggaacaaacttctctcagcttcttgaagttgttcaactatccttgccactggaagaccaaacaaggttttcactgctttttcttttacataatatgctgagaattatttcttatgctttttactacaaacaaaattactcacctggattaaagattaaggccttaatctgtttagattatctttaatctccatgaaatcgtgaaataagacaagaatagtgtttcagctgtaggccattttacagctaattgcccataaattgtagcatttattgacctgaagtactaagctaattgtcttgactactcaaagcccctgaattgttgtcaactttcccctttgtgttgtgtagccctaacgtcatttagcttgttgtctgatgcctccagtaggacacctccgatggagctttgatttctgagcagcgaaagctcccttcctaagatgcatctcgcataggctgcctatgatgaaggaccgtgcacctccactccaacagagtgctgagtttaaaagttgacctgtgtttgtaatttcactttcatcttgcttaataaatatctgctggattctttcattcacttttttacatttggatttatgtttttaataaaaggggtgttacactatttgattgcacttaattggcaaaatttaagatgatctctagaaagcatatgttaagtccatgaaaagaaaaaaaaggtgtgtaaggacatttactttctaaagctaagtcataacaagcatagacaaagcaccccaaatgtttctctgaatgtaatgtttaggatctctgcgctaggtcgtttaccgctatttatttttatggggaaaataaaactctcaaaaatgaa

SEQ ID NO: 6879 - protein, 145 aa, Homo sapiens; identical to SEQ ID NO: 936

SEQ ID NO: 6880 - DNA, 4019 bp, Homo sapiens
ggtgggggtcagcattagtgaatggagaacaagttcacagtttgggtcttgggccattagaggaagggaggaagggaggaaggagagtgtgtgtgtgatcccctgaaccaggcttgtgtggcggacttgcggagcagcgacttcagagagttcatgaatggaagtcacagacagaccagcgactgcagccacctccaggcatttcttaaaggggagggttgtgtgctttttccagggtattctggtagcagtttgattctcttgcttttattttaatttccataattggtagcttcagaaatggctttggaaggcaatttgctttaaatgtagccacctattccaaaatgccctggttattttaggaaccctacccttttcctccggagctctctcgcaggagttcttcttttggactggtccaggaggagaagcgctacaaagcagccactgtgcttactgaacggcctccccctgtatcgcttaattgagaaggtatacaaatgctctcagtccagccagacaccaagccgaaaggttgtgctggctgcaaccgaaagatcaaggaccggtatcttctaaaggcactggacaaatactggcatgaagactgcctgaagtgtgcctgctgtgactgtcgcttgggagaggtgggctccaccctgtacactaaagctaatcttatcctttgtcgcagagactatctgaggctctttggtgtaacgggaaactgcgctgcctgtagtaagctcatccctgcctttgagatggtgatgcgtgccaaggacaatgtttaccacctggactgctttgcatgtcagctttgtaatcagagattttgtgttggagacaaatttttcctaaagaataacatgatcctttgccagacggactacgaggaaggtttaatgaaagaaggttatgcaccccaggttcgctgatctatcaacatcaccccattaagaatacaaagcactacattcttttatcttttttgctccacatgtacataagaattgacacaggaacctactgaatagcgtagatataggaaggcaggatggttatatggaataaaaggcggactgcatctgtatgtagtgaaattgccccagttcagagttgaatgtttattattaaagaaaaaagtaatgtacatatggctggatttttttgcttgctattcgtttttgtgtcacttggcatgagatgtttattttggactattgtatataatgtattgtaatatttgaagcacaaatgtaatacagttttattgtgttaccatttgtgttccatttgcttctttgtattgttgcatttagtacaatcagtgtttaaacttactgtatatttatgctttctgtatttaccagctattttaaatgagctgtaactttctagtaaagaattgaaaagcaaatctcactaatgatacacagatagataaagcaagtctatcaacattaaaaatactaaaaaataaagacacacacagagcattttagtgacatccactacttattgccgctatgagttagagtctatcagtgttcttgttataaccccctattttcagggggttaaaaatcagctttaaaaaaatacataaaaatttcatcttaaagcactttcattttataccaacgtgaaaagtgccatttttagaataactttaaagcttaacaggtttccttttaatatcctttttttgtgtgctctttacttacacaatggctttgttttgctttttcagccacaccccttatgtgaactagtgcctttgggtatcacgtaaaattttttccaaagggttactttaaaaatctgttaccacaattatgagatgatttttaagtgataaattaaacttcttcttgtataaattctgcccagatctctccacaagagctgagggtttcataactttatggcttaataaatgtatgacactgaaaagatttgagtgtgaatctactgaaatcactataatgcacattgaagctatgatggtatttgagtagtgaggttacttttgatcggagcaacataatgctcatagaatcttctagaagaagagaaacaaagggattgataaaatgctgagaactagtgattatatatttttctgtatttacctgacatttattttaatgttcaaaaagtaaacactttaagtttgatgtgttttactctctcattgttttaagtaattgccaactcagaatacatcattcttaggctgaaatttgtctttccattttttaaggtgaaatagtactaccttacgtgatagcatacaaagaagaaagctctagaaagagaaattatggagaatgattatttaaattacaattaaggaaatgagaatatgatcccctcttccgagttgcccacaaacttgcttctttgcttttgctccctgtaatagaactacttttcaacaaatctaattttgcacggcaccgttaaccatattttcactacagcaaacttagtgctatgggttttctttttctttgtttttttcttgatcacttgtataggaaacaatattttccagtgttatttgcatatatattttgtccttccaatatatgcattacagatgaaaattaaatgttatacctgaattcttgggttggggccaaaatattaagctgaaaataatgctggtgtggatttgttttaaaacaaagctttattatgaacatgcatgtgaatctggatattgcctcttatttttaagaaaatggttctgtgaaaagtgaatgatatgtatttttccaaatgcttcatggttaggagtcttcaagttccatgttccccagatttgagatatactaaagaaagaaattcaaaagtagctatttggggcccacaaaaataactattattttagccttagagccttacacttgtttcatgaagagaaaggacttgcataaccaaaataaacaaagcaagacaaattaaaaatatgtgggggagagatcagtgaaaagtggttttcttaatgcagccctgctggtccccattaacaattgcttgaaattcacatggatgtaaaattataattgtcaggatcttattcagatgatcttttaaggtttaactggttttgcttttgtttatctatatgtcaaaatacttgtaaattgggaacaaacttctctcagcttcttgaagttgttcaactatccttgccactggaagaccaaacaaggttttcactgctttttcttttacataatatgctgagaattatttcttatgctttttactacaaacaaaattactcacctggattaaagattaaggccttaatctgtttagattatctttaatctccatgaaatcgtgaaataagacaagaatagtgtttcagctgtaggccattttacagctaattgcccataaattgtagcatttattgacctgaagtactaagctaattgtcttgactactcaaagcccctgaattgttgtcaactttcccctttgtgttgtgtagccctaacgtcatttagcttgttgtctgatgcctccagtaggacacctccgatggagctttgatttctgagcagcgaaagctcccttcctaagatgcatctcgcataggctgcctatgatgaaggaccgtgcacctccactccaacagagtgctgagtttaaaagttgacctgtgtttgtaatttcactttcatcttgcttaataaatatctgctggattctttcattcacttttttacatttggatttatgtttttaataaaaggggtgttacactatttgattgcacttaattggcaaaatttaagatgatctctagaaagcatatgttaagtccatgaaaagaaaaaaaaggtgtgtaaggacatttactttctaaagctaagtcataacaagcatagacaaagcaccccaaatgtttctctgaatgtaatgtttaggatctctgcgctaggtcgtttaccgctatttatttttatggggaaaataaaactctcaaaaatgaa

SEQ ID NO: 6881 - protein, 145 aa, Homo sapiens; identical to SEQ ID NO: 936

SEQ ID NO: 6882 - DNA, 3599 bp, Homo sapiens
atgtacagaacaagtcaactaaggggttctcattaatctaccgtctgtgaatatcgttatttttcaggagaagcgctacaaagcagccactgtgcttactgaacggcctccccctgtatcgcttaattgagaaggtatacaaatgctctcagtccagccagacaccaagccgaaaggttgtgctggctgcaaccgaaagatcaaggaccggtatcttctaaaggcactggacaaatactggcatgaagactgcctgaagtgtgcctgctgtgactgtcgcttgggagaggctctttggtgtaacgggaaactgcgctgcctgtagtaagctcatccctgcctttgagatggtgatgcgtgccaaggacaatgtttaccacctggactgctttgcatgtcagctttgtaatcagagattttgtgttggagacaaatttttcctaaagaataacatgatcctttgccagacggactacgaggaaggtttaatgaaagaaggttatgcaccccaggttcgctgatctatcaacatcaccccattaagaatacaaagcactacattcttttatcttttttgctccacatgtacataagaattgacacaggaacctactgaatagcgtagatataggaaggcaggatggttatatggaataaaaggcggactgcatctgtatgtagtgaaattgccccagttcagagttgaatgtttattattaaagaaaaaagtaatgtacatatggctggatttttttgcttgctattcgtttttgtgtcacttggcatgagatgtttattttggactattgtatataatgtattgtaatatttgaagcacaaatgtaatacagttttattgtgttaccatttgtgttccatttgcttctttgtattgttgcatttagtacaatcagtgtttaaacttactgtatatttatgctttctgtatttaccagctattttaaatgagctgtaactttctagtaaagaattgaaaagcaaatctcactaatgatacacagatagataaagcaagtctatcaacattaaaaatactaaaaaataaagacacacacagagcattttagtgacatccactacttattgccgctatgagttagagtctatcagtgttcttgttataaccccctattttcagggggttaaaaatcagctttaaaaaaatacataaaaatttcatcttaaagcactttcattttataccaacgtgaaaagtgccatttttagaataactttaaagcttaacaggtttccttttaatatcctttttttgtgtgctctttacttacacaatggctttgttttgctttttcagccacaccccttatgtgaactagtgcctttgggtatcacgtaaaattttttccaaagggttactttaaaaatctgttaccacaattatgagatgatttttaagtgataaattaaacttcttcttgtataaattctgcccagatctctccacaagagctgagggtttcataactttatggcttaataaatgtatgacactgaaaagatttgagtgtgaatctactgaaatcactataatgcacattgaagctatgatggtatttgagtagtgaggttacttttgatcggagcaacataatgctcatagaatcttctagaagaagagaaacaaagggattgataaaatgctgagaactagtgattatatatttttctgtatttacctgacatttattttaatgttcaaaaagtaaacactttaagtttgatgtgttttactctctcattgttttaagtaattgccaactcagaatacatcattcttaggctgaaatttgtctttccattttttaaggtgaaatagtactaccttacgtgatagcatacaaagaagaaagctctagaaagagaaattatggagaatgattatttaaattacaattaaggaaatgagaatatgatcccctcttccgagttgcccacaaacttgcttctttgcttttgctccctgtaatagaactacttttcaacaaatctaattttgcacggcaccgttaaccatattttcactacagcaaacttagtgctatgggttttctttttctttgtttttttcttgatcacttgtataggaaacaatattttccagtgttatttgcatatatattttgtccttccaatatatgcattacagatgaaaattaaatgttatacctgaattcttgggttggggccaaaatattaagctgaaaataatgctggtgtggatttgttttaaaacaaagctttattatgaacatgcatgtgaatctggatattgcctcttatttttaagaaaatggttctgtgaaaagtgaatgatatgtatttttccaaatgcttcatggttaggagtcttcaagttccatgttccccagatttgagatatactaaagaaagaaattcaaaagtagctatttggggcccacaaaaataactattattttagccttagagccttacacttgtttcatgaagagaaaggacttgcataaccaaaataaacaaagcaagacaaattaaaaatatgtgggggagagatcagtgaaaagtggttttcttaatgcagccctgctggtccccattaacaattgcttgaaattcacatggatgtaaaattataattgtcaggatcttattcagatgatcttttaaggtttaactggttttgcttttgtttatctatatgtcaaaatacttgtaaattgggaacaaacttctctcagcttcttgaagttgttcaactatccttgccactggaagaccaaacaaggttttcactgctttttcttttacataatatgctgagaattatttcttatgctttttactacaaacaaaattactcacctggattaaagattaaggccttaatctgtttagattatctttaatctccatgaaatcgtgaaataagacaagaatagtgtttcagctgtaggccattttacagctaattgcccataaattgtagcatttattgacctgaagtactaagctaattgtcttgactactcaaagcccctgaattgttgtcaactttcccctttgtgttgtgtagccctaacgtcatttagcttgttgtctgatgcctccagtaggacacctccgatggagctttgatttctgagcagcgaaagctcccttcctaagatgcatctcgcataggctgcctatgatgaaggaccgtgcacctccactccaacagagtgctgagtttaaaagttgacctgtgtttgtaatttcactttcatcttgcttaataaatatctgctggattctttcattcacttttttacatttggatttatgtttttaataaaaggggtgttacactatttgattgcacttaattggcaaaatttaagatgatctctagaaagcatatgttaagtccatgaaaagaaaaaaaaggtgtgtaaggacatttactttctaaagctaagtcataacaagcatagacaaagcaccccaaatgtttctctgaatgtaatgtttaggatctctgcgctaggtcgtttaccgctatttatttttatggggaaaataaaactctcaaaaatgaa

SEQ ID NO: 6883 - protein, 60 aa, Homo sapiens
MLSVQPDTKPKGCAGCNRKIKDRYLLKALDKYWHEDCLKCACCDCRLGEALWCNGKLRCL

SEQ ID NO: 6884 - DNA, 3602 bp, Homo sapiens
gtgcggatgggtgaagtgcatgtatgcctgcctagacgggccagaaaagccaaacttaagaaatctgcctatgtacagaacaagtcaactaaggggttctcattaatctaccgtctgtgaatatcgttatttttcaggtatacaaatgctctcagtccagccagacaccaagccgaaaggttgtgctggctgcaaccgaaagatcaaggaccggtatcttctaaaggcactggacaaatactggcatgaagactgcctgaagtgtgcctgctgtgactgtcgcttgggagaggctctttggtgtaacgggaaactgcgctgcctgtagtaagctcatccctgcctttgagatggtgatgcgtgccaaggacaatgtttaccacctggactgctttgcatgtcagctttgtaatcagagattttgtgttggagacaaatttttcctaaagaataacatgatcctttgccagacggactacgaggaaggtttaatgaaagaaggttatgcaccccaggttcgctgatctatcaacatcaccccattaagaatacaaagcactacattcttttatcttttttgctccacatgtacataagaattgacacaggaacctactgaatagcgtagatataggaaggcaggatggttatatggaataaaaggcggactgcatctgtatgtagtgaaattgccccagttcagagttgaatgtttattattaaagaaaaaagtaatgtacatatggctggatttttttgcttgctattcgtttttgtgtcacttggcatgagatgtttattttggactattgtatataatgtattgtaatatttgaagcacaaatgtaatacagttttattgtgttaccatttgtgttccatttgcttctttgtattgttgcatttagtacaatcagtgtttaaacttactgtatatttatgctttctgtatttaccagctattttaaatgagctgtaactttctagtaaagaattgaaaagcaaatctcactaatgatacacagatagataaagcaagtctatcaacattaaaaatactaaaaaataaagacacacacagagcattttagtgacatccactacttattgccgctatgagttagagtctatcagtgttcttgttataaccccctattttcagggggttaaaaatcagctttaaaaaaatacataaaaatttcatcttaaagcactttcattttataccaacgtgaaaagtgccatttttagaataactttaaagcttaacaggtttccttttaatatcctttttttgtgtgctctttacttacacaatggctttgttttgctttttcagccacaccccttatgtgaactagtgcctttgggtatcacgtaaaattttttccaaagggttactttaaaaatctgttaccacaattatgagatgatttttaagtgataaattaaacttcttcttgtataaattctgcccagatctctccacaagagctgagggtttcataactttatggcttaataaatgtatgacactgaaaagatttgagtgtgaatctactgaaatcactataatgcacattgaagctatgatggtatttgagtagtgaggttacttttgatcggagcaacataatgctcatagaatcttctagaagaagagaaacaaagggattgataaaatgctgagaactagtgattatatatttttctgtatttacctgacatttattttaatgttcaaaaagtaaacactttaagtttgatgtgttttactctctcattgttttaagtaattgccaactcagaatacatcattcttaggctgaaatttgtctttccattttttaaggtgaaatagtactaccttacgtgatagcatacaaagaagaaagctctagaaagagaaattatggagaatgattatttaaattacaattaaggaaatgagaatatgatcccctcttccgagttgcccacaaacttgcttctttgcttttgctccctgtaatagaactacttttcaacaaatctaattttgcacggcaccgttaaccatattttcactacagcaaacttagtgctatgggttttctttttctttgtttttttcttgatcacttgtataggaaacaatattttccagtgttatttgcatatatattttgtccttccaatatatgcattacagatgaaaattaaatgttatacctgaattcttgggttggggccaaaatattaagctgaaaataatgctggtgtggatttgttttaaaacaaagctttattatgaacatgcatgtgaatctggatattgcctcttatttttaagaaaatggttctgtgaaaagtgaatgatatgtatttttccaaatgcttcatggttaggagtcttcaagttccatgttccccagatttgagatatactaaagaaagaaattcaaaagtagctatttggggcccacaaaaataactattattttagccttagagccttacacttgtttcatgaagagaaaggacttgcataaccaaaataaacaaagcaagacaaattaaaaatatgtgggggagagatcagtgaaaagtggttttcttaatgcagccctgctggtccccattaacaattgcttgaaattcacatggatgtaaaattataattgtcaggatcttattcagatgatcttttaaggtttaactggttttgcttttgtttatctatatgtcaaaatacttgtaaattgggaacaaacttctctcagcttcttgaagttgttcaactatccttgccactggaagaccaaacaaggttttcactgctttttcttttacataatatgctgagaattatttcttatgctttttactacaaacaaaattactcacctggattaaagattaaggccttaatctgtttagattatctttaatctccatgaaatcgtgaaataagacaagaatagtgtttcagctgtaggccattttacagctaattgcccataaattgtagcatttattgacctgaagtactaagctaattgtcttgactactcaaagcccctgaattgttgtcaactttcccctttgtgttgtgtagccctaacgtcatttagcttgttgtctgatgcctccagtaggacacctccgatggagctttgatttctgagcagcgaaagctcccttcctaagatgcatctcgcataggctgcctatgatgaaggaccgtgcacctccactccaacagagtgctgagtttaaaagttgacctgtgtttgtaatttcactttcatcttgcttaataaatatctgctggattctttcattcacttttttacatttggatttatgtttttaataaaaggggtgttacactatttgattgcacttaattggcaaaatttaagatgatctctagaaagcatatgttaagtccatgaaaagaaaaaaaaggtgtgtaaggacatttactttctaaagctaagtcataacaagcatagacaaagcaccccaaatgtttctctgaatgtaatgtttaggatctctgcgctaggtcgtttaccgctatttatttttatggggaaaataaaactctcaaaaatgaa

SEQ ID NO: 6885 - protein, 60 aa, Homo sapiens; identical to SEQ ID NO: 6883

SEQ ID NO: 6886 - DNA, 3690 bp, Homo sapiens
agagaggtggggtagaacagtggggagctgtgcggatgggtgaagtgcatgtatgcctgcctagacgggccagaaaagccaaacttaagaaatctgcctatgtacagaacaagtcaactaaggggttctcattaatctaccgtctgtgaatatcgttatttttcaggtatacaaatgctctcagtccagccagacaccaagccgaaaggttgtgctggctgcaaccgaaagatcaaggaccggtatcttctaaaggcactggacaaatactggcatgaagactgcctgaagtgtgcctgctgtgactgtcgcttgggagaggtgggctccaccctgtacactaaagctaatcttatcctttgtcgcagagactatctgaggctctttggtgtaacgggaaactgcgctgcctgtagtaagctcatccctgcctttgagatggtgatgcgtgccaaggacaatgtttaccacctggactgctttgcatgtcagctttgtaatcagagattttgtgttggagacaaatttttcctaaagaataacatgatcctttgccagacggactacgaggaaggtttaatgaaagaaggttatgcaccccaggttcgctgatctatcaacatcaccccattaagaatacaaagcactacattcttttatcttttttgctccacatgtacataagaattgacacaggaacctactgaatagcgtagatataggaaggcaggatggttatatggaataaaaggcggactgcatctgtatgtagtgaaattgccccagttcagagttgaatgtttattattaaagaaaaaagtaatgtacatatggctggatttttttgcttgctattcgtttttgtgtcacttggcatgagatgtttattttggactattgtatataatgtattgtaatatttgaagcacaaatgtaatacagttttattgtgttaccatttgtgttccatttgcttctttgtattgttgcatttagtacaatcagtgtttaaacttactgtatatttatgctttctgtatttaccagctattttaaatgagctgtaactttctagtaaagaattgaaaagcaaatctcactaatgatacacagatagataaagcaagtctatcaacattaaaaatactaaaaaataaagacacacacagagcattttagtgacatccactacttattgccgctatgagttagagtctatcagtgttcttgttataaccccctattttcagggggttaaaaatcagctttaaaaaaatacataaaaatttcatcttaaagcactttcattttataccaacgtgaaaagtgccatttttagaataactttaaagcttaacaggtttccttttaatatcctttttttgtgtgctctttacttacacaatggctttgttttgctttttcagccacaccccttatgtgaactagtgcctttgggtatcacgtaaaattttttccaaagggttactttaaaaatctgttaccacaattatgagatgatttttaagtgataaattaaacttcttcttgtataaattctgcccagatctctccacaagagctgagggtttcataactttatggcttaataaatgtatgacactgaaaagatttgagtgtgaatctactgaaatcactataatgcacattgaagctatgatggtatttgagtagtgaggttacttttgatcggagcaacataatgctcatagaatcttctagaagaagagaaacaaagggattgataaaatgctgagaactagtgattatatatttttctgtatttacctgacatttattttaatgttcaaaaagtaaacactttaagtttgatgtgttttactctctcattgttttaagtaattgccaactcagaatacatcattcttaggctgaaatttgtctttccattttttaaggtgaaatagtactaccttacgtgatagcatacaaagaagaaagctctagaaagagaaattatggagaatgattatttaaattacaattaaggaaatgagaatatgatcccctcttccgagttgcccacaaacttgcttctttgcttttgctccctgtaatagaactacttttcaacaaatctaattttgcacggcaccgttaaccatattttcactacagcaaacttagtgctatgggttttctttttctttgtttttttcttgatcacttgtataggaaacaatattttccagtgttatttgcatatatattttgtccttccaatatatgcattacagatgaaaattaaatgttatacctgaattcttgggttggggccaaaatattaagctgaaaataatgctggtgtggatttgttttaaaacaaagctttattatgaacatgcatgtgaatctggatattgcctcttatttttaagaaaatggttctgtgaaaagtgaatgatatgtatttttccaaatgcttcatggttaggagtcttcaagttccatgttccccagatttgagatatactaaagaaagaaattcaaaagtagctatttggggcccacaaaaataactattattttagccttagagccttacacttgtttcatgaagagaaaggacttgcataaccaaaataaacaaagcaagacaaattaaaaatatgtgggggagagatcagtgaaaagtggttttcttaatgcagccctgctggtccccattaacaattgcttgaaattcacatggatgtaaaattataattgtcaggatcttattcagatgatcttttaaggtttaactggttttgcttttgtttatctatatgtcaaaatacttgtaaattgggaacaaacttctctcagcttcttgaagttgttcaactatccttgccactggaagaccaaacaaggttttcactgctttttcttttacataatatgctgagaattatttcttatgctttttactacaaacaaaattactcacctggattaaagattaaggccttaatctgtttagattatctttaatctccatgaaatcgtgaaataagacaagaatagtgtttcagctgtaggccattttacagctaattgcccataaattgtagcatttattgacctgaagtactaagctaattgtcttgactactcaaagcccctgaattgttgtcaactttcccctttgtgttgtgtagccctaacgtcatttagcttgttgtctgatgcctccagtaggacacctccgatggagctttgatttctgagcagcgaaagctcccttcctaagatgcatctcgcataggctgcctatgatgaaggaccgtgcacctccactccaacagagtgctgagtttaaaagttgacctgtgtttgtaatttcactttcatcttgcttaataaatatctgctggattctttcattcacttttttacatttggatttatgtttttaataaaaggggtgttacactatttgattgcacttaattggcaaaatttaagatgatctctagaaagcatatgttaagtccatgaaaagaaaaaaaaggtgtgtaaggacatttactttctaaagctaagtcataacaagcatagacaaagcaccccaaatgtttctctgaatgtaatgtttaggatctctgcgctaggtcgtttaccgctatttatttttatggggaaaataaaactctcaaaaatgaa

SEQ ID NO: 6887 - protein, 145 aa, Homo sapiens; identical to SEQ ID NO: 936

SEQ ID NO: 6888 - DNA, 3332 bp, Homo sapiens
atgtacagaacaagtcaactaaggggttctcattaatctaccgtctgtgaatatcgttatttttcaggagaagcgctacaaagcagccactgtgcttactgaacggcctccccctgtatcgcttaattgagaaggtatacaaatgctctcagtccagccagacaccaagccgaaaggttgtgctggctgcaaccgaaagatcaaggaccggtatcttctaaaggcactggacaaatactggcatgaagactgcctgaagtgtgcctgctgtgactgtcgcttgggagaggctctttggtgtaacgggaaactgcgctgcctgtagtaagctcatccctgcctttgagatggtgatgcgtgccaaggacaatgtttaccacctggactgctttgcatgtcagctttgtaatcagagattttgtgttggagacaaatttttcctaaagaataacatgatcctttgccagacggactacgaggaaggtttaatgaaagaaggttatgcaccccaggttcgctgatctatcaacatcaccccattaagaatacaaagcactacattcttttatcttttttgctccacatgtacataagaattgacacaggaacctactgaatagcgtagatataggaaggcaggatggttatatggaataaaaggcggactgcatctgtatgtagtgaaattgccccagttcagagttgaatgtttattattaaagaaaaaagtaatgtacatatggctggatttttttgcttgctattcgtttttgtgtcacttggcatgagatgtttattttggactattgtatataatgtattgtaatatttgaagcacaaatgtaatacagttttattgtgttaccatttgtgttccatttgcttctttgtattgttgcatttagtacaatcagtgtttaaacttactgtatatttatgctttctgtatttaccagctattttaaatgagctgtaactttctagtaaagaattgaaaagcaaatctcactaatgatacacagatagataaagcaagtctatcaacattaaaaatactaaaaaataaagacacacacagagcattttagtgacatccactacttattgccgctatgagttagagtctatcagtgttcttgttataaccccctattttcagggggttaaaaatcagctttaaaaaaatacataaaaatttcatcttaaagcactttcattttataccaacgtgaaaagtgccatttttagaataactttaaagcttaacaggtttccttttaatatcctttttttgtgtgctctttacttacacaatggctttgttttgctttttcagccacaccccttatgtgaactagtgcctttgggtatcacgtaaaattttttccaaagggttactttaaaaatctgttaccacaattatgagatgatttttaagtgataaattaaacttcttcttgtataaattctgcccagatctctccacaagagctgagggtttcataactttatggcttaataaatgtatgacactgaaaagatttgagtgtgaatctactgaaatcactataatgcacattgaagctatgatggtatttgagtagtgaggttacttttgatcggagcaacataatgctcatagaatcttctagaagaagagaaacaaagggattgataaaatgctgagaactagtgattatatatttttctgtatttacctgacatttattttaatgttcaaaaagtaaacactttaagtttgatgtgttttactctctcattgttttaagtaattgccaactcagaatacatcattcttaggctgaaatttgtctttccattttttaaggtgaaatagtactaccttacgtgatagcatacaaagaagaaagctctagaaagagaaattatggagaatgattatttaaattacaattaaggaaatgagaatatgatcccctcttccgagttgcccacaaacttgcttctttgcttttgctccctgtaatagaactacttttcaacaaatctaattttgcacggcaccgttaaccatattttcactacagcaaacttagtgctatgggttttctttttctttgtttttttcttgatcacttgtataggaaacaatattttccagtgttatttgcatatatattttgtccttccaatatatgcattacagatgaaaattaaatgttatacctgaattcttgggttggggccaaaatattaagctgaaaataatgctggtgtggatttgttttaaaacaaagctttattatgaacatgcatgtgaatctggatattgcctcttatttttaagaaaatggttctgtgaaaagtgaatgatatgtatttttccaaatgcttcatggttaggagtcttcaagttccatgttccccagatttgagatatactaaagaaagaaattcaaaagtagctatttggggcccacaaaaataactattattttagccttagagccttacacttgtttcatgaagagaaaggacttgcataaccaaaataaacaaagcaagacaaattaaaaatatgtgggggagagatcagtgaaaagtggttttcttaatgcagccctgctggtccccattaacaattgcttgaaattcacatggatgtaaaattataattgtcaggatcttattcagatgatcttttaaggtttaactggttttgcttttgtttatctatatgtcaaaatacttgtaaattgggaacaaacttctctcagcttcttgaagttgttcaactatccttgccactggaagaccaaacaaggttttcactgctttttcttttacataatatgctgagaattatttcttatgctttttactacaaacaaaattactcacctggattaaagattaaggccttaatctgtttagattatctttaatctccatgaaatcgtgaaataagacaagaatagtgtttcagctgtaggccattttacagctaattgcccataaattgtagcatttattgacctgaagtactaagctaattgtcttgactactcaaagcccctgaattgttgtcaactttcccctttgtgttgtgtagccctaacgtcatttagcttgttgtctgatgcctccagtaggacacctccgatggagctttgatttctgagcagcgaaagctcccttcctaagatgcatctcgcataggctgcctatgatgaaggaccgtgcacctccactccaacagagtgctgagtttaaaagttgacctgtgtttgtaatttcactttcatcttgcttaataaatatctgctggattctttcattcacttttttac

SEQ ID NO: 6889 - protein, 60 aa, Homo sapiens; identical to SEQ ID NO: 6883

SEQ ID NO: 6890 - DNA, 3335 bp, Homo sapiens
gtgcggatgggtgaagtgcatgtatgcctgcctagacgggccagaaaagccaaacttaagaaatctgcctatgtacagaacaagtcaactaaggggttctcattaatctaccgtctgtgaatatcgttatttttcaggtatacaaatgctctcagtccagccagacaccaagccgaaaggttgtgctggctgcaaccgaaagatcaaggaccggtatcttctaaaggcactggacaaatactggcatgaagactgcctgaagtgtgcctgctgtgactgtcgcttgggagaggctctttggtgtaacgggaaactgcgctgcctgtagtaagctcatccctgcctttgagatggtgatgcgtgccaaggacaatgtttaccacctggactgctttgcatgtcagctttgtaatcagagattttgtgttggagacaaatttttcctaaagaataacatgatcctttgccagacggactacgaggaaggtttaatgaaagaaggttatgcaccccaggttcgctgatctatcaacatcaccccattaagaatacaaagcactacattcttttatcttttttgctccacatgtacataagaattgacacaggaacctactgaatagcgtagatataggaaggcaggatggttatatggaataaaaggcggactgcatctgtatgtagtgaaattgccccagttcagagttgaatgtttattattaaagaaaaaagtaatgtacatatggctggatttttttgcttgctattcgtttttgtgtcacttggcatgagatgtttattttggactattgtatataatgtattgtaatatttgaagcacaaatgtaatacagttttattgtgttaccatttgtgttccatttgcttctttgtattgttgcatttagtacaatcagtgtttaaacttactgtatatttatgctttctgtatttaccagctattttaaatgagctgtaactttctagtaaagaattgaaaagcaaatctcactaatgatacacagatagataaagcaagtctatcaacattaaaaatactaaaaaataaagacacacacagagcattttagtgacatccactacttattgccgctatgagttagagtctatcagtgttcttgttataaccccctattttcagggggttaaaaatcagctttaaaaaaatacataaaaatttcatcttaaagcactttcattttataccaacgtgaaaagtgccatttttagaataactttaaagcttaacaggtttccttttaatatcctttttttgtgtgctctttacttacacaatggctttgttttgctttttcagccacaccccttatgtgaactagtgcctttgggtatcacgtaaaattttttccaaagggttactttaaaaatctgttaccacaattatgagatgatttttaagtgataaattaaacttcttcttgtataaattctgcccagatctctccacaagagctgagggtttcataactttatggcttaataaatgtatgacactgaaaagatttgagtgtgaatctactgaaatcactataatgcacattgaagctatgatggtatttgagtagtgaggttacttttgatcggagcaacataatgctcatagaatcttctagaagaagagaaacaaagggattgataaaatgctgagaactagtgattatatatttttctgtatttacctgacatttattttaatgttcaaaaagtaaacactttaagtttgatgtgttttactctctcattgttttaagtaattgccaactcagaatacatcattcttaggctgaaatttgtctttccattttttaaggtgaaatagtactaccttacgtgatagcatacaaagaagaaagctctagaaagagaaattatggagaatgattatttaaattacaattaaggaaatgagaatatgatcccctcttccgagttgcccacaaacttgcttctttgcttttgctccctgtaatagaactacttttcaacaaatctaattttgcacggcaccgttaaccatattttcactacagcaaacttagtgctatgggttttctttttctttgtttttttcttgatcacttgtataggaaacaatattttccagtgttatttgcatatatattttgtccttccaatatatgcattacagatgaaaattaaatgttatacctgaattcttgggttggggccaaaatattaagctgaaaataatgctggtgtggatttgttttaaaacaaagctttattatgaacatgcatgtgaatctggatattgcctcttatttttaagaaaatggttctgtgaaaagtgaatgatatgtatttttccaaatgcttcatggttaggagtcttcaagttccatgttccccagatttgagatatactaaagaaagaaattcaaaagtagctatttggggcccacaaaaataactattattttagccttagagccttacacttgtttcatgaagagaaaggacttgcataaccaaaataaacaaagcaagacaaattaaaaatatgtgggggagagatcagtgaaaagtggttttcttaatgcagccctgctggtccccattaacaattgcttgaaattcacatggatgtaaaattataattgtcaggatcttattcagatgatcttttaaggtttaactggttttgcttttgtttatctatatgtcaaaatacttgtaaattgggaacaaacttctctcagcttcttgaagttgttcaactatccttgccactggaagaccaaacaaggttttcactgctttttcttttacataatatgctgagaattatttcttatgctttttactacaaacaaaattactcacctggattaaagattaaggccttaatctgtttagattatctttaatctccatgaaatcgtgaaataagacaagaatagtgtttcagctgtaggccattttacagctaattgcccataaattgtagcatttattgacctgaagtactaagctaattgtcttgactactcaaagcccctgaattgttgtcaactttcccctttgtgttgtgtagccctaacgtcatttagcttgttgtctgatgcctccagtaggacacctccgatggagctttgatttctgagcagcgaaagctcccttcctaagatgcatctcgcataggctgcctatgatgaaggaccgtgcacctccactccaacagagtgctgagtttaaaagttgacctgtgtttgtaatttcactttcatcttgcttaataaatatctgctggattctttcattcacttttttac

SEQ ID NO: 6891 - protein, 60 aa, Homo sapiens; identical to SEQ ID NO: 6883

SEQ ID NO: 6892 - DNA, 3423 bp, Homo sapiens
agagaggtggggtagaacagtggggagctgtgcggatgggtgaagtgcatgtatgcctgcctagacgggccagaaaagccaaacttaagaaatctgcctatgtacagaacaagtcaactaaggggttctcattaatctaccgtctgtgaatatcgttatttttcaggtatacaaatgctctcagtccagccagacaccaagccgaaaggttgtgctggctgcaaccgaaagatcaaggaccggtatcttctaaaggcactggacaaatactggcatgaagactgcctgaagtgtgcctgctgtgactgtcgcttgggagaggtgggctccaccctgtacactaaagctaatcttatcctttgtcgcagagactatctgaggctctttggtgtaacgggaaactgcgctgcctgtagtaagctcatccctgcctttgagatggtgatgcgtgccaaggacaatgtttaccacctggactgctttgcatgtcagctttgtaatcagagattttgtgttggagacaaatttttcctaaagaataacatgatcctttgccagacggactacgaggaaggtttaatgaaagaaggttatgcaccccaggttcgctgatctatcaacatcaccccattaagaatacaaagcactacattcttttatcttttttgctccacatgtacataagaattgacacaggaacctactgaatagcgtagatataggaaggcaggatggttatatggaataaaaggcggactgcatctgtatgtagtgaaattgccccagttcagagttgaatgtttattattaaagaaaaaagtaatgtacatatggctggatttttttgcttgctattcgtttttgtgtcacttggcatgagatgtttattttggactattgtatataatgtattgtaatatttgaagcacaaatgtaatacagttttattgtgttaccatttgtgttccatttgcttctttgtattgttgcatttagtacaatcagtgtttaaacttactgtatatttatgctttctgtatttaccagctattttaaatgagctgtaactttctagtaaagaattgaaaagcaaatctcactaatgatacacagatagataaagcaagtctatcaacattaaaaatactaaaaaataaagacacacacagagcattttagtgacatccactacttattgccgctatgagttagagtctatcagtgttcttgttataaccccctattttcagggggttaaaaatcagctttaaaaaaatacataaaaatttcatcttaaagcactttcattttataccaacgtgaaaagtgccatttttagaataactttaaagcttaacaggtttccttttaatatcctttttttgtgtgctctttacttacacaatggctttgttttgctttttcagccacaccccttatgtgaactagtgcctttgggtatcacgtaaaattttttccaaagggttactttaaaaatctgttaccacaattatgagatgatttttaagtgataaattaaacttcttcttgtataaattctgcccagatctctccacaagagctgagggtttcataactttatggcttaataaatgtatgacactgaaaagatttgagtgtgaatctactgaaatcactataatgcacattgaagctatgatggtatttgagtagtgaggttacttttgatcggagcaacataatgctcatagaatcttctagaagaagagaaacaaagggattgataaaatgctgagaactagtgattatatatttttctgtatttacctgacatttattttaatgttcaaaaagtaaacactttaagtttgatgtgttttactctctcattgttttaagtaattgccaactcagaatacatcattcttaggctgaaatttgtctttccattttttaaggtgaaatagtactaccttacgtgatagcatacaaagaagaaagctctagaaagagaaattatggagaatgattatttaaattacaattaaggaaatgagaatatgatcccctcttccgagttgcccacaaacttgcttctttgcttttgctccctgtaatagaactacttttcaacaaatctaattttgcacggcaccgttaaccatattttcactacagcaaacttagtgctatgggttttctttttctttgtttttttcttgatcacttgtataggaaacaatattttccagtgttatttgcatatatattttgtccttccaatatatgcattacagatgaaaattaaatgttatacctgaattcttgggttggggccaaaatattaagctgaaaataatgctggtgtggatttgttttaaaacaaagctttattatgaacatgcatgtgaatctggatattgcctcttatttttaagaaaatggttctgtgaaaagtgaatgatatgtatttttccaaatgcttcatggttaggagtcttcaagttccatgttccccagatttgagatatactaaagaaagaaattcaaaagtagctatttggggcccacaaaaataactattattttagccttagagccttacacttgtttcatgaagagaaaggacttgcataaccaaaataaacaaagcaagacaaattaaaaatatgtgggggagagatcagtgaaaagtggttttcttaatgcagccctgctggtccccattaacaattgcttgaaattcacatggatgtaaaattataattgtcaggatcttattcagatgatcttttaaggtttaactggttttgcttttgtttatctatatgtcaaaatacttgtaaattgggaacaaacttctctcagcttcttgaagttgttcaactatccttgccactggaagaccaaacaaggttttcactgctttttcttttacataatatgctgagaattatttcttatgctttttactacaaacaaaattactcacctggattaaagattaaggccttaatctgtttagattatctttaatctccatgaaatcgtgaaataagacaagaatagtgtttcagctgtaggccattttacagctaattgcccataaattgtagcatttattgacctgaagtactaagctaattgtcttgactactcaaagcccctgaattgttgtcaactttcccctttgtgttgtgtagccctaacgtcatttagcttgttgtctgatgcctccagtaggacacctccgatggagctttgatttctgagcagcgaaagctcccttcctaagatgcatctcgcataggctgcctatgatgaaggaccgtgcacctccactccaacagagtgctgagtttaaaagttgacctgtgtttgtaatttcactttcatcttgcttaataaatatctgctggattctttcattcacttttttac

SEQ ID NO: 6893 - protein, 145 aa, Homo sapiens; identical to SEQ ID NO: 936

SEQ ID NO: 6894 - DNA, 3787 bp, Homo sapiens
gagcgagcgagggagccagcgagagagggagggagagaaggaaagaagaggggaggggtgggggcgagaggtaaatagtcttaaatcggaagggagctgcttctctgtggtcttgacaagcgctgcctgggctccgccggctcactaataactgagtgaccttttctttggctgtattatgtctggctgggaagggattgcattttgcagctgagagccggagcttccttcagctcggctcctcgcacgctgctggggtaagttgtcttgaaccaggacggagagagacagcctcggactgcagttgcctaaaaggaggacacctgtggctcagatgcggtcaacaccattgcttggcgtatccttgaggacctcattattttaaacttaaaaaaaaatagacattccctcccccgtcttttttttttttttcaaacaatgcttctttttgacctttcccaaggagaagcgctacaaagcagccactgtgcttactgaacggcctccccctgtatcgcttaattgagaaggtatacaaatgctctcagtccagccagacaccaagccgaaaggttgtgctggctgcaaccgaaagatcaaggaccggtatcttctaaaggcactggacaaatactggcatgaagactgcctgaagtgtgcctgctgtgactgtcgcttgggagaggtgggctccaccctgtacactaaagctaatcttatcctttgtcgcagagactatctgaggctctttggtgtaacgggaaactgcgctgcctgtagtaagctcatccctgcctttgagatggtgatgcgtgccaaggacaatgtttaccacctggactgctttgcatgtcagctttgtaatcagagattttgtgttggagacaaatttttcctaaagaataacatgatcctttgccagacggactacgaggaaggtttaatgaaagaaggttatgcaccccaggttcgctgatctatcaacatcaccccattaagaatacaaagcactacattcttttatcttttttgctccacatgtacataagaattgacacaggaacctactgaatagcgtagatataggaaggcaggatggttatatggaataaaaggcggactgcatctgtatgtagtgaaattgccccagttcagagttgaatgtttattattaaagaaaaaagtaatgtacatatggctggatttttttgcttgctattcgtttttgtgtcacttggcatgagatgtttattttggactattgtatataatgtattgtaatatttgaagcacaaatgtaatacagttttattgtgttaccatttgtgttccatttgcttctttgtattgttgcatttagtacaatcagtgtttaaacttactgtatatttatgctttctgtatttaccagctattttaaatgagctgtaactttctagtaaagaattgaaaagcaaatctcactaatgatacacagatagataaagcaagtctatcaacattaaaaatactaaaaaataaagacacacacagagcattttagtgacatccactacttattgccgctatgagttagagtctatcagtgttcttgttataaccccctattttcagggggttaaaaatcagctttaaaaaaatacataaaaatttcatcttaaagcactttcattttataccaacgtgaaaagtgccatttttagaataactttaaagcttaacaggtttccttttaatatcctttttttgtgtgctctttacttacacaatggctttgttttgctttttcagccacaccccttatgtgaactagtgcctttgggtatcacgtaaaattttttccaaagggttactttaaaaatctgttaccacaattatgagatgatttttaagtgataaattaaacttcttcttgtataaattctgcccagatctctccacaagagctgagggtttcataactttatggcttaataaatgtatgacactgaaaagatttgagtgtgaatctactgaaatcactataatgcacattgaagctatgatggtatttgagtagtgaggttacttttgatcggagcaacataatgctcatagaatcttctagaagaagagaaacaaagggattgataaaatgctgagaactagtgattatatatttttctgtatttacctgacatttattttaatgttcaaaaagtaaacactttaagtttgatgtgttttactctctcattgttttaagtaattgccaactcagaatacatcattcttaggctgaaatttgtctttccattttttaaggtgaaatagtactaccttacgtgatagcatacaaagaagaaagctctagaaagagaaattatggagaatgattatttaaattacaattaaggaaatgagaatatgatcccctcttccgagttgcccacaaacttgcttctttgcttttgctccctgtaatagaactacttttcaacaaatctaattttgcacggcaccgttaaccatattttcactacagcaaacttagtgctatgggttttctttttctttgtttttttcttgatcacttgtataggaaacaatattttccagtgttatttgcatatatattttgtccttccaatatatgcattacagatgaaaattaaatgttatacctgaattcttgggttggggccaaaatattaagctgaaaataatgctggtgtggatttgttttaaaacaaagctttattatgaacatgcatgtgaatctggatattgcctcttatttttaagaaaatggttctgtgaaaagtgaatgatatgtatttttccaaatgcttcatggttaggagtcttcaagttccatgttccccagatttgagatatactaaagaaagaaattcaaaagtagctatttggggcccacaaaaataactattattttagccttagagccttacacttgtttcatgaagagaaaggacttgcataaccaaaataaacaaagcaagacaaattaaaaatatgtgggggagagatcagtgaaaagtggttttcttaatgcagccctgctggtccccattaacaattgcttgaaattcacatggatgtaaaattataattgtcaggatcttattcagatgatcttttaaggtttaactggttttgcttttgtttatctatatgtcaaaatacttgtaaattgggaacaaacttctctcagcttcttgaagttgttcaactatccttgccactggaagaccaaacaaggttttcactgctttttcttttacataatatgctgagaattatttcttatgctttttactacaaacaaaattactcacctggattaaagattaaggccttaatctgtttagattatctttaatctccatgaaatcgtgaaataagacaagaatagtgtttcagctgtaggccattttacagctaattgcccataaattgtagcatttattgacctgaagtactaagctaattgtcttgactactcaaagcccctgaattgttgtcaactttcccctttgtgttgtgtagccctaacgtcatttagcttgttgtctgatgcctccagtaggacacctccgatggagctttgatttctgagcagcgaaagctcccttcctaagatgcatctcgcataggctgcctatgatgaaggaccgtgcacctccactccaacagagtgctgagtttaaaagttgacctgtgtttgtaatttcactttcatcttgcttaataaatatctgctggattctttcattcacttttttac

SEQ ID NO: 6895 - protein, 145 aa, Homo sapiens; identical to SEQ ID NO: 936

SEQ ID NO: 6896 - DNA, 3375 bp, Homo sapiens
gtcgactcctgcagaggtcacattttgtgtgcgggtttgtccccagcgtttgagaagcgctacaaagcagccactgtgcttactgaacggcctccccctgtatcgcttaattgagaaggtatacaaatgctctcagtccagccagacaccaagccgaaaggttgtgctggctgcaaccgaaagatcaaggaccggtatcttctaaaggcactggacaaatactggcatgaagactgcctgaagtgtgcctgctgtgactgtcgcttgggagaggtgggctccaccctgtacactaaagctaatcttatcctttgtcgcagagactatctgaggctctttggtgtaacgggaaactgcgctgcctgtagtaagctcatccctgcctttgagatggtgatgcgtgccaaggacaatgtttaccacctggactgctttgcatgtcagctttgtaatcagagattttgtgttggagacaaatttttcctaaagaataacatgatcctttgccagacggactacgaggaaggtttaatgaaagaaggttatgcaccccaggttcgctgatctatcaacatcaccccattaagaatacaaagcactacattcttttatcttttttgctccacatgtacataagaattgacacaggaacctactgaatagcgtagatataggaaggcaggatggttatatggaataaaaggcggactgcatctgtatgtagtgaaattgccccagttcagagttgaatgtttattattaaagaaaaaagtaatgtacatatggctggatttttttgcttgctattcgtttttgtgtcacttggcatgagatgtttattttggactattgtatataatgtattgtaatatttgaagcacaaatgtaatacagttttattgtgttaccatttgtgttccatttgcttctttgtattgttgcatttagtacaatcagtgtttaaacttactgtatatttatgctttctgtatttaccagctattttaaatgagctgtaactttctagtaaagaattgaaaagcaaatctcactaatgatacacagatagataaagcaagtctatcaacattaaaaatactaaaaaataaagacacacacagagcattttagtgacatccactacttattgccgctatgagttagagtctatcagtgttcttgttataaccccctattttcagggggttaaaaatcagctttaaaaaaatacataaaaatttcatcttaaagcactttcattttataccaacgtgaaaagtgccatttttagaataactttaaagcttaacaggtttccttttaatatcctttttttgtgtgctctttacttacacaatggctttgttttgctttttcagccacaccccttatgtgaactagtgcctttgggtatcacgtaaaattttttccaaagggttactttaaaaatctgttaccacaattatgagatgatttttaagtgataaattaaacttcttcttgtataaattctgcccagatctctccacaagagctgagggtttcataactttatggcttaataaatgtatgacactgaaaagatttgagtgtgaatctactgaaatcactataatgcacattgaagctatgatggtatttgagtagtgaggttacttttgatcggagcaacataatgctcatagaatcttctagaagaagagaaacaaagggattgataaaatgctgagaactagtgattatatatttttctgtatttacctgacatttattttaatgttcaaaaagtaaacactttaagtttgatgtgttttactctctcattgttttaagtaattgccaactcagaatacatcattcttaggctgaaatttgtctttccattttttaaggtgaaatagtactaccttacgtgatagcatacaaagaagaaagctctagaaagagaaattatggagaatgattatttaaattacaattaaggaaatgagaatatgatcccctcttccgagttgcccacaaacttgcttctttgcttttgctccctgtaatagaactacttttcaacaaatctaattttgcacggcaccgttaaccatattttcactacagcaaacttagtgctatgggttttctttttctttgtttttttcttgatcacttgtataggaaacaatattttccagtgttatttgcatatatattttgtccttccaatatatgcattacagatgaaaattaaatgttatacctgaattcttgggttggggccaaaatattaagctgaaaataatgctggtgtggatttgttttaaaacaaagctttattatgaacatgcatgtgaatctggatattgcctcttatttttaagaaaatggttctgtgaaaagtgaatgatatgtatttttccaaatgcttcatggttaggagtcttcaagttccatgttccccagatttgagatatactaaagaaagaaattcaaaagtagctatttggggcccacaaaaataactattattttagccttagagccttacacttgtttcatgaagagaaaggacttgcataaccaaaataaacaaagcaagacaaattaaaaatatgtgggggagagatcagtgaaaagtggttttcttaatgcagccctgctggtccccattaacaattgcttgaaattcacatggatgtaaaattataattgtcaggatcttattcagatgatcttttaaggtttaactggttttgcttttgtttatctatatgtcaaaatacttgtaaattgggaacaaacttctctcagcttcttgaagttgttcaactatccttgccactggaagaccaaacaaggttttcactgctttttcttttacataatatgctgagaattatttcttatgctttttactacaaacaaaattactcacctggattaaagattaaggccttaatctgtttagattatctttaatctccatgaaatcgtgaaataagacaagaatagtgtttcagctgtaggccattttacagctaattgcccataaattgtagcatttattgacctgaagtactaagctaattgtcttgactactcaaagcccctgaattgttgtcaactttcccctttgtgttgtgtagccctaacgtcatttagcttgttgtctgatgcctccagtaggacacctccgatggagctttgatttctgagcagcgaaagctcccttcctaagatgcatctcgcataggctgcctatgatgaaggaccgtgcacctccactccaacagagtgctgagtttaaaagttgacctgtgtttgtaatttcactttcatcttgcttaataaatatctgctggattctttcattcacttttttac

SEQ ID NO: 6897 - protein, 145 aa, Homo sapiens; identical to SEQ ID NO: 936

SEQ ID NO: 6898 - DNA, 3752 bp, Homo sapiens
ggtgggggtcagcattagtgaatggagaacaagttcacagtttgggtcttgggccattagaggaagggaggaagggaggaaggagagtgtgtgtgtgatcccctgaaccaggcttgtgtggcggacttgcggagcagcgacttcagagagttcatgaatggaagtcacagacagaccagcgactgcagccacctccaggcatttcttaaaggggagggttgtgtgctttttccagggtattctggtagcagtttgattctcttgcttttattttaatttccataattggtagcttcagaaatggctttggaaggcaatttgctttaaatgtagccacctattccaaaatgccctggttattttaggaaccctacccttttcctccggagctctctcgcaggagttcttcttttggactggtccaggaggagaagcgctacaaagcagccactgtgcttactgaacggcctccccctgtatcgcttaattgagaaggtatacaaatgctctcagtccagccagacaccaagccgaaaggttgtgctggctgcaaccgaaagatcaaggaccggtatcttctaaaggcactggacaaatactggcatgaagactgcctgaagtgtgcctgctgtgactgtcgcttgggagaggtgggctccaccctgtacactaaagctaatcttatcctttgtcgcagagactatctgaggctctttggtgtaacgggaaactgcgctgcctgtagtaagctcatccctgcctttgagatggtgatgcgtgccaaggacaatgtttaccacctggactgctttgcatgtcagctttgtaatcagagattttgtgttggagacaaatttttcctaaagaataacatgatcctttgccagacggactacgaggaaggtttaatgaaagaaggttatgcaccccaggttcgctgatctatcaacatcaccccattaagaatacaaagcactacattcttttatcttttttgctccacatgtacataagaattgacacaggaacctactgaatagcgtagatataggaaggcaggatggttatatggaataaaaggcggactgcatctgtatgtagtgaaattgccccagttcagagttgaatgtttattattaaagaaaaaagtaatgtacatatggctggatttttttgcttgctattcgtttttgtgtcacttggcatgagatgtttattttggactattgtatataatgtattgtaatatttgaagcacaaatgtaatacagttttattgtgttaccatttgtgttccatttgcttctttgtattgttgcatttagtacaatcagtgtttaaacttactgtatatttatgctttctgtatttaccagctattttaaatgagctgtaactttctagtaaagaattgaaaagcaaatctcactaatgatacacagatagataaagcaagtctatcaacattaaaaatactaaaaaataaagacacacacagagcattttagtgacatccactacttattgccgctatgagttagagtctatcagtgttcttgttataaccccctattttcagggggttaaaaatcagctttaaaaaaatacataaaaatttcatcttaaagcactttcattttataccaacgtgaaaagtgccatttttagaataactttaaagcttaacaggtttccttttaatatcctttttttgtgtgctctttacttacacaatggctttgttttgctttttcagccacaccccttatgtgaactagtgcctttgggtatcacgtaaaattttttccaaagggttactttaaaaatctgttaccacaattatgagatgatttttaagtgataaattaaacttcttcttgtataaattctgcccagatctctccacaagagctgagggtttcataactttatggcttaataaatgtatgacactgaaaagatttgagtgtgaatctactgaaatcactataatgcacattgaagctatgatggtatttgagtagtgaggttacttttgatcggagcaacataatgctcatagaatcttctagaagaagagaaacaaagggattgataaaatgctgagaactagtgattatatatttttctgtatttacctgacatttattttaatgttcaaaaagtaaacactttaagtttgatgtgttttactctctcattgttttaagtaattgccaactcagaatacatcattcttaggctgaaatttgtctttccattttttaaggtgaaatagtactaccttacgtgatagcatacaaagaagaaagctctagaaagagaaattatggagaatgattatttaaattacaattaaggaaatgagaatatgatcccctcttccgagttgcccacaaacttgcttctttgcttttgctccctgtaatagaactacttttcaacaaatctaattttgcacggcaccgttaaccatattttcactacagcaaacttagtgctatgggttttctttttctttgtttttttcttgatcacttgtataggaaacaatattttccagtgttatttgcatatatattttgtccttccaatatatgcattacagatgaaaattaaatgttatacctgaattcttgggttggggccaaaatattaagctgaaaataatgctggtgtggatttgttttaaaacaaagctttattatgaacatgcatgtgaatctggatattgcctcttatttttaagaaaatggttctgtgaaaagtgaatgatatgtatttttccaaatgcttcatggttaggagtcttcaagttccatgttccccagatttgagatatactaaagaaagaaattcaaaagtagctatttggggcccacaaaaataactattattttagccttagagccttacacttgtttcatgaagagaaaggacttgcataaccaaaataaacaaagcaagacaaattaaaaatatgtgggggagagatcagtgaaaagtggttttcttaatgcagccctgctggtccccattaacaattgcttgaaattcacatggatgtaaaattataattgtcaggatcttattcagatgatcttttaaggtttaactggttttgcttttgtttatctatatgtcaaaatacttgtaaattgggaacaaacttctctcagcttcttgaagttgttcaactatccttgccactggaagaccaaacaaggttttcactgctttttcttttacataatatgctgagaattatttcttatgctttttactacaaacaaaattactcacctggattaaagattaaggccttaatctgtttagattatctttaatctccatgaaatcgtgaaataagacaagaatagtgtttcagctgtaggccattttacagctaattgcccataaattgtagcatttattgacctgaagtactaagctaattgtcttgactactcaaagcccctgaattgttgtcaactttcccctttgtgttgtgtagccctaacgtcatttagcttgttgtctgatgcctccagtaggacacctccgatggagctttgatttctgagcagcgaaagctcccttcctaagatgcatctcgcataggctgcctatgatgaaggaccgtgcacctccactccaacagagtgctgagtttaaaagttgacctgtgtttgtaatttcactttcatcttgcttaataaatatctgctggattctttcattcacttttttac

SEQ ID NO: 6899 - protein, 145 aa, Homo sapiens; identical to SEQ ID NO: 936

SEQ ID NO: 6900 - DNA, 946 bp, Homo sapiens
ggcctgggaggagagtctgacgagcaaggggaaggtagccaagtatggagtgaaatacaggcccttacagtgaggtttcttactaagcgattcattggagaatatgcttctaattttgaatctatctataagaagcacttgtgtttggaaaggaaacaactaaatctagaaatatatgacccttgttctcaaacacagaaagcaaaattctccctcacaagtgagcttcactgggcagatgggtttgttattgtgtatgacatcagtgataggtcttcatttgcttttgcaaaagcgctgatctacagaatccgggagccacaaactagtcattgtaaaagagctgtggaatcagcagtgtttttggttggcaacaaacgagatctttgtcatgtgcgagaggttggctgggaagaagggcaaaagctggcactggaaaaccgatgccaattctgtgaactgtctgcagcagagcagtctctggaggtggaaatgatgtttatcagaattatcaaggacatcctgataaacttcaaactcaaagaaaagagacgtcccagtggatctaaatcaatggccaaattgatcaataatgtatttggaaagagaaggaaatctgtttagtagacaggtaatcctgggagatttcctatatcagagagtttcaaacattcacatgataattaaactaacctttgtatgcaatttttttttggtaaaaagaattctcttggagatatgaaatgattgagtatgaaccacagctgtgttttcaaatatgtagtttgcctttttggttgttgtaccctgctcactctccttcacacagaacctttcatttattgtacaacatcacactcaccctaacctactggcggacagcgatcccagtttgccttgccaaataaactctgtttatgtgaatttattaaacgaccatgccata

SEQ ID NO: 6901 - protein, 41 aa, Homo sapiens
MTLVLKHRKQNSPSQVSFTGQMGLLLCMTSVIGLHLLLQKR

SEQ ID NO: 6902 - DNA, 1226 bp, Homo sapiens
attcggacagaaaacatcagaaggaaaaccttcatatggcccaatgtcaaagattccatctggtgtcattttccttgtaccagaagtatttaatttggcatttctcatgtgcctgctagctgactaatttctttcagcatctgtttacgaaatatatagctaaaatagaaatatttgaaaagaggaaaacctgaagatcagtaatctaaattaacagcaaaatataatcaaagaaaacaaaagaagaaaaataataaagatctcaactgagatcctcccattgtcagattttgacctaggaccatcttggaaagggattcttctgtgattcagaggtgaagcccttacagtgaggtttcttactaagcgattcattggagaatatgcttctaattttgaatctatctataagaagcacttgtgtttggaaaggaaacaactaaatctagaaatatatgacccttgttctcaaacacagaaagcaaaattctccctcacaagtgagcttcactgggcagatgggtttgttattgtgtatgacatcagtgataggtcttcatttgcttttgcaaaagcgctgatctacagaatccgggagccacaaactagtcattgtaaaagagctgtggaatcagcagtgtttttggttggcaacaaacgagatctttgtcatgtgcgagaggttggctgggaagaagggcaaaagctggcactggaaaaccgatgccaattctgtgaactgtctgcagcagagcagtctctggaggtggaaatgatgtttatcagaattatcaaggacatcctgataaacttcaaactcaaagaaaagagacgtcccagtggatctaaatcaatggccaaattgatcaataatgtatttggaaagagaaggaaatctgtttagtagacaggtaatcctgggagatttcctatatcagagagtttcaaacattcacatgataattaaactaacctttgtatgcaatttttttttggtaaaaagaattctcttggagatatgaaatgattgagtatgaaccacagctgtgttttcaaatatgtagtttgcctttttggttgttgtaccctgctcactctccttcacacagaacctttcatttattgtacaacatcacactcaccctaacctactggcggacagcgatcccagtttgccttgccaaataaactctgtttatgtgaatttattaaacgaccatgccata

SEQ ID NO: 6903 - protein, 41 aa, Homo sapiens; identical to SEQ ID NO: 6901

SEQ ID NO: 6904 - DNA, 4843 bp, Homo sapiens
tgagatcgtgtttcatttcaggaagatatatgcgtcaggaaaatttctatcttcttttgtattatcaaggagatatttggagcagagtcaaccctctcagttacataaaataaaaaatggcatattcttggcaaacggatccaaatcctaatgaatcacacgaaaagcagtatgaacaccaagaatttctctttgtaaatcaaccccattcttctagccaagtcagtctgggttttgatcagatagtagatgagatcagtggcaaaattccacactacgagagtgaaattgatgaaaacaccttttttgtgcccactgcaccaaaatgggactcaacagggcattcattaaatgaagcacaccaaatatccttgaatgaattcacttctaaaagccgtgaactctcctggcatcaagttagcaaagcaccagcaattggttttagtccttctgtgttaccaaaacctcaaaatacgaataaagaatgctcctggggaagccccataggaaaacatcatggtgctgatgattccagattcagtattttagctccatcattcacaagtttggataaaattaatctagagaaagaattagaaaatgaaaatcataactaccatataggatttgaaagtagcattcctccaacaaattcatccttctcaagtgacttcatgccgaaagaagagaataaaaggagtggacatgtgaacattgtggaaccatctttgatgcttttgaaaggctctcttcaacccggaatgtgggaaagtacatggcagaagaatatagagtcaataggttgttccattcagctagtggaagtacctcaaagcagcaatacgagtctggcctctttttgcaacaaagtaaaaaaaatcagagaaagatatcatgcagctgatgttaatttcaattctgggaagatctggagcactactacagcatttccgtatcagctcttttctaagaccaagtttaatatacatatttttattgataactcaacacaacctcttcattttatgccatgtgctaattatcttgtcaaagatctaattgcagaaattctgcatttttgcacaaatgaccagctactccccaaagatcatattctaagtgtatgtggctctgaagaatttttacaaaacgaccactgtttggggagccacaaaatgtttcaaaaagataaatctgttattcagctccacctgcagaaaagtagggaagctccaggaaagctatctcgaaagcatgaagaggaccacagtcagttttatctgaatcaacttctagaatttatgcatatttggaaagtatccagacaatgtctcttaacactcatcagaaaatatgacttccacctgaaatacctattgaaaacccaggaaaacgtgtataatattattgaagaagttaaaaaaatatgcagtgttctagggtgtgtggaaaccaaacaaattacagatgcagtaaatgaactaagtctaattcttcagagaaaaggagagaatttttatcaaagttcagagacttcagcaaaaggcttgatagagaaggtaacaactgaactatccacatccatctaccagctaatcaatgtctactgtaacagcttttatgcagattttcagcctgtaaatgtacctagatgcacttcctatctaaatcccgggcttccttcccacctcagcttcacagtgtatgcagcacacaacattccagaaacctgggtgcacaggatcaattttccccttgaaataaagtcacttccaagggaatccatgctcactgtaaaactgtttgggattgcctgtgcaaccaacaatgcaaatttactggcgtggacttgtcttccactgtttccaaaagaaaaatccattctcgggtctatgctgttcagcatgacattacagagtgagcctcccgtagaaatgataactccaggagtgtgggatgtaagtcagccatccccggtgaccctgcagattgattttccagctactgggtgggagtatatgaaacctgattctgaagagaatagaagtaatcttgaagagccactaaaggagtgtataaaacatattgccagactttcacagaaacagactcccctactactctctgaagaaaagaaaagatatttatggttttatcgcttctactgcaataatgaaaactgctcccttcctttagtcctgggtagtgcccctggatgggatgaaaggactgtttcagaaatgcataccattttgagaagatggacattttctcaacctttagaggctcttgggcttttgacttccagttttccagatcaagaaattcgtaaagtggcagttcaacaattagacaacctcttgaatgatgaactactggaatatctcccacagctagttcaggctgtcaagtttgaatggaaccttgagagtcctttagtgcaacttctactccaccgctccttgcagagcatccaggttgcccatcgtctttactggctgctaaaaaatgcagaaaatgaagcttattttaaaagctggtatcagaagctactagctgctctccaattctgtgcaggtaaagccttgaatgatgagttttccaaggagcagaaacttatcaaaattctgggagatattggggaaagagtcaagtctgccagtgaccatcaaagacaggaggtactgaagaaagaaattggcagactagaagagttctttcaagatgtaaatacttgtcatcttcctctgaaccctgccctatgtataaaagggattgatcacgatgcatgttcatattttacatctaatgctttgccattgaagattactttcatcaatgctaatccgatgggcaaaaacatcagcattatttttaaggctggagatgatcttcgtcaggatatgcttgttctgcagcttattcaagtgatggacaatatttggctgcaggaaggcttggatatgcaaatgatcatttatagatgtctatccacaggaaaagaccaaggattggtgcagatggtacctgatgctgtgaccctagcaaagattcatcgccattctggactgataggaccattgaaagaaaatacaattaaaaagtggttcagtcagcacaaccacttaaaggcagattatgaaaaggccttgaggaactttttctactcctgtgctggctggtgtgtggtaacattcatcctgggagtatgtgaccgtcacaatgataatatcatgctgacaaagtcgggccacatgtttcatattgactttggaaaattcttaggtcatgcacaaacatttggagggataaaaagggaccgagctcctttcatttttacttcagagatggaatactttattacagagggtgggaaaaacccacagcattttcaagattttgtggaactttgctgtcgtgcttataatattatcagaaagcacagccaactgctcttgaacctgctggaaatgatgctgtatgcaggactgcctgagctaagtggaattcaagacctgaaatatgtgtataataatcttcgtccacaagacacagacctggaagcaacaagtcattttaccaagaaaataaaggaaagtctggagtgtttccctgttaaattgaataacttgatccacacacttgcacaaatgtcagccataagccctgccaaatctacttcacagacttttcctcaggaatcctgtttgctgagtacaactaggtcgattgaaagagcaacaattttagggttcagcaagaaatccagtaatctgtatctgatccaggtgacacacagcaacaacgaaacaagcctgacagaaaaatcatttgagcagttttcaaaacttcacagccaacttcagaagcagtttgcatcactgactctcccagagtttcctcattggtggcacctaccttttacaaattcagatcacagaagattcagagatctaaatcattacatggaacagatattaaatgtatcacatgaagttacaaacagtgattgtgtacttagctttttcctctctgaggctgtgcaacaaacagttgaagaatcatcacctgtgtacctaggtgagaagtttccagacaagaagcctaaggtgcagttagtcatatcctacgaggatgtgaagctgaccatactagtgaaacacatgaaaaacattcatctcccagatggctctgcgcccagtgcacatgttgaattttatcttttaccatatcccagtgaagttcgtaggaggaaaacaaaatctgttccaaaatgtacggaccccacttacaatgaaattgtagtatatgatgaagtcacagagctccaaggacatgtcttaatgcttattgtgaagagtaaaactgtatttgtgggagcaattaacatccgactctgtagtgtcccactcgataaagaaaaatggtatccattaggaaacagtataatttgaccattgctatgaacatatgcattattcattaactacttgtatttttttcacttctgggcctctgaatcacataagtaaggcatctttgttgtcaaagacagcacagggtattaaggacacagaaaaaaaatcagaattagtcttttgtgttgtttattttctacctgtgctttcattgttttttcataatcttttctccttcagtggagtactgattgcatgaaatttgatgtgtaaaataataaaagacctttattaaatcattttaatatattttaaattaaacataggtttacatttgttttaattgtgtgcctacagttaaaagcagtatttttaatgtattttataagaaagacaatcaaataaacctcatcaattaattcaag

SEQ ID NO: 6905 - protein, 1445 aa, Homo sapiens
MAYSWQTDPNPNESHEKQYEHQEFLFVNQPHSSSQVSLGFDQIVDEISGKIPHYESEIDENTFFVPTAPKWDSTGHSLNEAHQISLNEFTSKSRELSWHQVSKAPAIGFSPSVLPKPQNTNKECSWGSPIGKHHGADDSRFSILAPSFTSLDKINLEKELENENHNYHIGFESSIPPTNSSFSSDFMPKEENKRSGHVNIVEPSLMLLKGSLQPGMWESTWQKNIESIGCSIQLVEVPQSSNTSLASFCNKVKKIRERYHAADVNFNSGKIWSTTTAFPYQLFSKTKFNIHIFIDNSTQPLHFMPCANYLVKDLIAEILHFCTNDQLLPKDHILSVCGSEEFLQNDHCLGSHKMFQKDKSVIQLHLQKSREAPGKLSRKHEEDHSQFYLNQLLEFMHIWKVSRQCLLTLIRKYDFHLKYLLKTQENVYNIIEEVKKICSVLGCVETKQITDAVNELSLILQRKGENFYQSSETSAKGLIEKVTTELSTSIYQLINVYCNSFYADFQPVNVPRCTSYLNPGLPSHLSFTVYAAHNIPETWVHRINFPLEIKSLPRESMLTVKLFGIACATNNANLLAWTCLPLFPKEKSILGSMLFSMTLQSEPPVEMITPGVWDVSQPSPVTLQIDFPATGWEYMKPDSEENRSNLEEPLKECIKHIARLSQKQTPLLLSEEKKRYLWFYRFYCNNENCSLPLVLGSAPGWDERTVSEMHTILRRWTFSQPLEALGLLTSSFPDQEIRKVAVQQLDNLLNDELLEYLPQLVQAVKFEWNLESPLVQLLLHRSLQSIQVAHRLYWLLKNAENEAYFKSWYQKLLAALQFCAGKALNDEFSKEQKLIKILGDIGERVKSASDHQRQEVLKKEIGRLEEFFQDVNTCHLPLNPALCIKGIDHDACSYFTSNALPLKITFINANPMGKNISIIFKAGDDLRQDMLVLQLIQVMDNIWLQEGLDMQMIIYRCLSTGKDQGLVQMVPDAVTLAKIHRHSGLIGPLKENTIKKWFSQHNHLKADYEKALRNFFYSCAGWCVVTFILGVCDRHNDNIMLTKSGHMFHIDFGKFLGHAQTFGGIKRDRAPFIFTSEMEYFITEGGKNPQHFQDFVELCCRAYNIIRKHSQLLLNLLEMMLYAGLPELSGIQDLKYVYNNLRPQDTDLEATSHFTKKIKESLECFPVKLNNLIHTLAQMSAISPAKSTSQTFPQESCLLSTTRSIERATILGFSKKSSNLYLIQVTHSNNETSLTEKSFEQFSKLHSQLQKQFASLTLPEFPHWWHLPFTNSDHRRFRDLNHYMEQILNVSHEVTNSDCVLSFFLSEAVQQTVEESSPVYLGEKFPDKKPKVQLVISYEDVKLTILVKHMKNIHLPDGSAPSAHVEFYLLPYPSEVRRRKTKSVPKCTDPTYNEIVVYDEVTELQGHVLMLIVKSKTVFVGAINIRLCSVPLDKEKWYPLGNSII

SEQ ID NO: 6906 - DNA, 1194 bp, Homo sapiens
atgaacaccaagaatttctctttgtaaatcaaccccattcttctagccaagtcagtctgggttttgatcagatagtagatgagatcagtggcaaaattccacactacgagagtgaaattgatgaaaacaccttttttgtgcccactgcaccaaaatgggactcaacagggcattcattaaatgaagcacaccaaatatccttgaatgaattcacttctaaaagccgtgaactctcctggcatcaagttagcaaagcaccagcaattggttttagtccttctgtgttaccaaaacctcaaaatacgaataaagaatgctcctggggaagccccataggaaaacatcatggtgctgatgattccagattcagtattttagctccatcattcacaagtttggataaaattaatctagagaaagaattagaaaatgaaaatcataactaccatataggatttgaaagtagcattcctccaacaaattcatccttctcaagtgacttcatgccgaaagaagagaataaaaggagtggacatgtgaacattgtggaaccatctttgatgcttttgaaaggctctcttcaacccggaatgtgggaaagtacatggcagaagaatatagagtcaataggttgttccattcagctagtggaagtacctcaaagcagcaatacgagtctggcctctttttgcaacaaagtaaaaaaaatcagagaaagatatcatgcagctgatgttaatttcaattctgggaagatctggagcactactacagcatttccgtatcagctcttttctaagaccaagtttaatatacatatttttattgataactcaacacaacctcttcattttatgccatgtgctaattatcttgtcaaagatctaattgcagaaattctgcatttttgcacaaatgaccagctactccccaaagatcatattctaagtgtatgtggctctgaagaatttttacaaaacgaccactgtttggggagccacaaaatgtttcaaaaagataaatctgttattcagctccacctgcagaaaagtagggaagctccaggaaagctatctcgaaaggttaggacacagcaagaaggaagctgtctgcacacaggaaaagggctctgaccctgattataaactttgcagcctatagaacgaagagaaataaatgtatgttgtttaagcc

SEQ ID NO: 6907 - protein, 209 aa, Homo sapiens
MPKEENKRSGHVNIVEPSLMLLKGSLQPGMWESTWQKNIESIGCSIQLVEVPQSSNTSLASFCNKVKKIRERYHAADVNFNSGKIWSTTTAFPYQLFSKTKFNIHIFIDNSTQPLHFMPCANYLVKDLIAEILHFCTNDQLLPKDHILSVCGSEEFLQNDHCLGSHKMFQKDKSVIQLHLQKSREAPGKLSRKVRTQQEGSCLHTGKGL

SEQ ID NO: 6908 - DNA, 916 bp, Homo sapiens
atggtggaattaggagaaggaaaaacgcatgcaggagtggccttcggtaggcagccacaagatgcagactgcgctctttttccagctggaaccatggagtgtgtagaagagaagaaggttcttgctgtgccagaaacccttaagaaaaagcgaaggaattttgcagagctgaagatcaagcgcctgagaaagaagtttgcccaaaagacgcttcgaaagacaaggaggaagcttatctatgaaaaagcaaagcactatcacaaggaatacaggcagatgtacagaactgaaattcgaaaggcgaggatggcaagaaaagctggcaatttctatgtacctgcagaacccaaattggcatttgtcgtcagaatcagaggtgtcaatggcgtgagcccaaaggtccgaaaggtgttgcagcttcttcgccttcgtcaaatcttcaatggcacctttgtgaagctcgacaaggcttcgattaacatgctgaggattgtagagccatatattgcatgggggtaccccaatctgaagtcagtaaatgaactaatctacaagcgtggttatggcaaaatgaataagaagcgaattgctttgacagataacactttgattgctcgatctcttggtaaatacggcatcatctgcatggaggatctgattcatgagatctatactgttggaaaaggcttcaaagaggcaaataacttcctgtgggccttcaaattgtcttctccacgaggtggaatgaagaaaaagaccacccattttgtagaaggtggagatgctggcaacagggaggaccaggtcaacaggcttattagaagaatgaactaaggtgtctaccatgattatttttctaagctggtcggttaataaacagtacctgctctcaaaaaaaaaaaaaaaaaaaaaaaaa

SEQ ID NO: 6909 - protein, 277 aa, Homo sapiens
MVELGEGKTHAGVAFGRQPQDADCALFPAGTMECVEEKKVLAVPETLKKKRRNFAELKIKRLRKKFAQKTLRKTRRKLIYEKAKHYHKEYRQMYRTEIRKARMARKAGNFYVPAEPKLAFVVRIRGVNGVSPKVRKVLQLLRLRQIFNGTFVKLDKASINMLRIVEPYIAWGYPNLKSVNELIYKRGYGKMNKKRIALTDNTLIARSLGKYGIICMEDLIHEIYTVGKGFKEANNFLWAFKLSSPRGGMKKKTTHFVEGGDAGNREDQVNRLIRRMN

SEQ ID NO: 6910 - DNA, 6588 bp, Homo sapiens
ggggaggcgcgctcgctccgcgctcccttcgctcgctcgttccctcctccctcggcagccgcggcggcagcaggagaaggcggcggcggcggctagggatcagacatggcggcggatctgaacctggagtggatctccctgccccggtcctggacttacgggatcaccaggggcggccgagtcttcttcatcaacgaggaggccaagagcaccacctggctgcaccccgtcaccggcgaggcggtggtcaccggacaccggcggcagagcacagatttgcctactggctgggaagaagcatatacttttgaaggtgcaagatactatataaaccataatgaaaggaaagtgacctgcaaacatccagtcacaggacaaccatcacaggacaattgtatttttgtagtgaatgaacagactgttgcaaccatgacatctgaagaaaagaaggaacggccaataagtatgataaatgaagcttctaactataacgtgacttcagattatgcagtgcatccaatgagccctgtaggcagaacttcacgagcttcaaaaaaagttcataattttggaaagaggtcaaattcaattaaaaggaatcctaatgcaccggttgtcagacgaggttggctttataaacaggacagtactggcatgaaattgtggaagaaacgctggtttgtgctttctgacctttgcctcttttattatagagatgagaaagaagagggtatcctgggaagcatactgttacctagttttcagatagctttgcttacctctgaagatcacattaatcgcaaatatgcttttaaggcagcccatccaaacatgcggacctattatttctgcactgatacaggaaaggaaatggagttgtggatgaaagccatgttagatgctgccctagtacagacagaacctgtgaaaagagtggacaagattacatctgaaaatgcaccaactaaagaaaccaataacattcccaaccatagagtgctaattaaaccagagatccaaaacaatcaaaaaaacaaggaaatgagcaaaattgaagaaaaaaaggcattagaagctgaaaaatatggatttcagaaggatggtcaagatagacccttaacaaaaattaatagtgtaaagctgaattctctgccatctgaatatgagagtgggtcagcatgccctgctcagactgtgcactacagaccaatcaacttgagcagttcagagaacaaaatagtcaatgttagcctggcagatcttagaggtggaaatcgccccaatacagggcccttatacacagaggccgatcgagtcatacagagaacaaattcaatgcagcagttggaacagtggattaaaatccagaaggggaggggtcatgaagaagaaaccaggggagtaatttcttaccaaacattaccaagaaatatgccaagtcacagagcccagattatggcccgctaccctgaaggttatagaacactcccaagaaacagcaagacaaggcctgaaagtatctgcagtgtaaccccttccactcatgacaagacattaggacccggagcggaggagaaacggaggtccatgagagatgacacaatgtggcagctctacgaatggcagcagcgtcagttttataacaaacagagcaccctccctcgacacagtactttgagtagtcccaaaaccatggtaaatatttctgaccagacaatgcactctattcccacatcaccttcccacgggtcaatagctgcttatcagggatactcccctcaacgaacttacagatcggaagtgtcttcaccaattcagagaggagatgtgacaatagaccgcagacacagggcccatcaccctaagcatgtctatgtgcctgacagaaggtcagtgccagctggcctgactttacagtctgttagtccccagagcctccaagggaaaacgccagaggagcttacgctgctgctaataaagctgagacggcagcaagccgaactgagtagtatccgggagcatacgttagcacagctcatgcagctaaagcttgaggcccacagcccaaagaatgaaattctttcacatcatctccaaaggaacaccatatatttggatcatcagctgtcacaagatgaaggtagaggcacattatacaaatacagacctgaagaagtagatattgatgccaagttaagccgattatgtgaacaagataaagtggtgcatgctctggaagagaaacttcagcaactccacaaggagaaatacacgcttgagcaagctttgctatcagccagccaagagatagaaatgcatgcagataacccagcagccattcagacagtggtgttacaaagggatgatttacaaaatggactgcttagtacgtgtcgagaactttctcgagccactgccgaattggaacgagcatggagagaatatgataagttagaatacgatgtaactgttaccaggaaccagatgcaagagcagctggatcaccttggtgaagttcagacggaatcagcaggaattcagcgtgcacagattcagaaagaactttggcgaattcaggatgtcatggaagggctgagtaaacataagcagcaaagaggtactacagaaataggtatgataggatcaaagcctttctcaacagttaagtacaaaaatgagggtccagattatagactctacaagagtgaaccagagttaacaacagtggcagaagttgatgaatctaatggagaagaaaaatcagaacctgtttcagagatagaaacttcagttgttaaaggttcccactttcctgttggagtagtccctccaagagcaaaatcaccaacacccgaatcttcgacaatagcttcctatgtaaccttgaggaaaactaagaagatgatggatctaagaacggaaagaccaagaagtgcagtggaacagctctgtttggctgaaagtactcgaccaaggatgactgtggaagagcaaatggaaagaataagaagacatcaacaagcgtgcctgagggagaagaaaaaagggttaaatgttatcggtgcttcagaccagtcacccttacaaagcccttcaaatttaagggataatccatttaggactactcagactcgaaggagggatgataaggaactggacactgccattagagaaaatgatgtaaagccagaccatgaaactcctgcaacagaaattgttcaactaaaagaaaccgaaccccaaaatgtggacttcagcaaagagttaaaaaaaactgaaaacatttcatatgaaatgctttttgaacctgagccaaatggagtaaattctgtggaaatgatggataaagaaagaaacaaagacaaaatgcctgaggatgttacattcagccctcaagatgaaacacagaccgcaaatcataaaccagaagagcatcctgaagaaaatacaaagaacagtgttgacgaacaggaagaaactgttatttcttacgaatcaactcctgaggtttctagaggaaatcaaacaatggcagtgaaaagtctgtccccatctcctgagtcctcggcatcgccagttccatccactcagccgcagctcacagaaggatcacatttcatgtgtgtgtagtcttagaagaaagatgtcccccatgctggagtgtagtggcataatcacagctcactgcagccttgacctcctgggctcaagcagtcgtcctgcctcagcctcacaagtagctgggatcacaagtgcacgccaccacactcggctgatatttcgattttcttatagagacagtcttactaagttgtccacgctggtctcaaactcctgaattcaagctaccctcccactgcatgagccactgtgcctagcctctttgattttcacattctcaaaatatttcttttattttctctcctttttttttttttttcgaggcaaggtcttactctgtcacccaggctggagtgcagtggtgcaagatcatggctcaatggctcactgaaggctgacctcccaggctcaagcaatcctcccacctcagccccctgagtagctgggactacaggtgtatgccaccatgccaggctaattgttttgcagagatggagttttcaccatgttgcccaggctgatctcaagctcctgagctcaagtgatctgtccgcctcagcctcccaaagtgctgagattacaggtgtgagccaccacacccagccttttttcttccttttcaagcattttttaaatttcactagctttgggtacaagtggttttgggttacatggaagaattgtatagtggtgaagtctgagattttagtgcacccattacccgagtagtgtatgttgtacccaatccttcaccgaccttccaccctctcccttctgagtctccaaagtccattataccacactgtatgcctttgcatacccatagtgtagctccaacttataagtgagaacatatgatatttggttttcctttcctgagttactttacttagaataatggcctccagctccatccaagttgctgcaaaatacattattttgttcctttttattgctgagtagtattccatggtgtatataaaccacattttctttatccactccttggttggtggactcttaggttggttccatacccttggagttgcaaattgtgctgctataaacatgcatgtgcatgtatcttttttatgtaatgacttgttttcttttgggtcgatactcagtagtgggattgctggatcaaatgctggatctacttttagttctttaaggaatctccacactgttttccgtagtggttgtactagtttacattcccaccagcagtgtaaaagtgttttcttctcaccacatccataccaacatctgttgttttttgacttttaaattatggccattctttttttttgtttttgagatggagtctcgctctgtcagcaggctggagtgcagtggcgtgatcttggctcactgcaacctcctcctccagggttcaagtgattctcctgcctcagcctcccccgtagctgggactacaggcgtgtgccaccacacccagctaatttttgaatttttagtagagatggggtttcaccatgttggccagtatggtctcgatctcttgacctcatgatccgcccacctcggcctcccaaagtgctggcgtgacccactgcacccggccaattatggccattcttgcaggaataaggaggcatctcattgttgtgtaccttcttttgagaaatgcctattcgcgtcatttgcccactttttgatgggattatttgtttttgttttttttttcttgctgatttgttttgagttccttccagattctggatattagtcctttgttggatgcatagtttgcaaatatttcctcccatcctgttttctggaatctacttcctttcacaccttattgtaggaactataatctgtgccctttttttcagcccaaagtattttgttgtcttttcatatttgtaacttttatttgagattatgtctacctggaacctcaaagaggcttctgtttttgtcagttggtatctgtgcaggactgaagtgcttgctggagagttacaaataacctaactgtgatagtcttacctgtgttctgcctttgtcacttgtgtttaagccttttttcttttttcttttttcttttttttttttttgttgagaccaggtctcaccctgtcacccacactggagtgcaatggtgagatcttggagccttgccctcctgggcttaagtgatcctcccacgacagcctcccaagtagctgggaccacacgcctgtgccaccaagcctggctgatttttttgtattttttgtagagtaggggtttcaccgtgttgcccaggctggtctcaaactcctgagctcaagcgctctgcccgcctcaatctcccaaagtgctgagattacaagattgagccatcacgcctggctatgtttaaacttttaatttaatatgtttagaaatgactgttgaggccaggtgcggtaatgccagcactttgggaggccagggctggtggatcacttgaggtcgggagttcaggaccagcctggccaacatggtaaaaccccatctctacttaaaaatacaaaaattagctgggcatggtgtcaggcgcctgtaatcccagctacctgggaggctgagacaggagaatcgcttgaacctgggaggcagaggttgcagtgagccgagatcacaccatcgcactccggcctgggtgacagaacaagactttgtctcaaaaaaaaaaaaaaaaatctgggtgtggtggcccacacctgtaatcccagcactttgggaggccgaggcaggcagatcacctggctcctgaccagcgtgaccaacatggagaaacccagtctctactaaaattacaaaattagctgggcgtggtggcacatgcctgtaatcccagctacttgggaggctgaggcaggagaatcgcttgaacccagaggcagtggttgcagtgagccgaggtcgtgccattgcactccagcctgggcaacaagaacgaaactctgtctc

SEQ ID NO: 6911 - protein, 1174 aa, Homo sapiens
MAADLNLEWISLPRSWTYGITRGGRVFFINEEAKSTTWLHPVTGEAVVTGHRRQSTDLPTGWEEAYTFEGARYYINHNERKVTCKHPVTGQPSQDNCIFVVNEQTVATMTSEEKKERPISMINEASNYNVTSDYAVHPMSPVGRTSRASKKVHNFGKRSNSIKRNPNAPVVRRGWLYKQDSTGMKLWKKRWFVLSDLCLFYYRDEKEEGILGSILLPSFQIALLTSEDHINRKYAFKAAHPNMRTYYFCTDTGKEMELWMKAMLDAALVQTEPVKRVDKITSENAPTKETNNIPNHRVLIKPEIQNNQKNKEMSKIEEKKALEAEKYGFQKDGQDRPLTKINSVKLNSLPSEYESGSACPAQTVHYRPINLSSSENKIVNVSLADLRGGNRPNTGPLYTEADRVIQRTNSMQQLEQWIKIQKGRGHEEETRGVISYQTLPRNMPSHRAQIMARYPEGYRTLPRNSKTRPESICSVTPSTHDKTLGPGAEEKRRSMRDDTMWQLYEWQQRQFYNKQSTLPRHSTLSSPKTMVNISDQTMHSIPTSPSHGSIAAYQGYSPQRTYRSEVSSPIQRGDVTIDRRHRAHHPKHVYVPDRRSVPAGLTLQSVSPQSLQGKTPEELTLLLIKLRRQQAELSSIREHTLAQLMQLKLEAHSPKNEILSHHLQRNTIYLDHQLSQDEGRGTLYKYRPEEVDIDAKLSRLCEQDKVVHALEEKLQQLHKEKYTLEQALLSASQEIEMHADNPAAIQTVVLQRDDLQNGLLSTCRELSRATAELERAWREYDKLEYDVTVTRNQMQEQLDHLGEVQTESAGIQRAQIQKELWRIQDVMEGLSKHKQQRGTTEIGMIGSKPFSTVKYKNEGPDYRLYKSEPELTTVAEVDESNGEEKSEPVSEIETSVVKGSHFPVGVVPPRAKSPTPESSTIASYVTLRKTKKMMDLRTERPRSAVEQLCLAESTRPRMTVEEQMERIRRHQQACLREKKKGLNVIGASDQSPLQSPSNLRDNPFRTTQTRRRDDKELDTAIRENDVKPDHETPATEIVQLKETEPQNVDFSKELKKTENISYEMLFEPEPNGVNSVEMMDKERNKDKMPEDVTFSPQDETQTANHKPEEHPEENTKNSVDEQEETVISYESTPEVSRGNQTMAVKSLSPSPESSASPVPSTQPQLTEGSHFMCV

SEQ ID NO: 6912 - DNA, 4337 bp, Homo sapiens
ggggaggcgcgctcgctccgcgctcccttcgctcgctcgttccctcctccctcggcagccgcggcggcagcaggagaaggcggcggcggcggctagggatcagacatggcggcggatctgaacctggagtggatctccctgccccggtcctggacttacgggatcaccaggggcggccgagtcttcttcatcaacgaggaggccaagagcaccacctggctgcaccccgtcaccggcgaggcggtggtcaccggacaccggcggcagagcacagatttgcctactggctgggaagaagcatatacttttgaaggtgcaagatactatataaaccataatgaaaggaaagtgacctgcaaacatccagtcacaggacaaccatcacaggacaattgtatttttgtagtgaatgaacagactgttgcaaccatgacatctgaagaaaagaaggaacggccaataagtatgataaatgaagcttctaactataacgtgacttcagattatgcagtgcatccaatgagccctgtaggcagaacttcacgagcttcaaaaaaagttcataattttggaaagaggtcaaattcaattaaaaggaatcctaatgcaccggttgtcagacgaggttggctttataaacaggacagtactggcatgaaattgtggaagaaacgctggtttgtgctttctgacctttgcctcttttattatagagatgagaaagaagagggtatcctgggaagcatactgttacctagttttcagatagctttgcttacctctgaagatcacattaatcgcaaatatgcttttaaggcagcccatccaaacatgcggacctattatttctgcactgatacaggaaaggaaatggagttgtggatgaaagccatgttagatgctgccctagtacagacagaacctgtgaaaagagtggacaagattacatctgaaaatgcaccaactaaagaaaccaataacattcccaaccatagagtgctaattaaaccagagatccaaaacaatcaaaaaaacaaggaaatgagcaaaattgaagaaaaaaaggcattagaagctgaaaaatatggatttcagaaggatggtcaagatagacccttaacaaaaattaatagtgtaaagctgaattctctgccatctgaatatgagagtgggtcagcatgccctgctcagactgtgcactacagaccaatcaacttgagcagttcagagaacaaaatagtcaatgttagcctggcagatcttagaggtggaaatcgccccaatacagggcccttatacacagaggccgatcgagtcatacagagaacaaattcaatgcagcagttggaacagtggattaaaatccagaaggggaggggtcatgaagaagaaaccaggggagtaatttcttaccaaacattaccaagaaatatgccaagtcacagagcccagattatggcccgctaccctgaaggttatagaacactcccaagaaacagcaagacaaggcctgaaagtatctgcagtgtaaccccttccactcatgacaagacattaggacccggagcggaggagaaacggaggtccatgagagatgacacaatgtggcagctctacgaatggcagcagcgtcagttttataacaaacagagcaccctccctcgacacagtactttgagtagtcccaaaaccatggtaaatatttctgaccagacaatgcactctattcccacatcaccttcccacgggtcaatagctgcttatcagggatactcccctcaacgaacttacagatcggaagtgtcttcaccaattcagagaggagatgtgacaatagaccgcagacacagggcccatcaccctaagcatgtctatgtgcctgacagaaggtcagtgccagctggcctgactttacagtctgttagtccccagagcctccaagggaaaacgctgtcacaagatgaaggtagaggcacattatacaaatacagacctgaagaagtagatattgatgccaagttaagccgattatgtgaacaagataaagtggtgcatgctctggaagagaaacttcagcaactccacaaggagaaatacacgcttgagcaagctttgctatcagccagccaagagatagaaatgcatgcagataacccagcagccattcagacagtggtgttacaaagggatgatttacaaaatggactgcttagtacgtgtcgagaactttctcgagccactgccgaattggaacgagcatggagagaatatgataagttagaatacgatgtaactgttaccaggaaccagatgcaagagcagctggatcaccttggtgaagttcagacggaatcagcaggaattcagcgtgcacagattcagaaagaactttggcgaattcaggatgtcatggaagggctgagtaaacataagcagcaaagaggtactacagaaataggtatgataggatcaaagcctttctcaacagttaagtacaaaaatgagggtccagattatagactctacaagagtgaaccagagttaacaacagtggcagaagttgatgaatctaatggagaagaaaaatcagaacctgtttcagagatagaaacttcagttgttaaaggttcccactttcctgttggagtagtccctccaagagcaaaatcaccaacacccgaatcttcgacaatagcttcctatgtaaccttgaggaaaactaagaagatgatggatctaagaacggaaagaccaagaagtgcagtggaacagctctgtttggctgaaagtactcgaccaaggatgactgtggaagagcaaatggaaagaataagaagacatcaacaagcgtgcctgagggagaagaaaaaagggttaaatgttatcggtgcttcagaccagtcacccttacaaagcccttcaaatttaagggataatccatttaggactactcagactcgaaggagggatgataaggaactggacactgccattagagaaaatgatgtaaagccagaccatgaaactcctgcaacagaaattgttcaactaaaagaaaccgaaccccaaaatgtggacttcagcaaagagttaaaaaaaactgaaaacatttcatatgaaatgctttttgaacctgagccaaatggagtaaattctgtggaaatgatggataaagaaagaaacaaagacaaaatgcctgaggatgttacattcagccctcaagatgaaacacagaccgcaaatcataaaccagaagagcatcctgaagaaaatacaaagaacagtgttgacgaacaggaagaaactgttatttcttacgaatcaactcctgaggtttctagaggaaatcaaacaatggcagtgaaaagtctgtccccatctcctgagtcctcggcatcgccagttccatccactcagccgcagctcacagaaggatcacatttcatgtgtgtgtagtcttagaagaactatactgacttctgttgaaaccattcaaagctaaagacatggaccttcagcagtgtaagaagatattgtacagtatattttaaatctatgaaattcatagttctgatgcttttggtcacagagcatcattttatcacttctggaaaatgtttattccaaaacagctttaatggcccatatgtacacttcgtaatctcaaggttattattctgacaccagcttgctgctatgatttcagagcacataagtaaaggtgctttttaatgtgcagtctatttccagagcttacttagttgctgatttccagatttcgatgtttcttaagtctaggtgaatttatatatatatttttttgcttttcattttctaaagttagttattatttccattgaagcttgttttcttttttttcttcccattttagctactgcagtgcttttgtttcacacttgatttgtaaaaattttatatatatgtatttaaaatgtgccattttattgctaagtgaagtatgtcctgttttctgctataattctttctcggtcagattgcaatgtcagcagttactgccacactcctgtcagcttaaacacaaatgttactgcttatcttttcttaaaaaaaaaaaaaacaaagtgtaggtattttgaagtactgggcttatatttcattggaatacatgtgtacagcaataagcaggtttccaaatccggtacttagtttgtgtacaaatgtaattatgttcattgtgtatatattatacaatgagcacatgtaatgtattaaaggctacttactattgtttaaatgcaaatgttcatatctcatttctttttttatcatgttaaataaatgttgatgttcttaaa

SEQ ID NO: 6913 - protein, 1116 aa, Homo sapiens; identical to SEQ ID NO: 942

SEQ ID NO: 6914 - DNA, 1619 bp, Homo sapiens
cctcctccctcggcagccgcggcggcagcaggagaaggcggcggcggcggctagggatcagacatggcggcggatctgaacctggagtggatctccctgccccggtcctggacttacgggatcaccaggggcggccgagtcttcttcatcaacgaggaggccaagagcaccacctggctgcaccccgtcaccggcgaggcggtggtcaccggacaccggcggcagagcacagatttgcctactggctgggaagaagcatatacttttgaaggtgcaagatactatataaactgaatagatttccttttcattcttcctgggaatagaagatgtaatggaagttccagtatctgtatgcaggcctatgactagcttcacttcttggtgactaatactagttgacaaaacagcatattctaaactgattgtcttcgttatccagtagctttcctattctccataacaaatgttccaaatctttgattactcacctcagaatgcttgtctcactcctcttttcctcattcctagtagatcataccttggagaagaaagtagaaactatcaggcctgaacttcattagctttttcttcctcttcaatccaaatctgtctgtatcttcattcatttttcttaaccctttccttgcttgctatttctgctttccaaaaccaaggaaggaattttgacagaggtacccaaggaattcactgggggaaaatgaatgattcaataaatgatgttatgataattagatagatagctatatgtaagcataaaaaatttttaaaaccttaggcccttattatcatatcatgcacaaaaattaagtggattattgatttaaatgtaaaaacaaaaagtataaaacttttagaaaaaagagattatttgtgacattgggtctggcaaagatttcttagatgcgattaaagatttacaaaagaaaaaattgataaattagacttcatcaaaatttagaaattttgctttatctgtgtaggatactgaagagaatgaaaagacaagtcacagactgggagaaagtacaggcaaatcacatatttgtcaaataactcatatccagaatttttaaagaacttttacaactcaataataacaagacaaacagctcaattttttaaatgagggaaaaatttaaatatatttcacatgagaatatactcaaatagccagtgagcacatgaaaagatgttcagcatcattagacattagcaaattgcaaattaaaaccacactgaggaacccactaggaatggctataatcaaagacgatcagtatcaagtattgcggagaatgtggagaaactcaaactctgttacactagtaatagaaatataaaatgttagaaccactttggaaagagattggcagtttctggaaaaaattaattgtaaatttgaccaagcaattttactacgtaagtatgttaagaatgaaaacgtgtgcacacaaagatctgtactaaaatgttgatagcattattcataacagcctaacagtgcaaatgtctgtcaactactgtgaatggagagacaaaatgtgtttattaatacaataaaactacccagcaataaaaagaaataattgactgat

SEQ ID NO: 6915 - protein, 76 aa, Homo sapiens
MAADLNLEWISLPRSWTYGITRGGRVFFINEEAKSTTWLHPVTGEAVVTGHRRQSTDLPTGWEEAYTFEGARYYIN

SEQ ID NO: 6916 - DNA, 1968 bp, Homo sapiens
cctcctccctcggcagccgcggcggcagcaggagaaggcggcggcggcggctagggatcagacatggcggcggatctgaacctggagtggatctccctgccccggtcctggacttacgggatcaccaggggcggccgagtcttcttcatcaacgaggaggccaagagcaccacctggctgcaccccgtcaccggcgaggcggtggtcaccggacaccggcggcagagcacagatttgcctactggctgggaagaagcatatacttttgaaggtgcaagatactatataaactgaatagatttccttttcattcttcctgggaatagaagatgtaatggaagttccagtatctgtatgcaggcctatgactagcttcacttcttggtgactaatactagttgacaaaacagcatattctaaactgattgtcttcgttatccagtagctttcctattctccataacaaatgttccaaatctttgattactcacctcagaatgcttgtctcactcctcttttcctcattcctagtagatcataccttggagaagaaagtagaaactatcaggcctgaacttcattagctttttcttcctcttcaatccaaatctgtctgtatcttcattcatttttcttaaccctttccttgcttgctatttctgctttccaaaaccaaggaaggaattttgacagaggtacccaaggaattcactgggggaaaatgaatgattcaataaatgatgttatgataattagatagatagctatatgtaagcataaaaaatttttaaaaccttaggcccttattatcatatcatgcacaaaaattaagtggattattgatttaaatgtaaaaacaaaaagtataaaacttttagaaaaaagagattatttgtgacattgggtctggcaaagatttcttagatgcgattaaagatttacaaaagaaaaaattgataaattagacttcatcaaaatttagaaattttgctttatctgtgtaggatactgaagagaatgaaaagacaagtcacagactgggagaaagtacaggcaaatcacatatttgtcaaataactcatatccagaatttttaaagaacttttacaactcaataataacaagacaaacagctcaattttttaaatgagggaaaaatttaaatatatttcacatgagaatatactcaaatagccagtgagcacatgaaaagatgttcagcatcattagacattagcaaattgcaaattaaaaccacactgaggaacccactaggaatggctataatcaaagacgatcagtatcaagtattgcggagaatgtggagaaactcaaactctgttacactagtaatagaaatataaaatgttagaaccactttggaaagagattggcagtttctggaaaaaattaattgtaaatttgaccaagcaattttactacgtaagtatgttaagaatgaaaacgtgtgcacacaaagatctgtactaaaatgttgatagcattattcataacagcctaacagtgcaaatgtctgtcaactactgtgaatggagagacaaaatgtgtttattaatacaataaaactacccagcaataaaaagaaataattgactgataaatggtatacgatgactgaactttaaaaccttgatgctgcctaaaagagccagacacagactacacattgtataattccatttttatgaatttcccagaaaggcaaattatagagacaaaacaaatcagtggttgcctagggctggtggtggacgtggagattgactgtaaatgggacatgagggaatttttttgtggtgatagaaatgttataaaactagatgtggtaatagttgcacaactctgtaaattcactaaaagtcactgaactgtacacttaaccataggtgggtttaatgaaatgtgaattacactgcaataaaactaaataaaagctgagttagtacc

SEQ ID NO: 6917 - protein, 76 aa, Homo sapiens; identical to SEQ ID NO: 6915

SEQ ID NO: 6918 - DNA, 536 bp, Homo sapiens
aacatcttttttttttttttttttttagtgaaccttgttcatgtatattttgaccagggctgtttataggtagcaaaagtgatgtaaagctaggcacaatttgataaacaatgacggtcagggagtaaaaatagaaatagttactgaatatttcatgagcatatattggagcattgtttgtatttttgcctcagtttatttaaatatgtctaagtcaagatgttttattgatatgtttgtttaaaaaaggcttttagtagagcttgagagaaaagatgaccagtcatttataaacaataacagatacctagctaaagttacctttatttcattgagcctagaaagttatttttactgtgacatttttaagatcatgttatacttccagtaaattataattacctgtatggttctttaatcttttagaaagatacttagataaaacgtcaagggcttttttataagtattaggaatgcttgcttttggatgtagaaatagagaaagcagaagatacaggaatggaatagtttcatgg

SEQ ID NO: 6919 - DNA, 5391 bp, Homo sapiens
tatgcctcaatatcatttatgctgaaaaacaacttaaaatgcatggcctgctcagagtggtttagaaatgtgatcatttagtcttcctcttatatagattttacacctcttgaaagtaggaactgttacacataagtcaatgagtatttgttgatagtgtagtgttcacttaataatatacgtatttcttttttctatttaagaaagcctgggcgacagagcgagactccatctcaaaaaaaaaaaaaaaaaaaagaaaagaaaaaaaaactcagtggcttaaaacaataactatatattattgtgcatacttttcatgggtttgctgggcagtttctcccgtttgtttctttctctagtttctgtggggcctgctcttatctgagatcacctagtcaggtaagaggctttgctgatcttggcaggtctagcatggccttatccaggatgatgggaatgactcttcctctaataggttccggcttcatctgctaggcccaggcttgctgtgattgatgaagacaggcatccacccgagtgagcagaagcacctaagggtctcttgaggcctagattcagaactgggacagtgtcacttttactgctttctgttggctaaaggcagtcacaaggtcagttcagattcaaaaagtggagaaatggactccatctttggataggaggagttgcagactaacattgtacaaggttgtagatacaaggagaggtggaagatggaggcatttttgtaatccatgtaaggtacatgctgaaaaaattactgaacccagctaaagtttaggttcttcagtctgaaatatgggattacacttgatcctgaacacactgctgatcatatatgtactccttagattatatagaaatctatgtggacatgtgtgggatgaccctctttattaaaactgttaattcctaactcctgtagaatagagttattatgtttttttcttttgatgccctgtttagttggtttggtactttcactggggctgtgtcagtttaaggtccaaaatagatctgactgattctgttttgggggatggaggaaggtatcttaggtctcagtgtgcttctgagaagtctttcaagtagatgacctcccctgttctgcccacacccaaaacccactgaccaagcacttgctgtcatgttaccctgttttgttttccctgtggcacttatcactggttaaaattcttattcacttacgtgttttctttttctgccttgtgatatgagcctcacaagagtggggacctcctctgaccctctttgctgctaaattctcacagttaagaatagtgcctttctgttcttaggaaatgctcaataaatatctgttgaacatttgtaataaatattttgtaataaacaagtcagcagtttgttaaaatacagtgtgtttaaatgctatgtcactggtgcattgcagacacttgttgggtatttatggaatcttgagggagggccgtggtcagtaggagctcaaggagaatgaaagcttgaagccacaaagggtttttctagattaatccagtgaaagacagatgagcaggagagttagggtatgatagatttgttgaaatgttgaactgttagacttcaggctgggaaggagggaagtagagcaaaaagtgatctgatagattgggatagagattcttccaagaccagagaactcccacagggaagtagttaaacatgtatactgcaaggttggagatttggtgttgcagtgtgatcattgaagtcatgattttagatgtgccaggttatgggtatgacaaggttctgggattaagagaatggatggctcaggtagttgaaggaccttgggggaatggggaataaatatctgttctttgagagaatgcagtaggacagctgatgggagaaagtccttaacagccaaggtactgaggtaatgctttgaaaagaggttgagggtatagaggagtttgctaattatggagcaccatttccataggtagttaaatttgtaagatagaaggtggactgtagactaggtcagggatggaaaaaacaaagccttgtagggttaatgccaggtcagtagatggattgagagaggaattggagataaagttaatttgggcattgagaggtttgctgaatttagtttcagtagactcctagagaaaggtgaccctgggacttacagaggccgtgactcatttggccaagagtggtggtcagcccaggaatttgtgggttctgcctgtgctccttaaagggtatttgggtaggtagattgtgaactcttaatagcttacatactaagcagatacatagtcattagcagcttccatattttcactatggtttttcagaatattttaagtatttttttattagaaatgacattttccaaatgtaaactctttagagatggaaaacattaatgatatatgcaaatactaaaggacagtgatttaatttaagtaatactgttgtcaagtgtaaaattcaaagatctaagcctggaacctggacttaaaaaaaaaattcaaggatcaagattttcaggttagcattttctattttttggtcatacttttttttttttttttttttgagacagggtcttgcactgtcacccaggctggagtgtagtgacacgatctcggctcactgcaagctccacctccagagttcatgccattctcctgcctcagcctcccgagtagctgggactacaggcgcctgccaccacgcccggctaattttttgtacttttagtagagacagggtttcagcatgttagccaggatggtctcgatctcctgacgtcgtgatccaccctccttggcctcccaaagtgctgggattacaggcgtgagccaccgcgcccggccacattttttttacattggtattagcagtagatattttaatgtaaatatttaatcttttttgctgttagtcattttgaaagttcaaactgtgtgatgaaccagaccaaaacttcataatctttaaaccacaaagttgcctaataggcaacaaagtaagcaggacaacagtggaagattttacaaattctcagaaacacctggaaataatttaggaaaagcttttgactctaggctcatagatagagactgtacatgaagaataattaatagcaattactttcttgtctttagtctttcgtcagatttgtttctttgaaaagagcaaggcaggttaaaataatctgtataatataaattgcccatgcaatgcaggtcagtttgttttatgcaggtagcagtagtacgaacttggggtccaatgatattttttatatactacttatatatgatggtaataattaaaatctttgagtatgttttatttctttaattatgacaatttaattaaatgccaaatgaatataacatttgtcagacataagggaaaataagatgaataagcactgcacatgatactcagcttaaaataagaacattttttttatgtcaaagagcttctctaggatctgtaaataggagtgtaattgaagttgtaaagtacatgcatttgattttgggaatttctttattataatcttttatccataatatgtgtggcaaatttactctcctacattgtagcttaccttcacattccaagagatcttttgacgaacagagttcttaattttaataaaattatgtcagtcttctgtaaattaacacaggttttttgtttttttttttgttgtttttaattcctttccagtactttaatctttttccattccagtccttacatttctttatattgctggctagtattgccagtacagtgatagaagcaactacagctctgatgtaaaaatgaaggattctaatttttaccactaagaatgatatctgatgaagatttttggaaggtatcatttccaggtgaaggaaattctctatttctactttagtaagaacttttattatgagtttaagtattgaattttatcaactatttgttctgcattcattaagattttttttcttttagtttgcttattcagtgaattccatgaattgcattaatactcttgttaatgctaaaccattaatggtaaatcttacattgttgggatcaacccaacttggtcatgaagtactcttttttccaagttaataaagtttgtattttttagagcacttttaggttcatggcaaaatttagtagaaaatgtataaagttctctgttacgcgtacacacacacaaacctttaccccctcccccactgtggacatcttgcaccacagtgatacagttgttacaattgtacctacattgtcacatcattatcacccaaagttcatagtttaccttaggattcactcttggtgttgtgtgttcattgagttttgacaaatgtaaatgacatgtatccaccatcacagtatcatacagaatagtttcacccccctaaaatcatctgtacattgttctgttgggtttgttgatacttcatttaagactttgatatttatgataacaaagtgaaattgccctgtaattttcttctcttgtactgtcattgtctggctttgatagcaaggttggtctagcctcagaaaatgagttggaaggtgttccacttttttgtactctggaagagtttgtatgaggttagaatcagtcatggagaaagggatattatagttttcaaatgttgcagtgacttcttgttttctctgtgtactctgtccttttattttgagtttatattatcagatgcatttaagtatagaattgttatgttctgttaagtgtagaatatgccatcagaatgaagccaacatttttatcatgaggggacctccacctccggtagtacttgtgcctttatctgttttgtctgattttgatatataaactttcttttatttagcattacctactctaattttttttcacccttttaaaatatctgtttatccgtatatttgggtgtatctttttaaaatagtatataatgaatctttttccagttttataaacttttttttaacttatagtcaacttatgattgttggtatatttaggtttatttataccttattttgttctttcttctcttccttgttttcttgttggttatttaaaaggtatatagttttaaaattgtgtacaaccaagatactcagcaatggataatcaattttcctctcaatctttgactttcaagaaactggaatagatttcagtatgtactacaaattgagtgagaaattattcgggaaaatgcccaataaaaggccttcataattttggaagaagtaattggaataaaggtgactcatctcttattagtgagaatggttaaatatgctaattaaatgcctttcactttt

SEQ ID NO: 6920 - protein, 67 aa, Homo sapiens
MAKFSRKCIKFSVTRTHTQTFTPSPTVDILHHSDTVVTIVPTLSHHYHPKFIVYLRIHSWCCVFIEF

SEQ ID NO: 6921 - DNA, 428 bp, Homo sapiens
ctcaaagacaaagcagttgagtcttatttttactccagtgttctttttgcctgtaattgaatatccttttaagaattgattttgatgaaggctgtgtcattgaacagaagatgaaaggcagaactgagaagtctcattggctgtggaagagttggagaaaggggcagctgttgaaaggttgggatctgaaaaggaaagcagctcaagccttggaggcactcctacttggagtatgacttctggcaactttctaaatgctatgagcctcggtttatgtattcataaactgcaaataataacacctacctcaaatgggctctgtgaggattgtcaaggccattacgtgacagctgaatatccataatgaaaggaaagtgacctgcaaacatccagtcacaggacaaccatcacaggacaattgtattttt

SEQ ID NO: 6922 - protein, 43 aa, Homo sapiens
MTSGNFLNAMSLGLCIHKLQIITPTSNGLCEDCQGHYVTAEYP

SEQ ID NO: 6923 - DNA, 886 bp, Homo sapiens
gtttcagataagtgactggtagataactgaggtgacatcctcaatcttcaaggcttttttctttctgattctatatacgtacagatgatacaaagcaagttaaatattagttcattggtgtcagtttattctgttaaatattgctgattgctttcaggtgacctaatgatttttatttattgagtcataatttttattgaaagatcattgactatattttaaccatctgatatttaagctttccaggccaaggtgggtggatcaccttaggacaggagttcaagaccagcctggccaacatggagaaaccctgtctctaccaaaaatacaaaaattagccagctgtagtggtgcacgactgtaatcctagctactcgggaggctgagacacgagaatcacttgaaaccaggaagcagaggttgcagtgagctgagattgtagcactacacaccatcctgggtgacagtgtgagactgtctcggaaaaaaaaaaaaattgaagatatcatttgccatttaatttttttttttttttttggtttcttttttggtatagctgtcaattttaaggccaaatcttttattttgaaagattttacccatgttaatttctataattctgaagtcattactcacagctagaaataaatttagaaataatcaatgcacatccaaactggcctctcgttttttcttttttcttttttctttttttttggtatctgtttaattctcacttccaattttgctacattgcatatgggaaagtaatttttattaaaattctaattttgtttgagcctgatattttaatgaactaaattacttagaaatagctgccaaaaagtctctcttttttgcatgatgagcaaatcccaaactatag

SEQ ID NO: 6924 - protein, 42 aa, Homo sapiens
MLISIILKSLLTARNKFRNNQCTSKLASRFFFFLFSFFLVSV

SEQ ID NO: 6925 - DNA, 898 bp, Homo sapiens
ggtcaagatagacccttaacaaaaattaatagtgtaaagctgaattctctgccatctgaatatgagagtgggtcagcatgccctgctcagactgtgcactacagaccaatcaacttgagcagttcagagaacaaaatagtcaatgttagcctggcagatcttagaggtggaaatcgccccaatacagggcccttatacacagaggccgatcgagtcatacagagaacaaattcaatgcagcagttggaacagtggattaaaatccagaaggggaggggtcatgaagaagaaaccaggggagtaatttcttaccaaacattaccaagaaatatgccaagtcacagagcccagattatggcccgctaccctgaaggttatagaacactcccaagaaacagcaagacaaggcctgaaagtatctgcagtgtaaccccttccactcatgacaagacattaggacccggagcggaggagaaacggaggtccatgagagatgacacaatgtggcagctctacgaatggcagcagcgtcagttttataacaaacagagcaccctccctcgacacagtactttgagtagtcccaaaaccatggtaaatatttctgaccagacaatgcactctattcccacatcaccttcccacgggtcaatagctgcttatcagggatactcccctcaacgaacttacagatcggaagtgtcttcaccaattcagagaggagatgtgacaatagaccgcagacacagggcccatcaccctaaggtaaaatagctgctgattttgtgttaactcactaccttataaatgctgtgttttctttctagtatactattttaaatgtgagagacaaaagaatggggataaagtaagcaaggcagctcttttttgttttaaa

SEQ ID NO: 6926 - protein, 179 aa, Homo sapiens
MQQLEQWIKIQKGRGHEEETRGVISYQTLPRNMPSHRAQIMARYPEGYRTLPRNSKTRPESICSVTPSTHDKTLGPGAEEKRRSMRDDTMWQLYEWQQRQFYNKQSTLPRHSTLSSPKTMVNISDQTMHSIPTSPSHGSIAAYQGYSPQRTYRSEVSSPIQRGDVTIDRRHRAHHPKVK

SEQ ID NO: 6927 - DNA, 505 bp, Homo sapiens
aagaaatatgccaagtcacagagcccagattatggcccgctaccctgaaggttatagaacactcccaagaaacagcaagacaaggcctgaaagtatctgcagtgtaaccccttccattttataacaaacagagcaccctccctcgacacagtactttgagtagtcccaaaaccatggtaaatatttctgaccagacaatgcactctattcccacatcaccttcccacgggtcaatagctgcttatcagggatactcccctcaacgaacttacagatcggaagtgtcttcaccaattcagagaggagatgtgacaatagaccgcagacacagggcccatcaccctaaggtaaaatagctgctgattttgtgttaactcactaccttataaatgctgtgttttctttctagtatactattttaaatgtgagagacaaaagaatggggataaagtaagcaaggcagctcttttttgttttaaaaaataaataaaaatattttacaaca

SEQ ID NO: 6928 - protein, 38 aa, Homo sapiens
MPSHRAQIMARYPEGYRTLPRNSKTRPESICSVTPSIL

SEQ ID NO: 6929 - DNA, 1031 bp, Homo sapiens
gttgctatatgatttttttcttatagctgtcacaagatgaaggtagaggcacattatacaaatacagacctgaagaagtagatattgatgtaagtattagtatgatatatgtggtcagtactctgtcgtattctccgccaaaaacactggaaataagcatgaccaaaaaacttctttctcccaagtcctccaaagtgacatcaggtaaattcatattttatgtgtgtgctctaaattattattccctgccctctacgtcccactgctccctattgttagcagtccaacgttattaagcatcacttaaatgaaagtaaaaactgtttctgatttttagaagttacagattggctggtctcgacctcctgacctcaggtcatccacccaccttggcctcccaaagtgcagagatacgggggtgagccaccgagcccagccccctactttttctttttaacacctttcattttgtgtaggctgagtcttgttgtctgacaaagataaggtagttattttaatagataaatggcaaagaaagtaaagtctcaaatttcttgcttatgtgtcattatgccataaagttggggacatatttccaatttgtccagtgttttcattttgaaacattaaaactggtttattgtactattgaaattttattagaatactttcttgtactttcataattaagaaattagggtaatattaagaatttaaacactaaaaccctgatgaaagttatttttctccattaataatatttttatttgtatttcaattagaagtgatctattgtttatattattttctaagaatctaagagtgtgttttttaaacatataacaatagaatccagtaagcattttaattaaggactgcatattatcacttaacctatttagcagattgtagaggcaaaatgcttgcatgcctattttttaaggattctatctttgtaagctatattttaacttttattgattgaaatatagatttttggtcatataatgactgcctacctccaattacag

SEQ ID NO: 6930 - protein, 64 aa, Homo sapiens
MIYVVSTLSYSPPKTLEISMTKKLLSPKSSKVTSGKFIFYVCALNYYSLPSTSHCSLLLAVQRY

SEQ ID NO: 6931 - DNA, 3016 bp, Homo sapiens
ttcgccgcacttcccgctcgaccctcggttctggacaacggagatcgtccccagtcaagcataagcagtactataatggatgtagacagcacaatttccagtgggcgttcaactccagcaatgatgaatggacaaggaagcactacttcttcaagcaaaaatattgcctataattgttgttgggaccagtgccaggcttgcttcaactctagcccagatctggcagatcacatccgttccatacatgtagatggtcagcgaggaggggtatttgtttgcttatggaaaggttgtaaagtatataacactccatctaccagtcaaagttggttacaaaggcatatgctgacacacagtggagacaaacctttcaagtgtgttgttggtggctgcaatgccagctttgcttctcagggagggctagctcgtcatgtacccacacacttcagtcagcagaactcctcaaaagtttctagccagccaaaggccaaagaagaatctccttctaaagctggaatgaacaaaaggaggaaattaaagaacaaaagacgacgctcattaccacggccacatgatttcttcgatgcacaaacactggatgcgataagacatcgagccatatgctttaacctctcagctcatatagaaagtttagggaagggacacagtgttgtttttcatagtactgtaatagctaagagaaaagaagattctgggaagatcaaacttttgcttcattggatgcctgaagacattctgcctgatgtgtgggtgaatgaaagtgaacgacatcagttaaaaactaaagtagttcatttatcaaagctacccaaagatactgccttgcttttggacccaaacatatacagaacaatgccgcagaagaggttgaagaggtaaaaaataaataaatacataaaaagcaaacaagcggggacacctgcagtcttagtcactgacaatgggtttagggaaagttgcacattagagtcaaccccttcttttttttttttttttttttaaatccagtatttaggataatatttatgcttagtgtaaacattctgtgaatgaagtagactcttcggtggaatatattaatatattactgtatatccacattttcatggaatggtactgtgggagactgagcaaacactcttttggcaacttagtagaacagcttcttaaaggctttgcatgcttgctgctttaagctgcttttttttttcttttcttccctttagtgatttcagtagtttatattggaaagaaaaacaattacaacatgtgcccttacaaataccaaaagcactgtaaggatatttgtcttgacagtgtttattgatttgaagtcatattaggaaatatttagacaatgaaaattatcaagagataatttacctttcaattatgataaatagatgtgattggttgccatttgtgttcttttgcagaactctgataagaaaagtgttcaatttgtatttaagcaaacagtgaacgacgtttgcaatcaactaaaaattcgtctatcgaattagggctgaaaattactgttaaagagtgttgcagtatgtctggtggctcccttttcaggactagggctttctcatggagtacagtatgttaatatttacctatataactaatctgttaacggtttttgaaaaacctttcaaattatttgaataatcttcatattttcatttaacctatatgactctaattttttttctgaggaaatcatttggtttttgagttgttttttcttaatgtaagaaaaattgtattttttttacaagtatcttcaaactgaatcttttatgcaccaaagttggtcttgaaaaggaaaataaaatcactttcttgcttggtaagcaagaagccatatcgattttttttaacttacagaaatggaaatatgtgtaacttgttagtattgtattaaacaaatgttgcatagagataatagaacattgcttgtaaataattcagcagatttgtaatatatttttatattttgaaatgtactgtagatgttttctagaggcatgaaagttaaatgtatatattatggtagaaataatattgaaggatattgtacttcactagtgctgccagaggaattgttaataaaagcaccttctttaacaataaatgtctttcacagacttaagggactatgtactactgttaatatctctaagaacaaaacacattgaacatccttccagaaagtctttgagggaggacctatacccataatagaattatggcactcatttctgacagtgatcaagaaatcagttatttccttactgttggaaggacattgtaaagtatgtggttatatgcagtgaaactgcagaaaatactcctggttgaggagttttcactttactacagtgatataaaaaccagcagtttttacactaaattttttaaagaaatattagacaaaaatatagaattaaaacctttggttccaaaatgggaaaggttccacgatacataaatcatttctcatttgctttaaaaaatttaaaagtgtaaaaattatgagagactttattcgttaacaatgggggtaaagagctatatacatgaaaatgagtcttataaaattaagtgaagtgcaaataaaagcactgctactataagacattctggaatggttgtttaataagggtattatccatttgatctatagcaatgtgattttatttttaaaaagaaaagcagtgtgttttctttttttgttgttttcttttgcttaagcacttcatcaattgctttattctgtatctgcgaagtaatctgcaatctcttttgttctttttaaaatttgatttgttataaaattgccaaatagaagtgtttcagatacatagtttgtacctgtatttttattttattgcctcatgttcttgtaagtcattcttaattgaccaatgattgtagaccttgcttgagtattttttctaataaaacaaagcaaatcacatttagcttc

SEQ ID NO: 6932 - protein, 274 aa, Homo sapiens
MDVDSTISSGRSTPAMMNGQGSTTSSSKNIAYNCCWDQCQACFNSSPDLADHIRSIHVDGQRGGVFVCLWKGCKVYNTPSTSQSWLQRHMLTHSGDKPFKCVVGGCNASFASQGGLARHVPTHFSQQNSSKVSSQPKAKEESPSKAGMNKRRKLKNKRRRSLPRPHDFFDAQTLDAIRHRAICFNLSAHIESLGKGHSVVFHSTVIAKRKEDSGKIKLLLHWMPEDILPDVWVNESERHQLKTKVVHLSKLPKDTALLLDPNIYRTMPQKRLKR

SEQ ID NO: 6933 - DNA, 3743 bp, Homo sapiens
ttcgccgcacttcccgctcgaccctcggttctggacaacggagatcgtccccagtcaagcataagcagtactataatggatgtagacagcacaatttccagtgggcgttcaactccagcaatgatgaatggacaaggaagcactacttcttcaagcaaaaatattgcctataattgttgttgggaccagtgccaggcttgcttcaactctagcccagatctggcagatcacatccgttccatacatgtagatggtcagcgaggaggggtatttgtttgcttatggaaaggttgtaaagtatataacactccatctaccagtcaaagttggttacaaaggcatatgctgacacacagtggagacaaacctttcaagtgtgttgttggtggctgcaatgccagctttgcttctcagggagggctagctcgtcatgtacccacacacttcagtcagcagaactcctcaaaagtttctagccagccaaaggccaaagaagaatctccttctaaagctggaatgaacaaaaggaggaaattaaagaacaaaagacgacgctcattaccacggccacatgatttcttcgatgcacaaacactggatgcgataagacatcgagccatatgctttaacctctcagctcatatagaaagtttagggaagggacacagtgttgtttttcatagtactgtaatagctaagagaaaagaagattctgggaagatcaaacttttgcttcattggatgcctgaagacattctgcctgatgtgtgggtgaatgaaagtgaacgacatcagttaaaaactaaagtagttcatttatcaaagctacccaaagatactgccttgcttttggacccaaacatatacagaacaatgccgcagaagaggttgaagaggtaaaaaataaataaatacataaaaagcaaacaagcggggacacctgcagtcttagtcactgacaatgggtttagggaaagttgcacattagagtcaaccccttcttttttttttttttttttttaaatccagtatttaggataatatttatgcttagtgtaaacattctgtgaatgaagtagactcttcggtggaatatattaatatattactgtatatccacattttcatggaatggtactgtgggagactgagcaaacactcttttggcaacttagtagaacagcttcttaaaggctttgcatgcttgctgctttaagctgcttttttttttcttttcttccctttagtgatttcagtagtttatattggaaagaaaaacaattacaacatgtgcccttacaaataccaaaagcactgtaaggatatttgtcttgacagtgtttattgatttgaagtcatattaggaaatatttagacaatgaaaattatcaagagataatttacctttcaattatgataaatagatgtgattggttgccatttgtgttcttttgcagaactctgataagaaaagtgttcaatttgtatttaagcaaacagtgaacgacgtttgcaatcaactaaaaattcgtctatcgaattagggctgaaaattactgttaaagagtgttgcagtatgtctggtggctcccttttcaggactagggctttctcatggagtacagtatgttaatatttacctatataactaatctgttaacggtttttgaaaaacctttcaaattatttgaataatcttcatattttcatttaacctatatgactctaattttttttctgaggaaatcatttggtttttgagttgttttttcttaatgtaagaaaaattgtattttttttacaagtatcttcaaactgaatcttttatgcaccaaagttggtcttgaaaaggaaaataaaatcactttcttgcttggtaagcaagaagccatatcgattttttttaacttacagaaatggaaatatgtgtaacttgttagtattgtattaaacaaatgttgcatagagataatagaacattgcttgtaaataattcagcagatttgtaatatatttttatattttgaaatgtactgtagatgttttctagaggcatgaaagttaaatgtatatattatggtagaaataatattgaaggatattgtacttcactagtgctgccagaggaattgttaataaaagcaccttctttaacaataaatgtctttcacagacttaagggactatgtactactgttaatatctctaagaacaaaacacattgaacatccttccagaaagtctttgagggaggacctatacccataatagaattatggcactcatttctgacagtgatcaagaaatcagttatttccttactgttggaaggacattgtaaagtatgtggttatatgcagtgaaactgcagaaaatactcctggttgaggagttttcactttactacagtgatataaaaaccagcagtttttacactaaattttttaaagaaatattagacaaaaatatagaattaaaacctttggttccaaaatgggaaaggttccacgatacataaatcatttctcatttgctttaaaaaatttaaaagtgtaaaaattatgagagactttattcgttaacaatgggggtaaagagctatatacatgaaaatgagtcttataaaattaagtgaagtgcaaataaaagcactgctactataagacattctggaatggttgtttaataagggtattatccatttgatctatagcaatgtgattttatttttaaaaagaaaagcagtgtgttttctttttttgttgttttcttttgcttaagcacttcatcaattgctttattctgtatctgcgaagtaatctgcaatctcttttgttctttttaaaatttgatttgttataaaattgccaaatagaagtgtttcagatacatagtttgtacctgtatttttattttattgcctcatgttcttgtaagtcattcttaattgaccaatgattgtagaccttgcttgagtattttttctaataaaacaaagcaaatcacatttagcttcaaattgtaacaattcaattgaattttaaaatgacacctgaaaagatacatctgatattttctatatagagcacagtaaataagttttttcattgtgtagaaatacttagatgtcaaaaccagatttcgtgatccttgattaacttctgagtactcaatcaatcataatccttttgctgcttatctgatgttggtttgatactgttaacacaccaaaaagaatatggaattgaaatgagctagctttataacttgtatgtatacatatatacacataacatccaattatgactgggtaataagtgtgaaaattttaatttgtggttttcatttattaatgtctgcccatctgtattgttgctcctaccttcaaatatgacacctgaaataataagtctgttgtccagaatttatgtattgttcagcatcaagcaaactacagctcacaagcatacccatttatatgttgtctatgcctgctttctcctgcagtggcagaattgagtggtgagaccttaggtcctgcaagcccccaatttttactacaggttggcaatccctaatccaaaaatctgacataaaaaatgctccaaagttcaaaactttctgagtgctgacatcatgctgcaagtggaaaattccacgcctgacctcatgtgactggtcatagtcaaaacaattaagactttgtttcatgcacaaaattattaaaactgttgtataaaatt

SEQ ID NO: 6934 - protein, 274 aa, Homo sapiens; identical to SEQ ID NO: 6932

SEQ ID NO: 6935 - DNA, 3806 bp, Homo sapiens
ttcgccgcacttcccgctcgaccctcggttctggacaacggagatcgtccccagtcaagcataagcagtactataatggatgtagacagcacaatttccagtgggcgttcaactccagcaatgatgaatggacaaggaagcactacttcttcaagcaaaaatattgcctataattgttgttgggaccagtgccaggcttgcttcaactctagcccagatctggcagatcacatccgttccatacatgtagatggtcagcgaggaggggtatttgtttgcttatggaaaggttgtaaagtatataacactccatctaccagtcaaagttggttacaaaggcatatgctgacacacagtggagacaaacctttcaagtgtgttgttggtggctgcaatgccagctttgcttctcagggagggctagctcgtcatgtacccacacacttcagtcagcagaactcctcaaaagtttctagccagccaaaggccaaagaagaatctccttctaaagctggaatgaacaaaaggaggaaattaaagaacaaaagacgacgctcattaccacggccacatgatttcttcgatgcacaaacactggatgcgataagacatcgagccatatgctttaacctctcagctcatatagaaagtttagggaagggacacagtgttgtttttcatagtactgtaatagctaagagaaaagaagattctgggaagatcaaacttttgcttcattggatgcctgaagacattctgcctgatgtgtgggtgaatgaaagtgaacgacatcagttaaaaactaaagtagttcatttatcaaagctacccaaagatactgccttgcttttggacccaaacatatacagaacaatgccgcagaagaggttgaagaggtaaaaaataaataaatacataaaaagcaaacaagcggggacacctgcagtcttagtcactgacaatgggtttagggaaagttgcacattagagtcaaccccttcttttttttttttttttttttaaatccagtatttaggataatatttatgcttagtgtaaacattctgtgaatgaagtagactcttcggtggaatatattaatatattactgtatatccacattttcatggaatggtactgtgggagactgagcaaacactcttttggcaacttagtagaacagcttcttaaaggctttgcatgcttgctgctttaagctgcttttttttttcttttcttccctttagtgatttcagtagtttatattggaaagaaaaacaattacaacatgtgcccttacaaataccaaaagcactgtaaggatatttgtcttgacagtgtttattgatttgaagtcatattaggaaatatttagacaatgaaaattatcaagagataatttacctttcaattatgataaatagatgtgattggttgccatttgtgttcttttgcagaactctgataagaaaagtgttcaatttgtatttaagcaaacagtgaacgacgtttgcaatcaactaaaaattcgtctatcgaattagggctgaaaattactgttaaagagtgttgcagtatgtctggtggctcccttttcaggactagggctttctcatggagtacagtatgttaatatttacctatataactaatctgttaacggtttttgaaaaacctttcaaattatttgaataatcttcatattttcatttaacctatatgactctaattttttttctgaggaaatcatttggtttttgagttgttttttcttaatgtaagaaaaattgtattttttttacaagtatcttcaaactgaatcttttatgcaccaaagttggtcttgaaaaggaaaataaaatcactttcttgcttggtaagcaagaagccatatcgattttttttaacttacagaaatggaaatatgtgtaacttgttagtattgtattaaacaaatgttgcatagagataatagaacattgcttgtaaataattcagcagatttgtaatatatttttatattttgaaatgtactgtagatgttttctagaggcatgaaagttaaatgtatatattatggtagaaataatattgaaggatattgtacttcactagtgctgccagaggaattgttaataaaagcaccttctttaacaataaatgtctttcacagacttaagggactatgtactactgttaatatctctaagaacaaaacacattgaacatccttccagaaagtctttgagggaggacctatacccataatagaattatggcactcatttctgacagtgatcaagaaatcagttatttccttactgttggaaggacattgtaaagtatgtggttatatgcagtgaaactgcagaaaatactcctggttgaggagttttcactttactacagtgatataaaaaccagcagtttttacactaaattttttaaagaaatattagacaaaaatatagaattaaaacctttggttccaaaatgggaaaggttccacgatacataaatcatttctcatttgctttaaaaaatttaaaagtgtaaaaattatgagagactttattcgttaacaatgggggtaaagagctatatacatgaaaatgagtcttataaaattaagtgaagtgcaaataaaagcactgctactataagacattctggaatggttgtttaataagggtattatccatttgatctatagcaatgtgattttatttttaaaaagaaaagcagtgtgttttctttttttgttgttttcttttgcttaagcacttcatcaattgctttattctgtatctgcgaagtaatctgcaatctcttttgttctttttaaaatttgatttgttataaaattgccaaatagaagtgtttcagatacatagtttgtacctgtatttttattttattgcctcatgttcttgtaagtcattcttaattgaccaatgattgtagaccttgcttgagtattttttctaataaaacaaagcaaatcacatttagcttcaaattgtaacaattcaattgaattttaaaatgacacctgaaaagatacatctgatattttctatatagagcacagtaaataagttttttcattgtgtagaaatacttagatgtcaaaaccagatttcgtgatccttgattaacttctgagtactcaatcaatcataatccttttgctgcttatctgatgttggtttgatactgttaacacaccaaaaagaatatggaattgaaatgagctagctttataacttgtatgtatacatatatacacataacatccaattatgactgggtaataagtgtgaaaattttaatttgtggttttcatttattaatgtctgcccatctgtattgttgctcctaccttcaaatatgacacctgaaataataagtctgttgtccagaatttatgtattgttcagcatcaagcaaactacagctcacaagcatacccatttatatgttgtctatgcctgctttctcctgcagtggcagaattgagtggtgagaccttaggtcctgcaagcccccaatttttactacaggttggcaatccctaatccaaaaatctgacataaaaaatgctccaaagttcaaaactttctgagtgctgacatcatgctgcaagtggaaaattccacgcctgacctcatgtgactggtcatagtcaaaacaattaagactttgtttcatgcacaaaattattaaaactgttgtataaaattaccttcagtctatgtgtataaggtgtttgtgagatataaatgaactttatgtttagtcttgga

SEQ ID NO: 6936 - protein, 274 aa, Homo sapiens; identical to SEQ ID NO: 6932

SEQ ID NO: 6937 - DNA, 3440 bp, Homo sapiens
aggcgccgccatggccgccgctatcaccgacatggccgacctggaggagctctcccgcctgagccctctgccccccggcagcccgggttcggcggcgcggggccgggctgagccccccgaggaggaggaggaagatgagagcagcagcagcggcgggggtgaggaggagagtagcgccgagagcctggtgggcagcagcggcgggagcagcagcgacgagacccgctcgttgagccccggcgccgccagcagcagcagcggggatggggacggcaaggagggcctggaggagcccaagggaccgcggggcagccagggcggcggcgggggcggcagcagtagcagcagcgtagtctccagcggcggcgacgagggctacgggactgggggaggcggaagcagcgcgacctccgggggccggcggggcagcttggagatgtcgtcggatggggaacccctgagccgcatggactcggaggacagcataagcagtactataatggatgtagacagcacaatttccagtgggcgttcaactccagcaatgatgaatggacaaggaagcactacttcttcaagcaaaaatattgcctataattgttgttgggaccagtgccaggcttgcttcaactctagcccagatctggcagatcacatccgttccatacatgtagatggtcagcgaggaggggtatttgtttgcttatggaaaggttgtaaagtatataacactccatctaccagtcaaagttggttacaaaggcatatgctgacacacagtggagacaaacctttcaagtgtgttgttggtggctgcaatgccagctttgcttctcagggagggctagctcgtcatgtacccacacacttcagtcagcagaactcctcaaaagtttctagccagccaaaggccaaagaagaatctccttctaaagctggaatgaacaaaaggaggaaattaaagaacaaaagacgacgctcattaccacggccacatgatttcttcgatgcacaaacactggatgcgataagacatcgagccatatgctttaacctctcagctcatatagaaagtttagggaagggacacagtgttgtttttcatagtactgtaatagctaagagaaaagaagattctgggaagatcaaacttttgcttcattggatgcctgaagacattctgcctgatgtgtgggtgaatgaaagtgaacgacatcagttaaaaactaaagtagttcatttatcaaagctacccaaagatactgccttgcttttggacccaaacatatacagaacaatgccgcagaagaggttgaagaggtaaaaaataaataaatacataaaaagcaaacaagcggggacacctgcagtcttagtcactgacaatgggtttagggaaagttgcacattagagtcaaccccttcttttttttttttttttttttaaatccagtatttaggataatatttatgcttagtgtaaacattctgtgaatgaagtagactcttcggtggaatatattaatatattactgtatatccacattttcatggaatggtactgtgggagactgagcaaacactcttttggcaacttagtagaacagcttcttaaaggctttgcatgcttgctgctttaagctgcttttttttttcttttcttccctttagtgatttcagtagtttatattggaaagaaaaacaattacaacatgtgcccttacaaataccaaaagcactgtaaggatatttgtcttgacagtgtttattgatttgaagtcatattaggaaatatttagacaatgaaaattatcaagagataatttacctttcaattatgataaatagatgtgattggttgccatttgtgttcttttgcagaactctgataagaaaagtgttcaatttgtatttaagcaaacagtgaacgacgtttgcaatcaactaaaaattcgtctatcgaattagggctgaaaattactgttaaagagtgttgcagtatgtctggtggctcccttttcaggactagggctttctcatggagtacagtatgttaatatttacctatataactaatctgttaacggtttttgaaaaacctttcaaattatttgaataatcttcatattttcatttaacctatatgactctaattttttttctgaggaaatcatttggtttttgagttgttttttcttaatgtaagaaaaattgtattttttttacaagtatcttcaaactgaatcttttatgcaccaaagttggtcttgaaaaggaaaataaaatcactttcttgcttggtaagcaagaagccatatcgattttttttaacttacagaaatggaaatatgtgtaacttgttagtattgtattaaacaaatgttgcatagagataatagaacattgcttgtaaataattcagcagatttgtaatatatttttatattttgaaatgtactgtagatgttttctagaggcatgaaagttaaatgtatatattatggtagaaataatattgaaggatattgtacttcactagtgctgccagaggaattgttaataaaagcaccttctttaacaataaatgtctttcacagacttaagggactatgtactactgttaatatctctaagaacaaaacacattgaacatccttccagaaagtctttgagggaggacctatacccataatagaattatggcactcatttctgacagtgatcaagaaatcagttatttccttactgttggaaggacattgtaaagtatgtggttatatgcagtgaaactgcagaaaatactcctggttgaggagttttcactttactacagtgatataaaaaccagcagtttttacactaaattttttaaagaaatattagacaaaaatatagaattaaaacctttggttccaaaatgggaaaggttccacgatacataaatcatttctcatttgctttaaaaaatttaaaagtgtaaaaattatgagagactttattcgttaacaatgggggtaaagagctatatacatgaaaatgagtcttataaaattaagtgaagtgcaaataaaagcactgctactataagacattctggaatggttgtttaataagggtattatccatttgatctatagcaatgtgattttatttttaaaaagaaaagcagtgtgttttctttttttgttgttttcttttgcttaagcacttcatcaattgctttattctgtatctgcgaagtaatctgcaatctcttttgttctttttaaaatttgatttgttataaaattgccaaatagaagtgtttcagatacatagtttgtacctgtatttttattttattgcctcatgttcttgtaagtcattcttaattgaccaatgattgtagaccttgcttgagtattttttctaataaaacaaagcaaatcacatttagcttc

SEQ ID NO: 6938 - protein, 437 aa, Homo sapiens
MAAAITDMADLEELSRLSPLPPGSPGSAARGRAEPPEEEEEDESSSSGGGEEESSAESLVGSSGGSSSDETRSLSPGAASSSSGDGDGKEGLEEPKGPRGSQGGGGGGSSSSSVVSSGGDEGYGTGGGGSSATSGGRRGSLEMSSDGEPLSRMDSEDSISSTIMDVDSTISSGRSTPAMMNGQGSTTSSSKNIAYNCCWDQCQACFNSSPDLADHIRSIHVDGQRGGVFVCLWKGCKVYNTPSTSQSWLQRHMLTHSGDKPFKCVVGGCNASFASQGGLARHVPTHFSQQNSSKVSSQPKAKEESPSKAGMNKRRKLKNKRRRSLPRPHDFFDAQTLDAIRHRAICFNLSAHIESLGKGHSVVFHSTVIAKRKEDSGKIKLLLHWMPEDILPDVWVNESERHQLKTKVVHLSKLPKDTALLLDPNIYRTMPQKRLKR

SEQ ID NO: 6939 - DNA, 3851 bp, Homo sapiens
aggcgccgccatggccgccgctatcaccgacatggccgacctggaggagctctcccgcctgagccctctgccccccggcagcccgggttcggcggcgcggggccgggctgagccccccgaggaggaggaggaagatgagagcagcagcagcggcgggggtgaggaggagagtagcgccgagagcctggtgggcagcagcggcgggagcagcagcgacgagacccgctcgttgagccccggcgccgccagcagcagcagcggggatggggacggcaaggagggcctggaggagcccaagggaccgcggggcagccagggcggcggcgggggcggcagcagtagcagcagcgtagtctccagcggcggcgacgagggctacgggactgggggaggcggaagcagcgcgacctccgggggccggcggggcagcttggagatgtcgtcggatggggaacccctgagccgcatggactcggaggacagcataagcagtactataatggatgtagacagcacaatttccagtgggcgttcaactccagcaatgatgaatggacaaggaagcactacttcttcaagcaaaaatattgcctataattgttgttgggaccagtgccaggcttgcttcaactctagcccagatctggcagatcacatccgttccatacatgtagatggtcagcgaggaggggtatttgtttgcttatggaaaggttgtaaagtatataacactccatctaccagtcaaagttggttacaaaggcatatgctgacacacagtggagacaaacctttcaagtgtgttgttggtggctgcaatgccagctttgcttctcagggagggctagctcgtcatgtacccacacacttcagtcagcagaactcctcaaaagtttctagccagccaaaggccaaagaagaatctccttctaaagctggaatgaacaaaaggaggaaattaaagaacaaaagacgacgctcattaccacggccacatgatttcttcgatgcacaaacactggatgcgataagacatcgagccatatgctttaacctctcagctcatatagaaagtttagggaagggacacagtgttgtttttcatagtactgtaatagctaagagaaaagaagattctgggaagatcaaacttttgcttcattggatgcctgaagacattctgcctgatgtgtgggtgaatgaaagtgaacgacatcagttaaaaactaaagtagttcatttatcaaagctacccaaagatactgccttgcttttggacccaaacatatacagaacaatgccgcagaagaggttgaagaggtaaaaaataaataaatacataaaaagcaaacaagcggggacacctgcagtcttagtcactgacaatgggtttagggaaagttgcacattagagtcaaccccttcttttttttttttttttttttaaatccagtatttaggataatatttatgcttagtgtaaacattctgtgaatgaagtagactcttcggtggaatatattaatatattactgtatatccacattttcatggaatggtactgtgggagactgagcaaacactcttttggcaacttagtagaacagcttcttaaaggctttgcatgcttgctgctttaagctgcttttttttttcttttcttccctttagtgatttcagtagtttatattggaaagaaaaacaattacaacatgtgcccttacaaataccaaaagcactgtaaggatatttgtcttgacagtgtttattgatttgaagtcatattaggaaatatttagacaatgaaaattatcaagagataatttacctttcaattatgataaatagatgtgattggttgccatttgtgttcttttgcagaactctgataagaaaagtgttcaatttgtatttaagcaaacagtgaacgacgtttgcaatcaactaaaaattcgtctatcgaattagggctgaaaattactgttaaagagtgttgcagtatgtctggtggctcccttttcaggactagggctttctcatggagtacagtatgttaatatttacctatataactaatctgttaacggtttttgaaaaacctttcaaattatttgaataatcttcatattttcatttaacctatatgactctaattttttttctgaggaaatcatttggtttttgagttgttttttcttaatgtaagaaaaattgtattttttttacaagtatcttcaaactgaatcttttatgcaccaaagttggtcttgaaaaggaaaataaaatcactttcttgcttggtaagcaagaagccatatcgattttttttaacttacagaaatggaaatatgtgtaacttgttagtattgtattaaacaaatgttgcatagagataatagaacattgcttgtaaataattcagcagatttgtaatatatttttatattttgaaatgtactgtagatgttttctagaggcatgaaagttaaatgtatatattatggtagaaataatattgaaggatattgtacttcactagtgctgccagaggaattgttaataaaagcaccttctttaacaataaatgtctttcacagacttaagggactatgtactactgttaatatctctaagaacaaaacacattgaacatccttccagaaagtctttgagggaggacctatacccataatagaattatggcactcatttctgacagtgatcaagaaatcagttatttccttactgttggaaggacattgtaaagtatgtggttatatgcagtgaaactgcagaaaatactcctggttgaggagttttcactttactacagtgatataaaaaccagcagtttttacactaaattttttaaagaaatattagacaaaaatatagaattaaaacctttggttccaaaatgggaaaggttccacgatacataaatcatttctcatttgctttaaaaaatttaaaagtgtaaaaattatgagagactttattcgttaacaatgggggtaaagagctatatacatgaaaatgagtcttataaaattaagtgaagtgcaaataaaagcactgctactataagacattctggaatggttgtttaataagggtattatccatttgatctatagcaatgtgattttatttttaaaaagaaaagcagtgtgttttctttttttgttgttttcttttgcttaagcacttcatcaattgctttattctgtatctgcgaagtaatctgcaatctcttttgttctttttaaaatttgatttgttataaaattgccaaatagaagtgtttcagatacatagtttgtacctgtatttttattttattgcctcatgttcttgtaagtcattcttaattgaccaatgattgtagaccttgcttgagtattttttctaataaaacaaagcaaatcacatttagcttcaaattgtaacaattcaattgaattttaaaatgacacctgaaaagatacatctgatattttctatatagagcacagtaaataagttttttcattgtgtagaaatacttagatgtcaaaaccagatttcgtgatccttgattaacttctgagtactcaatcaatcataatccttttgctgcttatctgatgttggtttgatactgttaacacaccaaaaagaatatggaattgaaatgagctagctttataacttgtatgtatacatatatacacataacatccaattatgactgggtaataagtgtgaaaattttaatttgtggttttcatttattaatgtctgcccatctgtattgttgctcctaccttcaaatatgacacctgaaataataagtctgttgtccagaattt

SEQ ID NO: 6940 - protein, 437 aa, Homo sapiens; identical to SEQ ID NO: 6938

SEQ ID NO: 6941 - DNA, 4167 bp, Homo sapiens
aggcgccgccatggccgccgctatcaccgacatggccgacctggaggagctctcccgcctgagccctctgccccccggcagcccgggttcggcggcgcggggccgggctgagccccccgaggaggaggaggaagatgagagcagcagcagcggcgggggtgaggaggagagtagcgccgagagcctggtgggcagcagcggcgggagcagcagcgacgagacccgctcgttgagccccggcgccgccagcagcagcagcggggatggggacggcaaggagggcctggaggagcccaagggaccgcggggcagccagggcggcggcgggggcggcagcagtagcagcagcgtagtctccagcggcggcgacgagggctacgggactgggggaggcggaagcagcgcgacctccgggggccggcggggcagcttggagatgtcgtcggatggggaacccctgagccgcatggactcggaggacagcataagcagtactataatggatgtagacagcacaatttccagtgggcgttcaactccagcaatgatgaatggacaaggaagcactacttcttcaagcaaaaatattgcctataattgttgttgggaccagtgccaggcttgcttcaactctagcccagatctggcagatcacatccgttccatacatgtagatggtcagcgaggaggggtatttgtttgcttatggaaaggttgtaaagtatataacactccatctaccagtcaaagttggttacaaaggcatatgctgacacacagtggagacaaacctttcaagtgtgttgttggtggctgcaatgccagctttgcttctcagggagggctagctcgtcatgtacccacacacttcagtcagcagaactcctcaaaagtttctagccagccaaaggccaaagaagaatctccttctaaagctggaatgaacaaaaggaggaaattaaagaacaaaagacgacgctcattaccacggccacatgatttcttcgatgcacaaacactggatgcgataagacatcgagccatatgctttaacctctcagctcatatagaaagtttagggaagggacacagtgttgtttttcatagtactgtaatagctaagagaaaagaagattctgggaagatcaaacttttgcttcattggatgcctgaagacattctgcctgatgtgtgggtgaatgaaagtgaacgacatcagttaaaaactaaagtagttcatttatcaaagctacccaaagatactgccttgcttttggacccaaacatatacagaacaatgccgcagaagaggttgaagaggtaaaaaataaataaatacataaaaagcaaacaagcggggacacctgcagtcttagtcactgacaatgggtttagggaaagttgcacattagagtcaaccccttcttttttttttttttttttttaaatccagtatttaggataatatttatgcttagtgtaaacattctgtgaatgaagtagactcttcggtggaatatattaatatattactgtatatccacattttcatggaatggtactgtgggagactgagcaaacactcttttggcaacttagtagaacagcttcttaaaggctttgcatgcttgctgctttaagctgcttttttttttcttttcttccctttagtgatttcagtagtttatattggaaagaaaaacaattacaacatgtgcccttacaaataccaaaagcactgtaaggatatttgtcttgacagtgtttattgatttgaagtcatattaggaaatatttagacaatgaaaattatcaagagataatttacctttcaattatgataaatagatgtgattggttgccatttgtgttcttttgcagaactctgataagaaaagtgttcaatttgtatttaagcaaacagtgaacgacgtttgcaatcaactaaaaattcgtctatcgaattagggctgaaaattactgttaaagagtgttgcagtatgtctggtggctcccttttcaggactagggctttctcatggagtacagtatgttaatatttacctatataactaatctgttaacggtttttgaaaaacctttcaaattatttgaataatcttcatattttcatttaacctatatgactctaattttttttctgaggaaatcatttggtttttgagttgttttttcttaatgtaagaaaaattgtattttttttacaagtatcttcaaactgaatcttttatgcaccaaagttggtcttgaaaaggaaaataaaatcactttcttgcttggtaagcaagaagccatatcgattttttttaacttacagaaatggaaatatgtgtaacttgttagtattgtattaaacaaatgttgcatagagataatagaacattgcttgtaaataattcagcagatttgtaatatatttttatattttgaaatgtactgtagatgttttctagaggcatgaaagttaaatgtatatattatggtagaaataatattgaaggatattgtacttcactagtgctgccagaggaattgttaataaaagcaccttctttaacaataaatgtctttcacagacttaagggactatgtactactgttaatatctctaagaacaaaacacattgaacatccttccagaaagtctttgagggaggacctatacccataatagaattatggcactcatttctgacagtgatcaagaaatcagttatttccttactgttggaaggacattgtaaagtatgtggttatatgcagtgaaactgcagaaaatactcctggttgaggagttttcactttactacagtgatataaaaaccagcagtttttacactaaattttttaaagaaatattagacaaaaatatagaattaaaacctttggttccaaaatgggaaaggttccacgatacataaatcatttctcatttgctttaaaaaatttaaaagtgtaaaaattatgagagactttattcgttaacaatgggggtaaagagctatatacatgaaaatgagtcttataaaattaagtgaagtgcaaataaaagcactgctactataagacattctggaatggttgtttaataagggtattatccatttgatctatagcaatgtgattttatttttaaaaagaaaagcagtgtgttttctttttttgttgttttcttttgcttaagcacttcatcaattgctttattctgtatctgcgaagtaatctgcaatctcttttgttctttttaaaatttgatttgttataaaattgccaaatagaagtgtttcagatacatagtttgtacctgtatttttattttattgcctcatgttcttgtaagtcattcttaattgaccaatgattgtagaccttgcttgagtattttttctaataaaacaaagcaaatcacatttagcttcaaattgtaacaattcaattgaattttaaaatgacacctgaaaagatacatctgatattttctatatagagcacagtaaataagttttttcattgtgtagaaatacttagatgtcaaaaccagatttcgtgatccttgattaacttctgagtactcaatcaatcataatccttttgctgcttatctgatgttggtttgatactgttaacacaccaaaaagaatatggaattgaaatgagctagctttataacttgtatgtatacatatatacacataacatccaattatgactgggtaataagtgtgaaaattttaatttgtggttttcatttattaatgtctgcccatctgtattgttgctcctaccttcaaatatgacacctgaaataataagtctgttgtccagaatttatgtattgttcagcatcaagcaaactacagctcacaagcatacccatttatatgttgtctatgcctgctttctcctgcagtggcagaattgagtggtgagaccttaggtcctgcaagcccccaatttttactacaggttggcaatccctaatccaaaaatctgacataaaaaatgctccaaagttcaaaactttctgagtgctgacatcatgctgcaagtggaaaattccacgcctgacctcatgtgactggtcatagtcaaaacaattaagactttgtttcatgcacaaaattattaaaactgttgtataaaatt

SEQ ID NO: 6942 - protein, 437 aa, Homo sapiens; identical to SEQ ID NO: 6938

SEQ ID NO: 6943 - DNA, 4230 bp, Homo sapiens
aggcgccgccatggccgccgctatcaccgacatggccgacctggaggagctctcccgcctgagccctctgccccccggcagcccgggttcggcggcgcggggccgggctgagccccccgaggaggaggaggaagatgagagcagcagcagcggcgggggtgaggaggagagtagcgccgagagcctggtgggcagcagcggcgggagcagcagcgacgagacccgctcgttgagccccggcgccgccagcagcagcagcggggatggggacggcaaggagggcctggaggagcccaagggaccgcggggcagccagggcggcggcgggggcggcagcagtagcagcagcgtagtctccagcggcggcgacgagggctacgggactgggggaggcggaagcagcgcgacctccgggggccggcggggcagcttggagatgtcgtcggatggggaacccctgagccgcatggactcggaggacagcataagcagtactataatggatgtagacagcacaatttccagtgggcgttcaactccagcaatgatgaatggacaaggaagcactacttcttcaagcaaaaatattgcctataattgttgttgggaccagtgccaggcttgcttcaactctagcccagatctggcagatcacatccgttccatacatgtagatggtcagcgaggaggggtatttgtttgcttatggaaaggttgtaaagtatataacactccatctaccagtcaaagttggttacaaaggcatatgctgacacacagtggagacaaacctttcaagtgtgttgttggtggctgcaatgccagctttgcttctcagggagggctagctcgtcatgtacccacacacttcagtcagcagaactcctcaaaagtttctagccagccaaaggccaaagaagaatctccttctaaagctggaatgaacaaaaggaggaaattaaagaacaaaagacgacgctcattaccacggccacatgatttcttcgatgcacaaacactggatgcgataagacatcgagccatatgctttaacctctcagctcatatagaaagtttagggaagggacacagtgttgtttttcatagtactgtaatagctaagagaaaagaagattctgggaagatcaaacttttgcttcattggatgcctgaagacattctgcctgatgtgtgggtgaatgaaagtgaacgacatcagttaaaaactaaagtagttcatttatcaaagctacccaaagatactgccttgcttttggacccaaacatatacagaacaatgccgcagaagaggttgaagaggtaaaaaataaataaatacataaaaagcaaacaagcggggacacctgcagtcttagtcactgacaatgggtttagggaaagttgcacattagagtcaaccccttcttttttttttttttttttttaaatccagtatttaggataatatttatgcttagtgtaaacattctgtgaatgaagtagactcttcggtggaatatattaatatattactgtatatccacattttcatggaatggtactgtgggagactgagcaaacactcttttggcaacttagtagaacagcttcttaaaggctttgcatgcttgctgctttaagctgcttttttttttcttttcttccctttagtgatttcagtagtttatattggaaagaaaaacaattacaacatgtgcccttacaaataccaaaagcactgtaaggatatttgtcttgacagtgtttattgatttgaagtcatattaggaaatatttagacaatgaaaattatcaagagataatttacctttcaattatgataaatagatgtgattggttgccatttgtgttcttttgcagaactctgataagaaaagtgttcaatttgtatttaagcaaacagtgaacgacgtttgcaatcaactaaaaattcgtctatcgaattagggctgaaaattactgttaaagagtgttgcagtatgtctggtggctcccttttcaggactagggctttctcatggagtacagtatgttaatatttacctatataactaatctgttaacggtttttgaaaaacctttcaaattatttgaataatcttcatattttcatttaacctatatgactctaattttttttctgaggaaatcatttggtttttgagttgttttttcttaatgtaagaaaaattgtattttttttacaagtatcttcaaactgaatcttttatgcaccaaagttggtcttgaaaaggaaaataaaatcactttcttgcttggtaagcaagaagccatatcgattttttttaacttacagaaatggaaatatgtgtaacttgttagtattgtattaaacaaatgttgcatagagataatagaacattgcttgtaaataattcagcagatttgtaatatatttttatattttgaaatgtactgtagatgttttctagaggcatgaaagttaaatgtatatattatggtagaaataatattgaaggatattgtacttcactagtgctgccagaggaattgttaataaaagcaccttctttaacaataaatgtctttcacagacttaagggactatgtactactgttaatatctctaagaacaaaacacattgaacatccttccagaaagtctttgagggaggacctatacccataatagaattatggcactcatttctgacagtgatcaagaaatcagttatttccttactgttggaaggacattgtaaagtatgtggttatatgcagtgaaactgcagaaaatactcctggttgaggagttttcactttactacagtgatataaaaaccagcagtttttacactaaattttttaaagaaatattagacaaaaatatagaattaaaacctttggttccaaaatgggaaaggttccacgatacataaatcatttctcatttgctttaaaaaatttaaaagtgtaaaaattatgagagactttattcgttaacaatgggggtaaagagctatatacatgaaaatgagtcttataaaattaagtgaagtgcaaataaaagcactgctactataagacattctggaatggttgtttaataagggtattatccatttgatctatagcaatgtgattttatttttaaaaagaaaagcagtgtgttttctttttttgttgttttcttttgcttaagcacttcatcaattgctttattctgtatctgcgaagtaatctgcaatctcttttgttctttttaaaatttgatttgttataaaattgccaaatagaagtgtttcagatacatagtttgtacctgtatttttattttattgcctcatgttcttgtaagtcattcttaattgaccaatgattgtagaccttgcttgagtattttttctaataaaacaaagcaaatcacatttagcttcaaattgtaacaattcaattgaattttaaaatgacacctgaaaagatacatctgatattttctatatagagcacagtaaataagttttttcattgtgtagaaatacttagatgtcaaaaccagatttcgtgatccttgattaacttctgagtactcaatcaatcataatccttttgctgcttatctgatgttggtttgatactgttaacacaccaaaaagaatatggaattgaaatgagctagctttataacttgtatgtatacatatatacacataacatccaattatgactgggtaataagtgtgaaaattttaatttgtggttttcatttattaatgtctgcccatctgtattgttgctcctaccttcaaatatgacacctgaaataataagtctgttgtccagaatttatgtattgttcagcatcaagcaaactacagctcacaagcatacccatttatatgttgtctatgcctgctttctcctgcagtggcagaattgagtggtgagaccttaggtcctgcaagcccccaatttttactacaggttggcaatccctaatccaaaaatctgacataaaaaatgctccaaagttcaaaactttctgagtgctgacatcatgctgcaagtggaaaattccacgcctgacctcatgtgactggtcatagtcaaaacaattaagactttgtttcatgcacaaaattattaaaactgttgtataaaattaccttcagtctatgtgtataaggtgtttgtgagatataaatgaactttatgtttagtcttgga

SEQ ID NO: 6944 - protein, 437 aa, Homo sapiens; identical to SEQ ID NO: 6938

SEQ ID NO: 6945 - DNA, 3629 bp, Homo sapiens
catggccgccgctatcaccgacatggccgacctggaggagctctcccgcctgagccctctgccccccggcagcccgggttcggcggcgcggggccgggctgagccccccgaggaggaggaggaagaggaggaggaggaagaggaggcggaggccgaggcggtggcggcgctgctgctgaacggcggcagcggtgggggcggcggaggcggcggcggaggagtggggggcggcgaggcagagacgatgtcggagccgagccccgagagcgccagccaggccggggaggacgaagacgaggaggaggacgacgaggaggaggaagatgagagcagcagcagcggcgggggtgaggaggagagtagcgccgagagcctggtgggcagcagcggcgggagcagcagcgacgagacccgctcgttgagccccggcgccgccagcagcagcagcggggatggggacggcaaggagggcctggaggagcccaagggaccgcggggcagccagggcggcggcgggggcggcagcagtagcagcagcgtagtctccagcggcggcgacgagggctacgggactgggggaggcggaagcagcgcgacctccgggggccggcggggcagcttggagatgtcgtcggatggggaacccctgagccgcatggactcggaggacagcataagcagtactataatggatgtagacagcacaatttccagtgggcgttcaactccagcaatgatgaatggacaaggaagcactacttcttcaagcaaaaatattgcctataattgttgttgggaccagtgccaggcttgcttcaactctagcccagatctggcagatcacatccgttccatacatgtagatggtcagcgaggaggggtatttgtttgcttatggaaaggttgtaaagtatataacactccatctaccagtcaaagttggttacaaaggcatatgctgacacacagtggagacaaacctttcaagtgtgttgttggtggctgcaatgccagctttgcttctcagggagggctagctcgtcatgtacccacacacttcagtcagcagaactcctcaaaagtttctagccagccaaaggccaaagaagaatctccttctaaagctggaatgaacaaaaggaggaaattaaagaacaaaagacgacgctcattaccacggccacatgatttcttcgatgcacaaacactggatgcgataagacatcgagccatatgctttaacctctcagctcatatagaaagtttagggaagggacacagtgttgtttttcatagtactgtaatagctaagagaaaagaagattctgggaagatcaaacttttgcttcattggatgcctgaagacattctgcctgatgtgtgggtgaatgaaagtgaacgacatcagttaaaaactaaagtagttcatttatcaaagctacccaaagatactgccttgcttttggacccaaacatatacagaacaatgccgcagaagaggttgaagaggtaaaaaataaataaatacataaaaagcaaacaagcggggacacctgcagtcttagtcactgacaatgggtttagggaaagttgcacattagagtcaaccccttcttttttttttttttttttttaaatccagtatttaggataatatttatgcttagtgtaaacattctgtgaatgaagtagactcttcggtggaatatattaatatattactgtatatccacattttcatggaatggtactgtgggagactgagcaaacactcttttggcaacttagtagaacagcttcttaaaggctttgcatgcttgctgctttaagctgcttttttttttcttttcttccctttagtgatttcagtagtttatattggaaagaaaaacaattacaacatgtgcccttacaaataccaaaagcactgtaaggatatttgtcttgacagtgtttattgatttgaagtcatattaggaaatatttagacaatgaaaattatcaagagataatttacctttcaattatgataaatagatgtgattggttgccatttgtgttcttttgcagaactctgataagaaaagtgttcaatttgtatttaagcaaacagtgaacgacgtttgcaatcaactaaaaattcgtctatcgaattagggctgaaaattactgttaaagagtgttgcagtatgtctggtggctcccttttcaggactagggctttctcatggagtacagtatgttaatatttacctatataactaatctgttaacggtttttgaaaaacctttcaaattatttgaataatcttcatattttcatttaacctatatgactctaattttttttctgaggaaatcatttggtttttgagttgttttttcttaatgtaagaaaaattgtattttttttacaagtatcttcaaactgaatcttttatgcaccaaagttggtcttgaaaaggaaaataaaatcactttcttgcttggtaagcaagaagccatatcgattttttttaacttacagaaatggaaatatgtgtaacttgttagtattgtattaaacaaatgttgcatagagataatagaacattgcttgtaaataattcagcagatttgtaatatatttttatattttgaaatgtactgtagatgttttctagaggcatgaaagttaaatgtatatattatggtagaaataatattgaaggatattgtacttcactagtgctgccagaggaattgttaataaaagcaccttctttaacaataaatgtctttcacagacttaagggactatgtactactgttaatatctctaagaacaaaacacattgaacatccttccagaaagtctttgagggaggacctatacccataatagaattatggcactcatttctgacagtgatcaagaaatcagttatttccttactgttggaaggacattgtaaagtatgtggttatatgcagtgaaactgcagaaaatactcctggttgaggagttttcactttactacagtgatataaaaaccagcagtttttacactaaattttttaaagaaatattagacaaaaatatagaattaaaacctttggttccaaaatgggaaaggttccacgatacataaatcatttctcatttgctttaaaaaatttaaaagtgtaaaaattatgagagactttattcgttaacaatgggggtaaagagctatatacatgaaaatgagtcttataaaattaagtgaagtgcaaataaaagcactgctactataagacattctggaatggttgtttaataagggtattatccatttgatctatagcaatgtgattttatttttaaaaagaaaagcagtgtgttttctttttttgttgttttcttttgcttaagcacttcatcaattgctttattctgtatctgcgaagtaatctgcaatctcttttgttctttttaaaatttgatttgttataaaattgccaaatagaagtgtttcagatacatagtttgtacctgtatttttattttattgcctcatgttcttgtaagtcattcttaattgaccaatgattgtagaccttgcttgagtattttttctaataaaacaaagcaaatcacatttagcttc

SEQ ID NO: 6946 - protein, 503 aa, Homo sapiens
MAAAITDMADLEELSRLSPLPPGSPGSAARGRAEPPEEEEEEEEEEEEAEAEAVAALLLNGGSGGGGGGGGGGVGGGEAETMSEPSPESASQAGEDEDEEEDDEEEEDESSSSGGGEEESSAESLVGSSGGSSSDETRSLSPGAASSSSGDGDGKEGLEEPKGPRGSQGGGGGGSSSSSVVSSGGDEGYGTGGGGSSATSGGRRGSLEMSSDGEPLSRMDSEDSISSTIMDVDSTISSGRSTPAMMNGQGSTTSSSKNIAYNCCWDQCQACFNSSPDLADHIRSIHVDGQRGGVFVCLWKGCKVYNTPSTSQSWLQRHMLTHSGDKPFKCVVGGCNASFASQGGLARHVPTHFSQQNSSKVSSQPKAKEESPSKAGMNKRRKLKNKRRRSLPRPHDFFDAQTLDAIRHRAICFNLSAHIESLGKGHSVVFHSTVIAKRKEDSGKIKLLLHWMPEDILPDVWVNESERHQLKTKVVHLSKLPKDTALLLDPNIYRTMPQKRLKR

SEQ ID NO: 6947 - DNA, 6173 bp, Homo sapiens
gagaaaatcaattggtttagaaggtttggactcacttgacaggttcagttggagacgatcataggtggctgctgtgacaaagggaaattgtgcttttccagcatgcttactgaccctgatttacctcaggagtttgaaaggatgtcttccaagcgaccagcctctccgtatggggaagcagatggagaggtagccatggtgacaagcagacagaaagtggaagaagaggagagtgacgggctcccagcctttcaccttcccttgcatgtgagttttcccaacaagcctcactctgaggaatttcagccagtttctctgctgacgcaagagacttgtggccataggactcccacttctcagcacaatacaatggaagttgatggcaataaagttatgtcttcatttgccccacacaactcatctacctcacctcagaaggcagaagaaggtgggcgacagagtggcgagtccttgtctagtacagccctgggaactcctgaacggcgcaagggcagtttagctgatgttgttgacaccttgaagcagaggaaaatggaagagctcatcaaaaacgagccggaagaaacccccagtattgaaaaactactctcaaaggactggaaagacaagcttcttgcaatgggatcggggaactttggcgaaataaaagggactcccgagagcttagctgagaaagaaaggcaactcatgggtatgatcaaccagctgaccagcctccgagagcagctgttggctgcccacgatgagcagaagaaactagctgcctctcagattgagaaacagcgtcagcaaatggagctggccaagcagcaacaagaacaaattgcaagacagcagcagcagcttctacagcaacaacacaaaatcaatttgctccagcaacagatccaggttcaaggtcagctgccgccattaatgattcccgtattccctcctgatcaacggacactggctgcagctgcccagcaaggattcctcctccctccaggcttcagctataaggctggatgtagtgacccttaccctgttcagctgatcccaactaccatggcagctgctgccgcagcaacaccaggcttaggcccactccaactgcagcagttatatgctgcccagctagctgcaatgcaggtatctccaggagggaagctgccaggcataccccaaggcaaccttggtgctgctgtatctcctaccagcattcacacagacaagagcacaaacagcccaccacccaaaagcaaggatgaagtggcacagccactgaacctatcagctaaacccaagacctctgatggcaaatcacccacatcacccacctctccccatatgccagctctgagaataaacagtggggcaggccccctcaaagcctctgtcccagcagcgttagctagtccttcagccagagttagcacaataggttacttaaatgaccatgatgctgtcaccaaggcaatccaagaagctcggcaaatgaaggagcaactccgacgggaacaacaggtgcttgatgggaaggtggctgttgtgaatagtctgggtctcaataactgccgaacagaaaaggaaaaaacaacactggagagtctgactcagcaactggcagttaaacagaatgaagaaggaaaatttagccatgcaatgatggatttcaatctgagtggagattctgatggaagtgctggagtctcagagtcaagaatttatagggaatcccgagggcgtggtagcaatgaaccccacataaagcgtccaatgaatgccttcatggtgtgggctaaagatgaacggagaaagatccttcaagcctttcctgacatgcacaactccaacatcagcaagatattgggatctcgctggaaagctatgacaaacctagagaaacagccatattatgaggagcaagcccgtctcagcaagcagcacctggagaagtaccctgactataagtacaagcccaggccaaagcgcacctgcctggtggatggcaaaaagctgcgcattggtgaatacaaggcaatcatgcgcaacaggcggcaggaaatgcggcagtacttcaatgttgggcaacaagcacagatccccattgccactgctggtgttgtgtaccctggagccatcgccatggctgggatgccctcccctcacctgccctcggagcactcaagcgtgtctagcagcccagagcctgggatgcctgttatccagagcacttacggtgtgaaaggagaggagccacatatcaaagaagagatacaggccgaggacatcaatggagaaatttatgatgagtacgacgaggaagaggatgatccagatgtagattatgggagtgacagtgaaaaccatattgcaggacaagccaactgataagggtcaaaagattgttgtgaccttaggacttaaagaagccctaactggttcatccttaccagtggccaagcacattaactttctcatacactgactgttactttaactgttagtcttaaatagttgggacatcagctgactaatagacctcagcctcaaaaggcttggaaagaaaaaacaaatacaacaagcaaacaacaatatcaacaacaagagattgaaataagctatgggtaaaataatgccagtaattcagctgctacatccaagcactgaagtcttacccgtcaacttttttttttttttaaataaactttatggctgtttgttctacaatgttctagaaattctcactcaggtacacagtgccaacaagtggcttgtgaatgtgttttgttgttttgtgctacaatttttaaaaagaaaaaagttttgttttgttttttggggtttctgggttttttccttttctttttctttcctttcattttttttctttgtaatgcacctgacagaaaaaaaagaaaaatgaatttctctttacttctctccaccttctccatctctctactttaaagatggaagtctgtgcatgaggggaaagagggaaaaagagcctgtttttaacttccttgctatccaccacaaaataagcaattattttctttagaggactttatctattgcacaccacactacatctttgagcaagtgccaaatttgtactgaagtgttgaccaagttcattttttctctttactttttccttttccttcttaagttaggacagtgttaaatcttagacaatcccttgaaaaacctgaaataccagcagctggtgagatttgacttttttttttaatggaaactgtaggtgctgttctcaggtgaaaagagagagagagagagagacataagaaatttagagaaaaatattttctgatcttggatttttgtgtgtatgtatgtatgtgattatggtactaataataggaataacgttggaccattgtgagttaaacccacatctggggatgaaatcccacatcctcccaagtgactggtctagaaataatcttgaccttgactttgcacttcaaatgacaacttaaccaagtatagggctcagaaattatatttttaaatgtctgattattattggatggatcaggtggccctgtgtaatagaggtgtgcatgtataacatggaagctactagcaaactgctcccagatgtcctttctccctggtcagttggttccattaacgtttgctacttagtgatttttgtttttcctgttgatattttgagcaaaacaatcattgttttcattgaatatatttggccattttttcagacaaatagaattagcttatttcttcaacattccatcctttcccgatcaggaaatgaaactgatgattttataaggtatttttcacccctccatgaagtgaggtggaggcctttagcatttcagaagtgtgggccatatgtagttcatgccataaaaagtaggatttaattaaaagtcattgcagcccaataaaatggagcctggctgcacccagggatccttgccactgctcttcccttgctgtcagattaatccactgaagtccaactttggttcaagcagagtatttgcaaagagcaacaactgaatgtgatgggactgcttatgtagattttgccagccaaatgccaaggcagttgtagggcctgtacaaataaatgcaaaatcatttcaagtcaattgccattatttgtattgaagtatcagatagatagtaaatactgcaactagtagcttgatgtgctatagttttcactccagtcatcattttcctatctcaccccccgaaacaccaccctaaagttggatttttacatataaataaaaaaagaatcccttttatttttctctctctcagaagacttgctctggggttttgcttggaggagctgatcatatcctgcatgtcagagatttcattttgtttgtttttctgtttgtttgtttttgatgactttatttacatttgaactgcctctttttgctagtgttgtaatgatgatgatgataaaataataataataatagtaataataataataatggtcagctgttcccagattagtaagttatgtataatttattttatttctccctttctattttattctgctctgatttggaagtgcagccaataagctgttagatatttaaaacaaatttccatctccaactcatatatgtatgtatatgtatatatatatatacatatatatacacacatatacacacacacacacacatttacccacaattttacttctctttccgtaagttttctcttttttaagaattttggccccaacaatatcagttctgatgtttaaaacaaaggagtgaattaataggagggtcgtgttcaatcttaattaacttatgctctcatcactcattttagttatttaattgccacagtcatctagagccaatttttttttgtttttgtttgttttgtttttaagcactctggataaggaaaaaatagacacttgtttttatatcatttttatgtacaatgtgaaaacagatttttaaaaaatttgttctctgtctttgttaacaaattccttccgatttatgtgggttcacctctcacgtttgctggatacttactttacaccatgttatgaaagatgctttgttttcatttcatgagtttgggctacaagaatactttgttttagctccaggtagatgccattgaaggcattcatggctgaaatcaattctaacacacttaccgatgaattgacaacactttggtgtttggtcttttttttgttatattttgttttatttgaaggggaaaacaaaattgttaatggtgacttttaactgctgaaattcaaaatttgattttagttaggtttatgtccgagactaaactgtgcatgaaccgaaacaaaaagcaagttcataccgctgcattctgttctcttgttctgacggttaattcactggacatcaaattttctttgccctagttttccccaaaagaaaacaaaagcaaaaatagttatattaatgttgaaagtgctttgaagtcacttgataaaaggtgctatgaatagcaacttactgtgttactacattgcctttttggcattggttgatttataattttggtaaaggatcctaaaaccctgtattctttttctgtgccccataatgaccaaaaaagataaagaaaatgagagtaagatcaaaagatcaaactaaaacataaacagtctccttcctgtctgctttcttacctatctgttcacactttatctctttccctttctctctctctctcacatgcgcgcgcgcgcgcgcgcacacacacacacacacacacttgccccaacactgagaaataatcttgccagaattctggtttttatagttgttgtagtccgtttctctaaaaatagtcctgttttcatatgaatctaagagaacattaccggagaaaataaagttactcatttatagttactaataataagttagtgattaacttaccacaattggataaaatataaaactattcttcagcacatttatacctaaattagtgaagtccatttgtgaagttcatttggcatctgcagttaagagttaaccatgtataaaatccctcccaaagaacataatcatcgttagaaccaaatcctcttataaagaacaaatataaaaaagttttctgtggtgaag

SEQ ID NO: 6948 - protein, 763 aa, Homo sapiens [sequence omitted]

SEQ ID NO: 6949 - DNA, 4968 bp, Homo sapiens
gcttactccctgaccagatgctgcggtgcacggggcagccaccatctctgcatgcatgtctgtgtaagtgtctctctctctgtgtgtatgtgcctctgtcatttcgtgtcaaaggtacattacctgattacctttctcggctgccagatttttatctagataattggaactgctatggaggctgtgccttgccagccagcttagaatctgtaaagccatagtttgtccaccttgttatctgtggctgcctgggcagaggaaattaaagagatccacagccaggggggcgcttcctactcctgacctccccagcgatcccaaacaggacagtttgttagtaccgtctttttgtttttatgttttgatttcgttttgggtttttgttcgctcgtgtatgttattttggcatgtggatacctattcccctccacatcgcacatcgtgttttatggagtttagagctgaggaaactttggtcgggttgccaggacgttcgcaccactttgcggaaagcacgagctaacagtgagaccgacagagatgtcttccaagcgaccagcctctccgtatggggaagcagatggagaggtagccatggtgacaagcagacagaaagtggaagaagaggagagtgacgggctcccagcctttcaccttcccttgcatgaagttgatggcaataaagttatgtcttcatttgccccacacaactcatctacctcacctcagaaggcagaagaaggtgggcgacagagtggcgagtccttgtctagtacagccctgggaactcctgaacggcgcaagggcagtttagctgatgttgttgacaccttgaagcagaggaaaatggaagagctcatcaaaaacgagccggaagaaacccccagtattgaaaaactactctcaaaggactggaaagacaagcttcttgcaatgggatcggggaactttggcgaaataaaagggactcccgagagcttagctgagaaagaaaggcaactcatgggtatgatcaaccagctgaccagcctccgagagcagctgttggctgcccacgatgagcagaagaaactagctgcctctcagattgagaaacagcgtcagcaaatggagctggccaagcagcaacaagaacaaattgcaagacagcagcagcagcttctacagcaacaacacaaaatcaatttgctccagcaacagatccaggttcaaggtcagctgccgccattaatgattcccgtattccctcctgatcaacggacactggctgcagctgcccagcaaggattcctcctccctccaggcttcagctataaggctggatgtagtgacccttaccctgttcagctgatcccaactaccatggcagctgctgccgcagcaacaccaggcttaggcccactccaactgcagcagttatatgctgcccagctagctgcaatgcaggtatctccaggagggaagctgccaggcataccccaaggcaaccttggtgctgctgtatctcctaccagcattcacacagacaagagcacaaacagcccaccacccaaaagcaaggatgaagtggcacagccactgaacctatcagctaaacccaagacctctgatggcaaatcacccacatcacccacctctccccatatgccagctctgagaataaacagtggggcaggccccctcaaagcctctgtcccagcagcgttagctagtccttcagccagagttagcacaataggttacttaaatgaccatgatgctgtcaccaaggcaatccaagaagctcggcaaatgaaggagcaactccgacgggaacaacaggtgcttgatgggaaggtggctgttgtgaatagtctgggtctcaataactgccgaacagaaaaggaaaaaacaacactggagagtctgactcagcaactggcagttaaacagaatgaagaaggaaaatttagccatgcaatgatggatttcaatctgagtggagattctgatggaagtgctggagtctcagagtcaagaatttatagggaatcccgagggcgtggtagcaatgaaccccacataaagcgtccaatgaatgccttcatggtgtgggctaaagatgaacggagaaagatccttcaagcctttcctgaccttggatttttgtgtgtatgtatgtatgtgattatggtactaataataggaataacgttggaccattgtgagttaaacccacatctggggatgaaatcccacatcctcccaagtgactggtctagaaataatcttgaccttgactttgcacttcaaatgacaacttaaccaagtatagggctcagaaattatatttttaaatgtctgattattattggatggatcaggtggccctgtgtaatagaggtgtgcatgtataacatggaagctactagcaaactgctcccagatgtcctttctccctggtcagttggttccattaacgtttgctacttagtgatttttgtttttcctgttgatattttgagcaaaacaatcattgttttcattgaatatatttggccattttttcagacaaatagaattagcttatttcttcaacattccatcctttcccgatcaggaaatgaaactgatgattttataaggtatttttcacccctccatgaagtgaggtggaggcctttagcatttcagaagtgtgggccatatgtagttcatgccataaaaagtaggatttaattaaaagtcattgcagcccaataaaatggagcctggctgcacccagggatccttgccactgctcttcccttgctgtcagattaatccactgaagtccaactttggttcaagcagagtatttgcaaagagcaacaactgaatgtgatgggactgcttatgtagattttgccagccaaatgccaaggcagttgtagggcctgtacaaataaatgcaaaatcatttcaagtcaattgccattatttgtattgaagtatcagatagatagtaaatactgcaactagtagcttgatgtgctatagttttcactccagtcatcattttcctatctcaccccccgaaacaccaccctaaagttggatttttacatataaataaaaaaagaatcccttttatttttctctctctcagaagacttgctctggggttttgcttggaggagctgatcatatcctgcatgtcagagatttcattttgtttgtttttctgtttgtttgtttttgatgactttatttacatttgaactgcctctttttgctagtgttgtaatgatgatgatgataaaataataataataatagtaataataataataatggtcagctgttcccagattagtaagttatgtataatttattttatttctccctttctattttattctgctctgatttggaagtgcagccaataagctgttagatatttaaaacaaatttccatctccaactcatatatgtatgtatatgtatatatatatatacatatatatacacacatatacacacacacacacacatttacccacaattttacttctctttccgtaagttttctcttttttaagaattttggccccaacaatatcagttctgatgtttaaaacaaaggagtgaattaataggagggtcgtgttcaatcttaattaacttatgctctcatcactcattttagttatttaattgccacagtcatctagagccaatttttttttgtttttgtttgttttgtttttaagcactctggataaggaaaaaatagacacttgtttttatatcatttttatgtacaatgtgaaaacagatttttaaaaaatttgttctctgtctttgttaacaaattccttccgatttatgtgggttcacctctcacgtttgctggatacttactttacaccatgttatgaaagatgctttgttttcatttcatgagtttgggctacaagaatactttgttttagctccaggtagatgccattgaaggcattcatggctgaaatcaattctaacacacttaccgatgaattgacaacactttggtgtttggtcttttttttgttatattttgttttatttgaaggggaaaacaaaattgttaatggtgacttttaactgctgaaattcaaaatttgattttagttaggtttatgtccgagactaaactgtgcatgaaccgaaacaaaaagcaagttcataccgctgcattctgttctcttgttctgacggttaattcactggacatcaaattttctttgccctagttttccccaaaagaaaacaaaagcaaaaatagttatattaatgttgaaagtgctttgaagtcacttgataaaaggtgctatgaatagcaacttactgtgttactacattgcctttttggcattggttgatttataattttggtaaaggatcctaaaaccctgtattctttttctgtgccccataatgaccaaaaaagataaagaaaatgagagtaagatcaaaagatcaaactaaaacataaacagtctccttcctgtctgctttcttacctatctgttcacactttatctctttccctttctctctctctctcacatgcgcgcgcgcgcgcgcgcacacacacacacacacacacttgccccaacactgagaaataatcttgccagaattctggtttttatagttgttgtagtccgtttctctaaaaatagtcctgttttcatatgaatctaagagaacattaccggagaaaataaagttactcatttatagttactaataataagttagtgattaacttaccacaattggataaaatataaaactattcttcagcacatttatacctaaattagtgaagtccatttgtgaagttcatttggcatctgcagttaagagttaaccatgtataaaatccctcccaaagaacataatcatcgttagaaccaaatcctcttataaagaacaaatataaaaaagttttctgtggtgaag

SEQ ID NO: 6950 - protein, 587 aa, Homo sapiens
MSSKRPASPYGEADGEVAMVTSRQKVEEEESDGLPAFHLPLHEVDGNKVMSSFAPHNSSTSPQKAEEGGRQSGESLSSTALGTPERRKGSLADVVDTLKQRKMEELIKNEPEETPSIEKLLSKDWKDKLLAMGSGNFGEIKGTPESLAEKERQLMGMINQLTSLREQLLAAHDEQKKLAASQIEKQRQQMELAKQQQEQIARQQQQLLQQQHKINLLQQQIQVQGQLPPLMIPVFPPDQRTLAAAAQQGFLLPPGFSYKAGCSDPYPVQLIPTTMAAAAAATPGLGPLQLQQLYAAQLAAMQVSPGGKLPGIPQGNLGAAVSPTSIHTDKSTNSPPPKSKDEVAQPLNLSAKPKTSDGKSPTSPTSPHMPALRINSGAGPLKASVPAALASPSARVSTIGYLNDHDAVTKAIQEARQMKEQLRREQQVLDGKVAVVNSLGLNNCRTEKEKTTLESLTQQLAVKQNEEGKFSHAMMDFNLSGDSDGSAGVSESRIYRESRGRGSNEPHIKRPMNAFMVWAKDERRKILQAFPDLGFLCVCMYVIMVLIIGITLDHCELNPHLGMKSHILPSDWSRNNLDLDFALQMTT

SEQ ID NO: 6951 - DNA, 6403 bp, Homo sapiens
gtgaaaaaggcgagccaccaaaacccatctccagtctcctcccgggggcccccagcccgcctctgtgccactttgcatcccacgccggaggaggcattaacgagaccgggtaaggctttttaaacggtccaaggtgtagagccatacttcaggaggatcctcagaagttttggacaagcctccccaaatgtggcaggtgctgtgctggccattggtgacccaaagatgatgaaaaatatgttcctgcccacaaggagttagcgacctactgggctttcctcttgctgatgacatgattcctgtttgaatctgttgacaagattctgaaagctgaacagagaattctggcactgcactgggtaggaaaaaggatgtcttccaagcgaccagcctctccgtatggggaagcagatggagaggtagccatggtgacaagcagacagaaagtggaagaagaggagagtgacgggctcccagcctttcaccttcccttgcatgtgagttttcccaacaagcctcactctgaggaatttcagccagtttctctgctgacgcaagagacttgtggccataggactcccacttctcagcacaatacaatggaagttgatggcaataaagttatgtcttcatttgccccacacaactcatctacctcacctcagaaggcagaagaaggtgggcgacagagtggcgagtccttgtctagtacagccctgggaactcctgaacggcgcaagggcagtttagctgatgttgttgacaccttgaagcagaggaaaatggaagagctcatcaaaaacgagccggaagaaacccccagtattgaaaaactactctcaaaggactggaaagacaagcttcttgcaatgggatcggggaactttggcgaaataaaagggactcccgagagcttagctgagaaagaaaggcaactcatgggtatgatcaaccagctgaccagcctccgagagcagctgttggctgcccacgatgagcagaagaaactagctgcctctcagattgagaaacagcgtcagcaaatggagctggccaagcagcaacaagaacaaattgcaagacagcagcagcagcttctacagcaacaacacaaaatcaatttgctccagcaacagatccaggttcaaggtcagctgccgccattaatgattcccgtattccctcctgatcaacggacactggctgcagctgcccagcaaggattcctcctccctccaggcttcagctataaggctggatgtagtgacccttaccctgttcagctgatcccaactaccatggcagctgctgccgcagcaacaccaggcttaggcccactccaactgcagcagttatatgctgcccagctagctgcaatgcaggtatctccaggagggaagctgccaggcataccccaaggcaaccttggtgctgctgtatctcctaccagcattcacacagacaagagcacaaacagcccaccacccaaaagcaaggatgaagtggcacagccactgaacctatcagctaaacccaagacctctgatggcaaatcacccacatcacccacctctccccatatgccagctctgagaataaacagtggggcaggccccctcaaagcctctgtcccagcagcgttagctagtccttcagccagagttagcacaataggttacttaaatgaccatgatgctgtcaccaaggcaatccaagaagctcggcaaatgaaggagcaactccgacgggaacaacaggtgcttgatgggaaggtggctgttgtgaatagtctgggtctcaataactgccgaacagaaaaggaaaaaacaacactggagagtctgactcagcaactggcagttaaacagaatgaagaaggaaaatttagccatgcaatgatggatttcaatctgagtggagattctgatggaagtgctggagtctcagagtcaagaatttatagggaatcccgagggcgtggtagcaatgaaccccacataaagcgtccaatgaatgccttcatggtgtgggctaaagatgaacggagaaagatccttcaagcctttcctgacatgcacaactccaacatcagcaagatattgggatctcgctggaaagctatgacaaacctagagaaacagccatattatgaggagcaagcccgtctcagcaagcagcacctggagaagtaccctgactataagtacaagcccaggccaaagcgcacctgcctggtggatggcaaaaagctgcgcattggtgaatacaaggcaatcatgcgcaacaggcggcaggaaatgcggcagtacttcaatgttgggcaacaagcacagatccccattgccactgctggtgttgtgtaccctggagccatcgccatggctgggatgccctcccctcacctgccctcggagcactcaagcgtgtctagcagcccagagcctgggatgcctgttatccagagcacttacggtgtgaaaggagaggagccacatatcaaagaagagatacaggccgaggacatcaatggagaaatttatgatgagtacgacgaggaagaggatgatccagatgtagattatgggagtgacagtgaaaaccatattgcaggacaagccaactgataagggtcaaaagattgttgtgaccttaggacttaaagaagccctaactggttcatccttaccagtggccaagcacattaactttctcatacactgactgttactttaactgttagtcttaaatagttgggacatcagctgactaatagacctcagcctcaaaaggcttggaaagaaaaaacaaatacaacaagcaaacaacaatatcaacaacaagagattgaaataagctatgggtaaaataatgccagtaattcagctgctacatccaagcactgaagtcttacccgtcaacttttttttttttttaaataaactttatggctgtttgttctacaatgttctagaaattctcactcaggtacacagtgccaacaagtggcttgtgaatgtgttttgttgttttgtgctacaatttttaaaaagaaaaaagttttgttttgttttttggggtttctgggttttttccttttctttttctttcctttcattttttttctttgtaatgcacctgacagaaaaaaaagaaaaatgaatttctctttacttctctccaccttctccatctctctactttaaagatggaagtctgtgcatgaggggaaagagggaaaaagagcctgtttttaacttccttgctatccaccacaaaataagcaattattttctttagaggactttatctattgcacaccacactacatctttgagcaagtgccaaatttgtactgaagtgttgaccaagttcattttttctctttactttttccttttccttcttaagttaggacagtgttaaatcttagacaatcccttgaaaaacctgaaataccagcagctggtgagatttgacttttttttttaatggaaactgtaggtgctgttctcaggtgaaaagagagagagagagagagacataagaaatttagagaaaaatattttctgatcttggatttttgtgtgtatgtatgtatgtgattatggtactaataataggaataacgttggaccattgtgagttaaacccacatctggggatgaaatcccacatcctcccaagtgactggtctagaaataatcttgaccttgactttgcacttcaaatgacaacttaaccaagtatagggctcagaaattatatttttaaatgtctgattattattggatggatcaggtggccctgtgtaatagaggtgtgcatgtataacatggaagctactagcaaactgctcccagatgtcctttctccctggtcagttggttccattaacgtttgctacttagtgatttttgtttttcctgttgatattttgagcaaaacaatcattgttttcattgaatatatttggccattttttcagacaaatagaattagcttatttcttcaacattccatcctttcccgatcaggaaatgaaactgatgattttataaggtatttttcacccctccatgaagtgaggtggaggcctttagcatttcagaagtgtgggccatatgtagttcatgccataaaaagtaggatttaattaaaagtcattgcagcccaataaaatggagcctggctgcacccagggatccttgccactgctcttcccttgctgtcagattaatccactgaagtccaactttggttcaagcagagtatttgcaaagagcaacaactgaatgtgatgggactgcttatgtagattttgccagccaaatgccaaggcagttgtagggcctgtacaaataaatgcaaaatcatttcaagtcaattgccattatttgtattgaagtatcagatagatagtaaatactgcaactagtagcttgatgtgctatagttttcactccagtcatcattttcctatctcaccccccgaaacaccaccctaaagttggatttttacatataaataaaaaaagaatcccttttatttttctctctctcagaagacttgctctggggttttgcttggaggagctgatcatatcctgcatgtcagagatttcattttgtttgtttttctgtttgtttgtttttgatgactttatttacatttgaactgcctctttttgctagtgttgtaatgatgatgatgataaaataataataataatagtaataataataataatggtcagctgttcccagattagtaagttatgtataatttattttatttctccctttctattttattctgctctgatttggaagtgcagccaataagctgttagatatttaaaacaaatttccatctccaactcatatatgtatgtatatgtatatatatatatacatatatatacacacatatacacacacacacacacatttacccacaattttacttctctttccgtaagttttctcttttttaagaattttggccccaacaatatcagttctgatgtttaaaacaaaggagtgaattaataggagggtcgtgttcaatcttaattaacttatgctctcatcactcattttagttatttaattgccacagtcatctagagccaatttttttttgtttttgtttgttttgtttttaagcactctggataaggaaaaaatagacacttgtttttatatcatttttatgtacaatgtgaaaacagatttttaaaaaatttgttctctgtctttgttaacaaattccttccgatttatgtgggttcacctctcacgtttgctggatacttactttacaccatgttatgaaagatgctttgttttcatttcatgagtttgggctacaagaatactttgttttagctccaggtagatgccattgaaggcattcatggctgaaatcaattctaacacacttaccgatgaattgacaacactttggtgtttggtcttttttttgttatattttgttttatttgaaggggaaaacaaaattgttaatggtgacttttaactgctgaaattcaaaatttgattttagttaggtttatgtccgagactaaactgtgcatgaaccgaaacaaaaagcaagttcataccgctgcattctgttctcttgttctgacggttaattcactggacatcaaattttctttgccctagttttccccaaaagaaaacaaaagcaaaaatagttatattaatgttgaaagtgctttgaagtcacttgataaaaggtgctatgaatagcaacttactgtgttactacattgcctttttggcattggttgatttataattttggtaaaggatcctaaaaccctgtattctttttctgtgccccataatgaccaaaaaagataaagaaaatgagagtaagatcaaaagatcaaactaaaacataaacagtctccttcctgtctgctttcttacctatctgttcacactttatctctttccctttctctctctctctcacatgcgcgcgcgcgcgcgcgcacacacacacacacacacacttgccccaacactgagaaataatcttgccagaattctggtttttatagttgttgtagtccgtttctctaaaaatagtcctgttttcatatgaatctaagagaacattaccggagaaaataaagttactcatttatagttactaataataagttagtgattaacttaccacaattggataaaatataaaactattcttcagcacatttatacctaaattagtgaagtccatttgtgaagttcatttggcatctgcagttaagagttaaccatgtataaaatccctcccaaagaacataatcatcgttagaaccaaatcctcttataaagaacaaatataaaaaagttttctgtggtgaag

SEQ ID NO: 6952 - protein, 750 aa, Homo sapiens; identical to SEQ ID NO: 948

SEQ ID NO: 6953 - DNA, 4315 bp, Homo sapiens
gagaaaatcaattggtttagaaggtttggactcacttgacaggttcagttggagacgatcataggtggctgctgtgacaaagggaaattgtgcttttccagcatgcttactgaccctgatttacctcaggagtttgaaaggatgtcttccaagcgaccagcctctccgtatggggaagcagatggagaggtagccatggtgacaagcagacagaaagtggaagaagaggagagtgacgggctcccagcctttcaccttcccttgcatgtgagttttcccaacaagcctcactctgaggaatttcagccagtttctctgctgacgcaagagacttgtggccataggactcccacttctcagcacaatacaatggaagttgatggcaataaagttatgtcttcatttgccccacacaactcatctacctcacctcagaaggcagaagaaggtgggcgacagagtggcgagtccttgtctagtacagccctgggaactcctgaacggcgcaagggcagtttagctgatgttgttgacaccttgaagcagaggaaaatggaagagctcatcaaaaacgagccggaagaaacccccagtattgaaaaactactctcaaaggactggaaagacaagcttcttgcaatgggatcggggaactttggcgaaataaaagggactcccgagagcttagctgagaaagaaaggcaactcatgggtatgatcaaccagctgaccagcctccgagagcagctgttggctgcccacgatgagcagaagaaactagctgcctctcagattgagaaacagcgtcagcaaatggagctggccaagcagcaacaagaacaaattgcaagacagcagcagcagcttctacagcaacaacacaaaatcaatttgctccagcaacagatccaggttcaaggtcagctgccgccattaatgattcccgtattccctcctgatcaacggacactggctgcagctgcccagcaaggattcctcctccctccaggcttcagctataaggctggatgtagtgacccttaccctgttcagctgatcccaactaccatggcagctgctgccgcagcaacaccaggcttaggcccactccaactgcagcagttatatgctgcccagctagctgcaatgcaggtatctccaggagggaagctgccaggcataccccaaggcaaccttggtgctgctgtatctcctaccagcattcacacagacaagagcacaaacagcccaccacccaaaagcaaggatgaagtggcacagccactgaacctatcagctaaacccaagacctctgatggcaaatcacccacatcacccacctctccccatatgccagctctgagaataaacagtggggcaggccccctcaaagcctctgtcccagcagcgttagctagtccttcagccagagttagcacaataggttacttaaatgaccatgatgctgtcaccaaggcaatccaagaagctcggcaaatgaaggagcaactccgacgggaacaacaggtgcttgatgggaaggtggctgttgtgaatagtctgggtctcaataactgccgaacagaaaaggaaaaaacaacactggagagtctgactcagcaactggcagttaaacagaatgaagaaggaaaatttagccatgcaatgatggatttcaatctgagtggagattctgatggaagtgctggagtctcagagtcaagaatttatagggaatcccgagggcgtggtagcaatgaaccccacataaagcgtccaatgaatgccttcatggtgtgggctaaagatgaacggagaaagatccttcaagcctttcctgacatgcacaactccaacatcagcaagatattgggatctcgctggaaagctatgacaaacctagagaaacagccatattatgaggagcaagcccgtctcagcaagcagcacctggagaagtaccctgactataagtacaagcccaggccaaagcgcacctgcctggtggatggcaaaaagctgcgcattggtgaatacaaggcaatcatgcgcaacaggcggcaggaaatgcggcagtacttcaatgttgggcaacaagcacagatccccattgccactgctggtgttgtgtaccctggagccatcgccatggctgggatgccctcccctcacctgccctcggagcactcaagcgtgtctagcagcccagagcctgggatgcctgttatccagagcacttacggtgtgaaaggagaggagccacatatcaaagaagagatacaggccgaggacatcaatggagaaatttatgatgagtacgacgaggaagaggatgatccagatgtagattatgggagtgacagtgaaaaccatattgcaggacaagccaactgataagggtcaaaagattgttgtgaccttaggacttaaagaagccctaactggttcatccttaccagtggccaagcacattaactttctcatacactgactgttactttaactgttagtcttaaatagttgggacatcagctgactaatagacctcagcctcaaaaggcttggaaagaaaaaacaaatacaacaagcaaacaacaatatcaacaacaagagattgaaataagctatgggtaaaataatgccagtaattcagctgctacatccaagcactgaagtcttacccgtcaacttttttttttttttaaataaactttatggctgtttgttctacaatgttctagaaattctcactcaggtacacagtgccaacaagtggcttgtgaatgtgttttgttgttttgtgctacaatttttaaaaagaaaaaagttttgttttgttttttggggtttctgggttttttccttttctttttctttcctttcattttttttctttgtaatgcacctgacagaaaaaaaagaaaaatgaatttctctttacttctctccaccttctccatctctctactttaaagatggaagtctgtgcatgaggggaaagagggaaaaagagcctgtttttaacttccttgctatccaccacaaaataagcaattattttctttagaggactttatctattgcacaccacactacatctttgagcaagtgccaaatttgtactgaagtgttgaccaagttcattttttctctttactttttccttttccttcttaagttaggacagtgttaaatcttagacaatcccttgaaaaacctgaaataccagcagctggtgagatttgacttttttttttaatggaaactgtaggtgctgttctcaggtgaaaagagagagagagagagagacataagaaatttagagaaaaatattttctgatcttggatttttgtgtgtatgtatgtatgtgattatggtactaataataggaataacgttggaccattgtgagttaaacccacatctggggatgaaatcccacatcctcccaagtgactggtctagaaataatcttgaccttgactttgcacttcaaatgacaacttaaccaagtatagggctcagaaattatatttttaaatgtctgattattattggatggatcaggtggccctgtgtaatagaggtgtgcatgtataacatggaagctactagcaaactgctcccagatgtcctttctccctggtcagttggttccattaacgtttgctacttagtgatttttgtttttcctgttgatattttgagcaaaacaatcattgttttcattgaatatatttggccattttttcagacaaatagaattagcttatttcttcaacattccatcctttcccgatcaggaaatgaaactgatgattttataaggtatttttcacccctccatgaagtgaggtggaggcctttagcatttcagaagtgtgggccatatgtagttcatgccataaaaagtaggatttaattaaaagtcattgcagcccaataaaatggagcctggctgcacccagggatccttgccactgctcttcccttgctgtcagattaatccactgaagtccaactttggttcaagcagagtatttgcaaagagcaacaactgaatgtgatgggactgcttatgtagattttgccagccaaatgccaaggcagttgtagggcctgtacaaataaatgcaaaatcatttcaagtcaattgccattatttgtattgaagtatcagatagatagtaaatactgcaactagtagcttgatgtgctatagttttcactccagtcatcattttcctatctcaccccccgaaacaccaccctaaagttggatttttacatataaataaaaaaagaatccctttt

SEQ ID NO: 6954 - protein, 763 aa, Homo sapiens [sequence omitted]

SEQ ID NO: 6955 - DNA, 3110 bp, Homo sapiens
gcttactccctgaccagatgctgcggtgcacggggcagccaccatctctgcatgcatgtctgtgtaagtgtctctctctctgtgtgtatgtgcctctgtcatttcgtgtcaaaggtacattacctgattacctttctcggctgccagatttttatctagataattggaactgctatggaggctgtgccttgccagccagcttagaatctgtaaagccatagtttgtccaccttgttatctgtggctgcctgggcagaggaaattaaagagatccacagccaggggggcgcttcctactcctgacctccccagcgatcccaaacaggacagtttgttagtaccgtctttttgtttttatgttttgatttcgttttgggtttttgttcgctcgtgtatgttattttggcatgtggatacctattcccctccacatcgcacatcgtgttttatggagtttagagctgaggaaactttggtcgggttgccaggacgttcgcaccactttgcggaaagcacgagctaacagtgagaccgacagagatgtcttccaagcgaccagcctctccgtatggggaagcagatggagaggtagccatggtgacaagcagacagaaagtggaagaagaggagagtgacgggctcccagcctttcaccttcccttgcatgaagttgatggcaataaagttatgtcttcatttgccccacacaactcatctacctcacctcagaaggcagaagaaggtgggcgacagagtggcgagtccttgtctagtacagccctgggaactcctgaacggcgcaagggcagtttagctgatgttgttgacaccttgaagcagaggaaaatggaagagctcatcaaaaacgagccggaagaaacccccagtattgaaaaactactctcaaaggactggaaagacaagcttcttgcaatgggatcggggaactttggcgaaataaaagggactcccgagagcttagctgagaaagaaaggcaactcatgggtatgatcaaccagctgaccagcctccgagagcagctgttggctgcccacgatgagcagaagaaactagctgcctctcagattgagaaacagcgtcagcaaatggagctggccaagcagcaacaagaacaaattgcaagacagcagcagcagcttctacagcaacaacacaaaatcaatttgctccagcaacagatccaggttcaaggtcagctgccgccattaatgattcccgtattccctcctgatcaacggacactggctgcagctgcccagcaaggattcctcctccctccaggcttcagctataaggctggatgtagtgacccttaccctgttcagctgatcccaactaccatggcagctgctgccgcagcaacaccaggcttaggcccactccaactgcagcagttatatgctgcccagctagctgcaatgcaggtatctccaggagggaagctgccaggcataccccaaggcaaccttggtgctgctgtatctcctaccagcattcacacagacaagagcacaaacagcccaccacccaaaagcaaggatgaagtggcacagccactgaacctatcagctaaacccaagacctctgatggcaaatcacccacatcacccacctctccccatatgccagctctgagaataaacagtggggcaggccccctcaaagcctctgtcccagcagcgttagctagtccttcagccagagttagcacaataggttacttaaatgaccatgatgctgtcaccaaggcaatccaagaagctcggcaaatgaaggagcaactccgacgggaacaacaggtgcttgatgggaaggtggctgttgtgaatagtctgggtctcaataactgccgaacagaaaaggaaaaaacaacactggagagtctgactcagcaactggcagttaaacagaatgaagaaggaaaatttagccatgcaatgatggatttcaatctgagtggagattctgatggaagtgctggagtctcagagtcaagaatttatagggaatcccgagggcgtggtagcaatgaaccccacataaagcgtccaatgaatgccttcatggtgtgggctaaagatgaacggagaaagatccttcaagcctttcctgaccttggatttttgtgtgtatgtatgtatgtgattatggtactaataataggaataacgttggaccattgtgagttaaacccacatctggggatgaaatcccacatcctcccaagtgactggtctagaaataatcttgaccttgactttgcacttcaaatgacaacttaaccaagtatagggctcagaaattatatttttaaatgtctgattattattggatggatcaggtggccctgtgtaatagaggtgtgcatgtataacatggaagctactagcaaactgctcccagatgtcctttctccctggtcagttggttccattaacgtttgctacttagtgatttttgtttttcctgttgatattttgagcaaaacaatcattgttttcattgaatatatttggccattttttcagacaaatagaattagcttatttcttcaacattccatcctttcccgatcaggaaatgaaactgatgattttataaggtatttttcacccctccatgaagtgaggtggaggcctttagcatttcagaagtgtgggccatatgtagttcatgccataaaaagtaggatttaattaaaagtcattgcagcccaataaaatggagcctggctgcacccagggatccttgccactgctcttcccttgctgtcagattaatccactgaagtccaactttggttcaagcagagtatttgcaaagagcaacaactgaatgtgatgggactgcttatgtagattttgccagccaaatgccaaggcagttgtagggcctgtacaaataaatgcaaaatcatttcaagtcaattgccattatttgtattgaagtatcagatagatagtaaatactgcaactagtagcttgatgtgctatagttttcactccagtcatcattttcctatctcaccccccgaaacaccaccctaaagttggatttttacatataaataaaaaaagaatccctttt

SEQ ID NO: 6956 - protein, 587 aa, Homo sapiens; identical to SEQ ID NO: 6950

SEQ ID NO: 6957 - DNA, 4545 bp, Homo sapiens
gtgaaaaaggcgagccaccaaaacccatctccagtctcctcccgggggcccccagcccgcctctgtgccactttgcatcccacgccggaggaggcattaacgagaccgggtaaggctttttaaacggtccaaggtgtagagccatacttcaggaggatcctcagaagttttggacaagcctccccaaatgtggcaggtgctgtgctggccattggtgacccaaagatgatgaaaaatatgttcctgcccacaaggagttagcgacctactgggctttcctcttgctgatgacatgattcctgtttgaatctgttgacaagattctgaaagctgaacagagaattctggcactgcactgggtaggaaaaaggatgtcttccaagcgaccagcctctccgtatggggaagcagatggagaggtagccatggtgacaagcagacagaaagtggaagaagaggagagtgacgggctcccagcctttcaccttcccttgcatgtgagttttcccaacaagcctcactctgaggaatttcagccagtttctctgctgacgcaagagacttgtggccataggactcccacttctcagcacaatacaatggaagttgatggcaataaagttatgtcttcatttgccccacacaactcatctacctcacctcagaaggcagaagaaggtgggcgacagagtggcgagtccttgtctagtacagccctgggaactcctgaacggcgcaagggcagtttagctgatgttgttgacaccttgaagcagaggaaaatggaagagctcatcaaaaacgagccggaagaaacccccagtattgaaaaactactctcaaaggactggaaagacaagcttcttgcaatgggatcggggaactttggcgaaataaaagggactcccgagagcttagctgagaaagaaaggcaactcatgggtatgatcaaccagctgaccagcctccgagagcagctgttggctgcccacgatgagcagaagaaactagctgcctctcagattgagaaacagcgtcagcaaatggagctggccaagcagcaacaagaacaaattgcaagacagcagcagcagcttctacagcaacaacacaaaatcaatttgctccagcaacagatccaggttcaaggtcagctgccgccattaatgattcccgtattccctcctgatcaacggacactggctgcagctgcccagcaaggattcctcctccctccaggcttcagctataaggctggatgtagtgacccttaccctgttcagctgatcccaactaccatggcagctgctgccgcagcaacaccaggcttaggcccactccaactgcagcagttatatgctgcccagctagctgcaatgcaggtatctccaggagggaagctgccaggcataccccaaggcaaccttggtgctgctgtatctcctaccagcattcacacagacaagagcacaaacagcccaccacccaaaagcaaggatgaagtggcacagccactgaacctatcagctaaacccaagacctctgatggcaaatcacccacatcacccacctctccccatatgccagctctgagaataaacagtggggcaggccccctcaaagcctctgtcccagcagcgttagctagtccttcagccagagttagcacaataggttacttaaatgaccatgatgctgtcaccaaggcaatccaagaagctcggcaaatgaaggagcaactccgacgggaacaacaggtgcttgatgggaaggtggctgttgtgaatagtctgggtctcaataactgccgaacagaaaaggaaaaaacaacactggagagtctgactcagcaactggcagttaaacagaatgaagaaggaaaatttagccatgcaatgatggatttcaatctgagtggagattctgatggaagtgctggagtctcagagtcaagaatttatagggaatcccgagggcgtggtagcaatgaaccccacataaagcgtccaatgaatgccttcatggtgtgggctaaagatgaacggagaaagatccttcaagcctttcctgacatgcacaactccaacatcagcaagatattgggatctcgctggaaagctatgacaaacctagagaaacagccatattatgaggagcaagcccgtctcagcaagcagcacctggagaagtaccctgactataagtacaagcccaggccaaagcgcacctgcctggtggatggcaaaaagctgcgcattggtgaatacaaggcaatcatgcgcaacaggcggcaggaaatgcggcagtacttcaatgttgggcaacaagcacagatccccattgccactgctggtgttgtgtaccctggagccatcgccatggctgggatgccctcccctcacctgccctcggagcactcaagcgtgtctagcagcccagagcctgggatgcctgttatccagagcacttacggtgtgaaaggagaggagccacatatcaaagaagagatacaggccgaggacatcaatggagaaatttatgatgagtacgacgaggaagaggatgatccagatgtagattatgggagtgacagtgaaaaccatattgcaggacaagccaactgataagggtcaaaagattgttgtgaccttaggacttaaagaagccctaactggttcatccttaccagtggccaagcacattaactttctcatacactgactgttactttaactgttagtcttaaatagttgggacatcagctgactaatagacctcagcctcaaaaggcttggaaagaaaaaacaaatacaacaagcaaacaacaatatcaacaacaagagattgaaataagctatgggtaaaataatgccagtaattcagctgctacatccaagcactgaagtcttacccgtcaacttttttttttttttaaataaactttatggctgtttgttctacaatgttctagaaattctcactcaggtacacagtgccaacaagtggcttgtgaatgtgttttgttgttttgtgctacaatttttaaaaagaaaaaagttttgttttgttttttggggtttctgggttttttccttttctttttctttcctttcattttttttctttgtaatgcacctgacagaaaaaaaagaaaaatgaatttctctttacttctctccaccttctccatctctctactttaaagatggaagtctgtgcatgaggggaaagagggaaaaagagcctgtttttaacttccttgctatccaccacaaaataagcaattattttctttagaggactttatctattgcacaccacactacatctttgagcaagtgccaaatttgtactgaagtgttgaccaagttcattttttctctttactttttccttttccttcttaagttaggacagtgttaaatcttagacaatcccttgaaaaacctgaaataccagcagctggtgagatttgacttttttttttaatggaaactgtaggtgctgttctcaggtgaaaagagagagagagagagagacataagaaatttagagaaaaatattttctgatcttggatttttgtgtgtatgtatgtatgtgattatggtactaataataggaataacgttggaccattgtgagttaaacccacatctggggatgaaatcccacatcctcccaagtgactggtctagaaataatcttgaccttgactttgcacttcaaatgacaacttaaccaagtatagggctcagaaattatatttttaaatgtctgattattattggatggatcaggtggccctgtgtaatagaggtgtgcatgtataacatggaagctactagcaaactgctcccagatgtcctttctccctggtcagttggttccattaacgtttgctacttagtgatttttgtttttcctgttgatattttgagcaaaacaatcattgttttcattgaatatatttggccattttttcagacaaatagaattagcttatttcttcaacattccatcctttcccgatcaggaaatgaaactgatgattttataaggtatttttcacccctccatgaagtgaggtggaggcctttagcatttcagaagtgtgggccatatgtagttcatgccataaaaagtaggatttaattaaaagtcattgcagcccaataaaatggagcctggctgcacccagggatccttgccactgctcttcccttgctgtcagattaatccactgaagtccaactttggttcaagcagagtatttgcaaagagcaacaactgaatgtgatgggactgcttatgtagattttgccagccaaatgccaaggcagttgtagggcctgtacaaataaatgcaaaatcatttcaagtcaattgccattatttgtattgaagtatcagatagatagtaaatactgcaactagtagcttgatgtgctatagttttcactccagtcatcattttcctatctcaccccccgaaacaccaccctaaagttggatttttacatataaataaaaaaagaatccctttt

SEQ ID NO: 6958 - protein, 750 aa, Homo sapiens; identical to SEQ ID NO: 948

SEQ ID NO: 6959 - DNA, 2816 bp, Homo sapiens
gtttggactcacttgacaggttcagttggagacgatcataggtggctgctgtgacaaagggaaattgtgcttttccagcatgcttactgaccctgatttacctcaggagtttgaaaggatgtcttccaagcgaccagcctctccgtatggggaagcagatggagaggtagccatggtgacaagcagacagaaagtggaagaagaggagagtgacgggctcccagcctttcaccttcccttgcatgtgagttttcccaacaagcctcactctgaggaatttcagccagtttctctgctgacgcaagagacttgtggccataggactcccacttctcagcacaatacaatggaagttgatggcaataaagttatgtcttcatttgccccacacaactcatctacctcacctcagaaggcagaagaaggtgggcgacagagtggcgagtccttgtctagtacagccctgggaactcctgaacggcgcaagggcagtttagctgatgttgttgacaccttgaagcagaggaaaatggaagagctcatcaaaaacgagccggaagaaacccccagtattgaaaaactactctcaaaggactggaaagacaagcttcttgcaatgggatcggggaactttggcgaaataaaagggactcccgagagcttagctgagaaagaaaggcaactcatgggtatgatcaaccagctgaccagcctccgagagcagctgttggctgcccacgatgagcagaagaaactagctgcctctcagattgagaaacagcgtcagcaaatggagctggccaagcagcaacaagaacaaattgcaagacagcagcagcagcttctacagcaacaacacaaaatcaatttgctccagcaacagatccaggttcaaggtcagctgccgccattaatgattcccgtattccctcctgatcaacggacactggctgcagctgcccagcaaggattcctcctccctccaggcttcagctataaggctggatgtagtgacccttaccctgttcagctgatcccaactaccatggcagctgctgccgcagcaacaccaggcttaggcccactccaactgcagcagttatatgctgcccagctagctgcaatgcaggtatctccaggagggaagctgccaggcataccccaaggcaaccttggtgctgctgtatctcctaccagcattcacacagacaagagcacaaacagcccaccacccaaaagcaaggatgaagtggcacagccactgaacctatcagctaaacccaagacctctgatggcaaatcacccacatcacccacctctccccatatgccagctctgagaataaacagtggggcaggccccctcaaagcctctgtcccagcagcgttagctagtccttcagccagagttagcacaataggttacttaaatgaccatgatgctgtcaccaaggcaatccaagaagctcggcaaatgaaggagcaactccgacgggaacaacaggtgcttgatgggaaggtggctgttgtgaatagtctgggtctcaataactgccgaacagaaaaggaaaaaacaacactggagagtctgactcagcaactggcagttaaacagaatgaagaaggaaaatttagccatgcaatgatggatttcaatctgagtggagattctgatggaagtgctggagtctcagagtcaagaatttatagggaatcccgagggcgtggtagcaatgaaccccacataaagcgtccaatgaatgccttcatggtgtgggctaaagatgaacggagaaagatccttcaagcctttcctgacatgcacaactccaacatcagcaagatattgggatctcgctggaaagctatgacaaacctagagaaacagccatattatgaggagcaagcccgtctcagcaagcagcacctggagaagtaccctgactataagtacaagcccaggccaaagcgcacctgcctggtggatggcaaaaagctgcgcattggtgaatacaaggcaatcatgcgcaacaggcggcaggaaatgcggcagtacttcaatgttgggcaacaagcacagatccccattgccactgctggtgttgtgtaccctggagccatcgccatggctgggatgccctcccctcacctgccctcggagcactcaagcgtgtctagcagcccagagcctgggatgcctgttatccagagcacttacggtgtgaaaggagaggagccacatatcaaagaagagatacaggccgaggacatcaatggagaaatttatgatgagtacgacgaggaagaggatgatccagatgtagattatgggagtgacagtgaaaaccatattgcaggacaagccaactgataagggtcaaaagattgttgtgaccttaggacttaaagaagccctaactggttcatccttaccagtggccaagcacattaactttctcatacactgactgttactttaactgttagtcttaaatagttgggacatcagctgactaatagacctcagcctcaaaaggcttggaaagaaaaaacaaatacaacaagcaaacaacaatatcaacaacaagagattgaaataagctatgggtaaaataatgccagtaattcagctgctacatccaagcactgaagtcttacccgtcaacttttttttttttttaaataaactttatggctgtttgttctacaatgttctagaaattctcactcaggtacacagtgccaacaagtggcttgtgaatgtgttttgttgttttgtgctacaatttttaaaaagaaaaaagttttgttttgtt

SEQ ID NO: 6960 - protein, 763 aa, Homo sapiens [sequence omitted]

SEQ ID NO: 6961 - DNA, 2798 bp, Homo sapiens
agagtgaaaaaggcgagccaccaaaacccatctccagtctcctcccgggggcccccagcccgcctctgtgccactttgcatcccacgccggaggaggcattaacgagaccgggtaaggctttttaaacggtccaaggtgtagagccatacttcaggaggatcctcagaagttttggacaagcctccccaaatgtggcaggtgctgtgctggccattggtgacccaaagatgatgaaaaatatgttcctgcccacaaggagttagcgacctactgggctttcctcttgctgatgacatgattcctgtttgaatctgttgacaagattctgaaagctgaacagagaattctggcactgcactgggtaggaaaaagcatttcaagaaatagataatatcaaggacatcaggacaccgggagtgggagagattggactgggagactcagcaggatgtcttccaagcgaccagcctctccgtatggggaagcagatggagaggtagccatggtgacaagcagacagaaagtggaagaagaggagagtgacgggctcccagcctttcaccttcccttgcatgtgagttttcccaacaagcctcactctgaggaatttcagccagtttctctgctgacgcaagagacttgtggccataggactcccacttctcagcacaatacaatggaagttgatggcaataaagttatgtcttcatttgccccacacaactcatctacctcacctcagaaggcagaagaaggtgggcgacagagtggcgagtccttgtctagtacagccctgggaactcctgaacggcgcaagggcagtttagctgatgttgttgacaccttgaagcagaggaaaatggaagagctcatcaaaaacgagccggaagaaacccccagtattgaaaaactactctcaaaggactggaaagacaagcttcttgcaatgggatcggggaactttggcgaaataaaagggactcccgagagcttagctgagaaagaaaggcaactcatgggtatgatcaaccagctgaccagcctccgagagcagctgttggctgcccacgatgagcagaagaaactagctgcctctcagattgagaaacagcgtcagcaaatggagctggccaagcagcaacaagaacaaattgcaagacagcagcagcagcttctacagcaacaacacaaaatcaatttgctccagcaacagatccaggttcaaggtcagctgccgccattaatgattcccgtattccctcctgatcaacggacactggctgcagctgcccagcaaggattcctcctccctccaggcttcagctataaggctggatgtagtgacccttaccctgttcagctgatcccaactaccatggcagctgctgccgcagcaacaccaggcttaggcccactccaactgcagcagttatatgctgcccagctagctgcaatgcaggtatctccaggagggaagctgccaggcataccccaaggcaaccttggtgctgctgtatctcctaccagcattcacacagacaagagcacaaacagcccaccacccaaaagcaaggaaaaaacaacactggagagtctgactcagcaactggcagttaaacagaatgaagaaggaaaatttagccatgcaatgatggatttcaatctgagtggagattctgatggaagtgctggagtctcagagtcaagaatttatagggaatcccgagggcgtggtagcaatgaaccccacataaagcgtccaatgaatgccttcatggtgtgggctaaagatgaacggagaaagatccttcaagcctttcctgacatgcacaactccaacatcagcaagatattgggatctcgctggaaagctatgacaaacctagagaaacagccatattatgaggagcaagcccgtctcagcaagcagcacctggagaagtaccctgactataagtacaagcccaggccaaagcgcacctgcctggtggatggcaaaaagctgcgcattggtgaatacaaggcaatcatgcgcaacaggcggcaggaaatgcggcagtacttcaatgttgggcaacaagcacagatccccattgccactgctggtgttgtgtaccctggagccatcgccatggctgggatgccctcccctcacctgccctcggagcactcaagcgtgtctagcagcccagagcctgggatgcctgttatccagagcacttacggtgtgaaaggagaggagccacatatcaaagaagagatacaggccgaggacatcaatggagaaatttatgatgagtacgacgaggaagaggatgatccagatgtagattatgggagtgacagtgaaaaccatattgcaggacaagccaactgataagggtcaaaagattgttgtgaccttaggacttaaagaagccctaactggttcatccttaccagtggccaagcacattaactttctcatacactgactgttactttaactgttagtcttaaatagttgggacatcagctgactaatagacctcagcctcaaaaggcttggaaagaaaaaacaaatacaacaagcaaacaacaatatcaacaacaagagattgaaataagctatgggtaaaataatgccagtaattcagctgctacatccaagcactgaagtcttacccgtcaacttttttttttttttaaataaactttatggctgtttgttctacaatgttctagaaattctcactcaggtacacagtgccaacaagtggcttgtgaatgtgttttgttgttttgtgctacaattttt

SEQ ID NO: 6962 - protein, 642 aa, Homo sapiens
MSSKRPASPYGEADGEVAMVTSRQKVEEEESDGLPAFHLPLHVSFPNKPHSEEFQPVSLLTQETCGHRTPTSQHNTMEVDGNKVMSSFAPHNSSTSPQKAEEGGRQSGESLSSTALGTPERRKGSLADVVDTLKQRKMEELIKNEPEETPSIEKLLSKDWKDKLLAMGSGNFGEIKGTPESLAEKERQLMGMINQLTSLREQLLAAHDEQKKLAASQIEKQRQQMELAKQQQEQIARQQQQLLQQQHKINLLQQQIQVQGQLPPLMIPVFPPDQRTLAAAAQQGFLLPPGFSYKAGCSDPYPVQLIPTTMAAAAAATPGLGPLQLQQLYAAQLAAMQVSPGGKLPGIPQGNLGAAVSPTSIHTDKSTNSPPPKSKEKTTLESLTQQLAVKQNEEGKFSHAMMDFNLSGDSDGSAGVSESRIYRESRGRGSNEPHIKRPMNAFMVWAKDERRKILQAFPDMHNSNISKILGSRWKAMTNLEKQPYYEEQARLSKQHLEKYPDYKYKPRPKRTCLVDGKKLRIGEYKAIMRNRRQEMRQYFNVGQQAQIPIATAGVVYPGAIAMAGMPSPHLPSEHSSVSSSPEPGMPVIQSTYGVKGEEPHIKEEIQAEDINGEIYDEYDEEEDDPDVDYGSDSENHIAGQAN

SEQ ID NO: 6963 - DNA, 2706 bp, Homo sapiens
ttggactcacttgacaggttcagttggagacgatcataggtggctgctgtgacaaagggaaattgtgcttttccagcatgcttactgaccctgatttacctcaggagtttgaaaggatgtcttccaagcgaccagcctctccgtatggggaagcagatggagaggtagccatggtgacaagcagacagaaagtggaagaagaggagagtgacgggctcccagcctttcaccttcccttgcatgtgagttttcccaacaagcctcactctgaggaatttcagccagtttctctgctgacgcaagagacttgtggccataggactcccacttctcagcacaatacaatggaagttgatggcaataaagttatgtcttcatttgccccacacaactcatctacctcacctcagaaggcagaagaaggtgggcgacagagtggcgagtccttgtctagtacagccctgggaactcctgaacggcgcaagggcagtttagctgatgttgttgacaccttgaagcagaggaaaatggaagagctcatcaaaaacgagccggaagaaacccccagtattgaaaaactactctcaaaggactggaaagacaagcttcttgcaatgggatcggggaactttggcgaaataaaagggactcccgagagcttagctgagaaagaaaggcaactcatgggtatgatcaaccagctgaccagcctccgagagcagctgttggctgcccacgatgagcagaagaaactagctgcctctcagattgagaaacagcgtcagcaaatggagctggccaagcagcaacaagaacaaattgcaagacagcagcagcagcttctacagcaacaacacaaaatcaatttgctccagcaacagatccaggttcaaggtcagctgccgccattaatgattcccgtattccctcctgatcaacggacactggctgcagctgcccagcaaggattcctcctccctccaggcttcagctataaggctggatgtagtgacccttaccctgttcagctgatcccaactaccatggcagctgctgccgcagcaacaccaggcttaggcccactccaactgcagcagttatatgctgcccagctagctgcaatgcaggtatctccaggagggaagctgccaggcataccccaaggcaaccttggtgctgctgtatctcctaccagcattcacacagacaagagcacaaacagcccaccacccaaaagcaaggatgaagtggcacagccactgaacctatcagctaaacccaagacctctgatggcaaatcacccacatcacccacctctccccatatgccagctctgagaataaacagtggggcaggccccctcaaagcctctgtcccagcagcgttagctagtccttcagccagagttagcacaataggttacttaaatgaccatgatgctgtcaccaaggcaatccaagaagctcggcaaatgaaggagcaactccgacgggaacaacaggtgcttgatgggaaggtggctgttgtgaatagtctgggtctcaataactgccgaacagaaaaggaaaaaacaacactggagagtctgactcagcaactggcagttaaacagaatgaagaaggaaaatttagccatgcaatgatggatttcaatctgagtggagattctgatggaagtgctggagtctcagagtcaagaatttatagggaatcccgagggcgtggtagcaatgaaccccacataaagcgtccaatgaatgccttcatggtgtgggctaaagatgaacggagaaagatccttcaagcctttcctgacatgcacaactccaacatcagcaagatattgggatctcgctggaaagctatgacaaacctagagaaacagccatattatgaggagcaagcccgtctcagcaagcagcacctggagaagtaccctgactataagtacaagcccaggccaaagcgcacctgcctggtggatggcaaaaagctgcgcattggtgaatacaaggcaatcatgcgcaacaggcggcaggaaatgcggcagtacttcaatgttgggcaacaagcacagatccccattgccactgctggtgttgtgtaccctggagccatcgccatggctgggatgccctcccctcacctgccctcggagcactcaagcgtgtctagcagcccagagcctgggatgcctgttatccagagcacttacggtgtgaaaggagaggagccacatatcaaagaagagatacaggccgaggacatcaatggagaaatttatgatgagtacgacgaggaagaggatgatccagatgtagattatgggagtgacagtgaaaaccatattgcaggacaagccaactgataagggtcaaaagattgttgtgaccttaggacttaaagaagccctaactggttcatccttaccagtggccaagcacattaactttctcatacactgactgttactttaactgttagtcttaaatagttgggacatcagctgactaatagacctcagcctcaaaaggcttggaaagaaaaaacaaatacaacaagcaaacaacaatatcaacaacaagagattgaaataagctatgggtaaaataatgccagtaattcagctgctacatccaagcactgaagtcttacccgtcaacttttttttttttttaaataaactttatggctgtttgttctac

SEQ ID NO: 6964 - protein, 763 aa, Homo sapiens [sequence omitted]

SEQ ID NO: 6965 - DNA, 636 bp, Homo sapiens
gagcgtgcgtgagtgagtgtgtgtgtgtgtgtgtgtgtgtgtgcatgcgtgtgtgaagaatgcacactatctcctgttggttcagttggagacgatcataggtggctgctgtgacaaagggaaattgtgcttttccagcatgcttactgaccctgatttacctcaggagtttgaaaggatgtcttccaagcgaccagcctctccgtatggggaagcagatggagaggtagccatggtgacaagcagacagaaagtggaagaagaggagagtgacgggctcccagcctttcaccttcccttgcatgaagttgatggcaataaagttatgtcttcatttgccccacacaactcatctacctcacctcagaaggcagaagaaggtgggcgacagagtggcgagtccttgtctagtacagccctgggaactcctgaacggcgcaagggcagtttagctgatgttgttgacaccttgaagcagaggaaaatggaagagctcatcaaaaacgagccggaaggctctcattaactttcaagtggaaacaaacaagtattttggcaatactaaacgtaaagtatttccagtgtttaattcacttcaggacaatcacatataaaaataaagcttatctaaatctt

SEQ ID NO: 6966 - protein, 128 aa, Homo sapiens
MLTDPDLPQEFERMSSKRPASPYGEADGEVAMVTSRQKVEEEESDGLPAFHLPLHEVDGNKVMSSFAPHNSSTSPQKAEEGGRQSGESLSSTALGTPERRKGSLADVVDTLKQRKMEELIKNEPEGSH

SEQ ID NO: 6967 - DNA, 3750 bp, Homo sapiens
actccatgccgggtctctagttccagcgcgcctcggctcgctcgcgcggcgggagagttggcgcaaacctcgcggcagccgcagcctcctcgcgcgcctctccttcccctacgccctccgctcccgccatggggccaacgtggggctcctaagagttgccggctctcagcggcgcaatctccagccaaagtcaccgcgggcggactatggcttagggcgccagaggggttagaggtacgggaagaggaaaagacggctaactgggaaaaaaagagaaaacgaaagaaaagccaaacgatgagtttccacaaggaggacggagtgaacagtctgtgccagaaggctctgcacatcgtcaccgagctgtgcttcgccggccaggtggagtgggagaagtgctcgggcatcttccctcgggacaggggcagccagggcggaagcagcacagatatttcagtcagcctgttagctgtcgttgtcagcttttgtggactggccttgttggttgtctcactttttgtcttctggaagctgtgttggccatgctggaaaagcaaacctgtgacttccaacatcactacgcttccacagagcatttcaagtgctcctactgaagtttttgagactgaagagaaaaaagaaattaaggaaaatgaaaagccagccgtaaaagctattgagcctgcaataaaaatcagccacacttcccctgacatcccagcagaagtccaaactgctttaaaagaacatttaattaaacatgcacgtgtgcaaagacaaattactgagcctacgtcatcaacccgccacagttccttccgaagacacctgccgaggcaaatgcaggtttccagtgttgattttagcatgggcacagaacctgttttacaacgaggagaaacaacaaccagcattgggaggataaagccagaactctacaaacagaaatcagttgactctgagggcaaccaaaacgaagatgtcaaaatctgtgggaaacttaactttaccctccagtatgattatgaaaatgaacttctagttgttaaaattatcaaagctttagatctccctgctaaagacttcacaggaacttctgacccttatgtgaagatgtatcttcttccagataggaaaaagaaatttcagacccgcgtgcacagaaagactttaaatcctctatttgatgaaacttttcaatttcctgtagcatatgatcaactaagcaaccgaaaactacatttcagtgtgtatgattttgacagattttctagacatgacatgattggggaagtgattcttgataatttgtttgaagtctctgatctctccagggaagccacagtatggaaagatattcactgtgctaccacagaaagtatagacctgggtgaaatcatgttttccctttgttacctaccgacggctgggcgtatgacattgacagtcattaagtgcagaaatctgaaggcgatggatattactggctcatcagatccttatgtcaaagtgtccctgatgtgtgaaggtcgaagattaaaaaagaggaaaacaactacaaagaaaaacactctaaaccctgtgtacaatgaggccattatttttgacatccctccagagaacgtggaccaggtcagcctctccattgcggtcatggattacgatagggtaggacacaatgaggtcataggagtgtgcagaacaggactggatgctgagggtcttgggcgagaccactggaatgaaatgctggcctatcatcgaaaaccaataacgcactggcacccattgctggagttacctggccgggcgaccagttttgatagtcaaggatcctgcccttctcctaaaccaccttccacaccataatgcctccaaaatgagaccatgatattaagcatctaggatcacgtgctcattgaatcagaaaaaaagtggaaggtttggtttcctcatttgaaatatatccgtactaatgaacaaacttgatgtgcacttttttatttgcttttattgttgattttttaactttgaacatcaatacattttacttgaatacatatagtccttagttgcataaggcattttatccttcgtatcaaatgcctgttagcacaaagagtgttttactatgttgtaattctttgcatatgaaatgtttttttaaacagttcatacttacctaaaattaaatatagtttatgctgctattgtataaagtagcacatgtcatatatgtatgggtttgattttgttatactgtgttcatttctagttgtgcaggtggttctgtataaacttaaaaggagattttgaacttaacttacacaacattaaatccttgcacaatcaaattaatgttacttatctgataatacttttctttcattctcagaaaattactttcttggtgaggtttggctctgctaaactcaaaacttgtctctcaagcttgttctttaaaatacatagacaaagctgtaaatttaaagaatcattttgaatataaatttaagaagtaatacttattggctgaaaaacggaggctgagccattgtggctaccattttacactgttttactgtaacattagctcaaatatctgttgcactgttcaactgatatttttaaaattctaataatcttcatctcaaatgtagcattagtatttctaagtgaacagaatcagaagttaatttttaagtgtttgtaaggttctcaagtactgtgacatgtatttttttgtgacgtgtattttttgtgacttgaagctatcatatagatcctgtatttctgatagaccatactaacagacaccaaaggaacaacaacactgtctgtgttcatcaccgtttagattgtacacagtaatggtgactcttaaacccagtcagaagctcatcattggaattcagtattttcttaaagaaaggatgatttattttcagcaacatatagaaatatactataaatattaataatacaacttcaatgcttaataataataaacaaattaattctaaaggcccaggcctccagtccttgcatgaaaggcatttgccttcataaggatcaaggttcaggccactacatgtaaaaactatgcaagtgtttttacaagacagaactttcttttaagtcaggtcaacatattttgtcccattttcaggccctgttggaaggtatctatactgaattaccccaaccttacttttaagatgtgtggtatagatagtatatatttcaagcttatttcaaaattggtggtttttttaaaaaaagaggcaagaaaataaaaacatatttacctggatgagaaaattttatcagcggttatgaaatttttatttttgtaaaatcccattatttctaaatattaaaaaaaagttttaaaagccttgaaattttgttgacatctcttatagtgatggcattactgttaattaagaggtaaatattttgcacattaccattttaaaggcaaacacagttctgcctcagatttttcaaaaatgcttataccaccctaaggaaaacaggtactcctagctaacattttctcattgaaaataatagaagaaagctgtttggaaacatttggctaccttgtcgagcctaaaagaattatttgctataggtaaaatgaaagatgacacttgcattttgaaattatttgttttattgggaaataaaacttttcaaataggaagacaaaaagttatactattaatagaatgacatttttggaga

SEQ ID NO: 6968 - protein, 523 aa, Homo sapiens; identical to SEQ ID NO: 952

SEQ ID NO: 6969 - DNA, 4133 bp, Homo sapiens
aagttattgtgagtgcctcgaggaccaaggaaccgttgaaatttccaatttcaggaagttccagtggatgcccatcaggaagattctcatgctgaacagaagggcaagagaggtggatctgtgagggaaaagacccaataggataactcaagttactgagataacaggaagagagcctggttaccatttggtggaacaatcctgctggctcaagcctctgcctagaaatttgggtcattctcttttttggacagtctggaaacctcgacctgtctcccagttggttgcacagcaggttactcagcagtttgtgcctcctacacagtcaaagaaagagaaaaaagataaagtagaaaaagaaaaaagtgaaaaggaaacaactagcaaaaagaatagccataagaaaaccaggccaagattgaaaaatgtggatcggagtagtgctcagcatttggaagttactgttggagatctgacagtcattattacagactttaaggagaaaacaaagtcaccgcctgcatctagtgctgcttctgcagatcaacacagtcaaagcggctctagctctgataacacagagagaggaatgtccaggtcatcttcacccagaggagaagcctcatcattgaatggagaatctcattaaagtttattttctccaatttcttagtcacttctgtcctaccatgcaaatacacagattatgccaagaggtaccacattttcatgacagatacattcatgcacaatccataatttgagttttacataaaatagaaatttgttagaatttgttagattttattgcaatgatgcctaccaaacatttccagacttaacattttggtctctgcagttaagtgccatgaaaatgtggttgaattattcattatgcagtgttattggtaagtgtattttcacttttagtttagtgaattctaacacataattcttgaattctctactattggcatgtaacgaatttaaattttttataacatagtgcaagctgcctaaatatgtattatttgagaattgtgaaacagatagttatatgtatacaagtcaaagaacaacttaactattgctgcaacaggtttttcttaatggttatcctcttaaatacacctgctggtacttggtgtggttaaataggaaaattgttattaaataaagaatttgtatgaacctttgccaatgtttttgacacgttttactaattattgttcctgaattatgtttctggttttatctattttttgaggtttttttgtttgcttatttttcaaaacattcatttattgtaatgtttactagcggactagtaaacaataaaacattgattatttagctttataattcaggtttagtgctattgtcattgaacactggtattttctgtatcatataaaacattaaaattcaaataattataagcatttggcaaaaacaagagaaaagaaacttgccatattttacaagctgcaattttagaaaagctttaacttaatgatagttttatcattgttttcttgtcccaaacttatccagggccatagaagtatgaatctaattaaaacagaaatgggaattattgcacagaaatgggaaataactaattttaaatcagtcaaattggcttcttattaaatacaataattcttatgaaaatcatagtaccctattttcagacacagctgccagtttacacatttctcagtatcctgaaaggaaaaaagtatagccccacttatactatgtaaaattaccaataaaatatttttatgactacagattttgcatttttgtttacaactatttaaagagttttatgttgtatttagaatttcaacctagaaaccacacagtacttaaattctcctggggtctcctgctttctcttaaccatttgcttaatatatatctacctaaaggagacttctgaattgtaaatgaacttaaaaatagaatgtggatgcaaaatatcacataagacatcatgataacatttgaagaaaaaataaaactgtagaccctaacagttgtgatatttggtggtttcatgtggtaatgtaattttctgtttaattacagtactttttacaggcacagtggtactgtcttttttgtaagatgctagttgtgaaatacaattaattgcatacagtaaaagtctgtgattaaaacatttatatacctcattctttagtgttgttaaatgaaaaattaaaatttgtgtttattataagatactttcaatggaataccagctaaccagatatgttcctttaaaacatgaatttttttgtcttattctgtttttaacatgtttcaaatgttttatacatttttggagatagtaaaaatttaaaaatgtaatagggaaaatatttaatttttaagtcaaaaactatgctttaaaggaattacatcttatgatcaaataactttcaggatgtattttaaatgagctgcaagagagaaaaatctgacaggagatgggattttacctgaatggagcatactcatatttctacataggtgggaagatactcatctttctacatagacgggaacacggtgtagcatggagattaagcgtgctaactgacacctcatgtttgaatcctgttgtagaatggaaatgagcttaaattacccaagcttactttccatctataaaacagggctaataatggtaatcacatctaatttatagggtttttgggaggattaagtcaatccgtgtaaaattcttaattatctgacacatactggtcactcagtaaatgtgagcttttaccattgttataggtaaaatcccattacaaaaatacaaaaatattttttgtaacagttattttcctgccctcttggatgacctaaagtaatagtgttttatagatttcactaaattttcagtgtaatatcagatgttttctctggatgcagaaagaccatctttccataattaaagaacctggtgggtgtgcactatgagattggagaaatgaattaagttgacttgaaattattttacttttattaatcacaggtatctcaacctgcctttgtttcaccctacttcaagtacacttccacaccaggaaaacagacccaaattccataaacagaactgacgttaaaatatgcgaaagattcagaacctaggtttagggtacatgtttttctctgtttcatgaacttacagtgtggtttgagcactgggttcttttagccaaattccatacaaaaagaatttggatgttttccagcatttattaccttactttgctataagtaagagtgaagataggccgggtgtgatggctcatgccagtaatcccagcactttgggctgaagcaggcagatattttgagcccaggaccagcctgggcaacatggtgaaagctcatctctatgaaaaaatttgaatatacatatatatatatatgtatatttaaaaagtgaatataatttgaggcacagaagaatattcttaaaaccttttgtattatacaatagaaataaaggttttatttttattaaatgctttcctaaaatgatagtggataatagacaaagtgaaaacatttaaaaaggaagagaaacttcagcctttctaagttgatagcatgtttattaacttttagataaagatccttatagactgaaagaatgtagcctctgcattaatggtaaatggtctagaagttttcgtttccactgaggcttccgccactcgcttttttaaacttcctgctatggtttggatatggtttgtcctcaccaaaactcatgctgaggcctgagtccccagtttgattgtgttggtaggtggtgcctttaagaggtgattaggtcattgagatggattaaaggctttctcatgaggctcagttagttctggaatggattcgctcttgcaggaatggatgaattctcacaagagtgggttgttatgaagtgaggatgcttcttgtgttctgttctctttgccctcctcagttcaccatctgctttccaccatgagttgaagcagcatgaggccctcatcagatgggctccctgatcttggactcctcagcctttggactcataagccaaaataaatctgttttctttataa

SEQ ID NO: 6970 - protein, 49 aa, Homo sapiens
MGFYLNGAYSYFYIGGKILIFLHRREHGVAWRLSVLTDTSCLNPVVEWK

SEQ ID NO: 6971 - DNA, 3933 bp, Homo sapiens
aagttattgtgagtgcctcgaggaccaaggaaccgttgaaatttccaatttcaggaaggaaacctcgacctgtctcccagttggttgcacagcaggttactcagcagtttgtgcctcctacacagtcaaagaaagagaaaaaagataaagtagaaaaagaaaaaagtgaaaaggaaacaactagcaaaaagaatagccataagaaaaccaggccaagattgaaaaatgtggatcggagtagtgctcagcatttggaagttactgttggagatctgacagtcattattacagactttaaggagaaaacaaagtcaccgcctgcatctagtgctgcttctgcagatcaacacagtcaaagcggctctagctctgataacacagagagaggaatgtccaggtcatcttcacccagaggagaagcctcatcattgaatggagaatctcattaaagtttattttctccaatttcttagtcacttctgtcctaccatgcaaatacacagattatgccaagaggtaccacattttcatgacagatacattcatgcacaatccataatttgagttttacataaaatagaaatttgttagaatttgttagattttattgcaatgatgcctaccaaacatttccagacttaacattttggtctctgcagttaagtgccatgaaaatgtggttgaattattcattatgcagtgttattggtaagtgtattttcacttttagtttagtgaattctaacacataattcttgaattctctactattggcatgtaacgaatttaaattttttataacatagtgcaagctgcctaaatatgtattatttgagaattgtgaaacagatagttatatgtatacaagtcaaagaacaacttaactattgctgcaacaggtttttcttaatggttatcctcttaaatacacctgctggtacttggtgtggttaaataggaaaattgttattaaataaagaatttgtatgaacctttgccaatgtttttgacacgttttactaattattgttcctgaattatgtttctggttttatctattttttgaggtttttttgtttgcttatttttcaaaacattcatttattgtaatgtttactagcggactagtaaacaataaaacattgattatttagctttataattcaggtttagtgctattgtcattgaacactggtattttctgtatcatataaaacattaaaattcaaataattataagcatttggcaaaaacaagagaaaagaaacttgccatattttacaagctgcaattttagaaaagctttaacttaatgatagttttatcattgttttcttgtcccaaacttatccagggccatagaagtatgaatctaattaaaacagaaatgggaattattgcacagaaatgggaaataactaattttaaatcagtcaaattggcttcttattaaatacaataattcttatgaaaatcatagtaccctattttcagacacagctgccagtttacacatttctcagtatcctgaaaggaaaaaagtatagccccacttatactatgtaaaattaccaataaaatatttttatgactacagattttgcatttttgtttacaactatttaaagagttttatgttgtatttagaatttcaacctagaaaccacacagtacttaaattctcctggggtctcctgctttctcttaaccatttgcttaatatatatctacctaaaggagacttctgaattgtaaatgaacttaaaaatagaatgtggatgcaaaatatcacataagacatcatgataacatttgaagaaaaaataaaactgtagaccctaacagttgtgatatttggtggtttcatgtggtaatgtaattttctgtttaattacagtactttttacaggcacagtggtactgtcttttttgtaagatgctagttgtgaaatacaattaattgcatacagtaaaagtctgtgattaaaacatttatatacctcattctttagtgttgttaaatgaaaaattaaaatttgtgtttattataagatactttcaatggaataccagctaaccagatatgttcctttaaaacatgaatttttttgtcttattctgtttttaacatgtttcaaatgttttatacatttttggagatagtaaaaatttaaaaatgtaatagggaaaatatttaatttttaagtcaaaaactatgctttaaaggaattacatcttatgatcaaataactttcaggatgtattttaaatgagctgcaagagagaaaaatctgacaggagatgggattttacctgaatggagcatactcatatttctacataggtgggaagatactcatctttctacatagacgggaacacggtgtagcatggagattaagcgtgctaactgacacctcatgtttgaatcctgttgtagaatggaaatgagcttaaattacccaagcttactttccatctataaaacagggctaataatggtaatcacatctaatttatagggtttttgggaggattaagtcaatccgtgtaaaattcttaattatctgacacatactggtcactcagtaaatgtgagcttttaccattgttataggtaaaatcccattacaaaaatacaaaaatattttttgtaacagttattttcctgccctcttggatgacctaaagtaatagtgttttatagatttcactaaattttcagtgtaatatcagatgttttctctggatgcagaaagaccatctttccataattaaagaacctggtgggtgtgcactatgagattggagaaatgaattaagttgacttgaaattattttacttttattaatcacaggtatctcaacctgcctttgtttcaccctacttcaagtacacttccacaccaggaaaacagacccaaattccataaacagaactgacgttaaaatatgcgaaagattcagaacctaggtttagggtacatgtttttctctgtttcatgaacttacagtgtggtttgagcactgggttcttttagccaaattccatacaaaaagaatttggatgttttccagcatttattaccttactttgctataagtaagagtgaagataggccgggtgtgatggctcatgccagtaatcccagcactttgggctgaagcaggcagatattttgagcccaggaccagcctgggcaacatggtgaaagctcatctctatgaaaaaatttgaatatacatatatatatatatgtatatttaaaaagtgaatataatttgaggcacagaagaatattcttaaaaccttttgtattatacaatagaaataaaggttttatttttattaaatgctttcctaaaatgatagtggataatagacaaagtgaaaacatttaaaaaggaagagaaacttcagcctttctaagttgatagcatgtttattaacttttagataaagatccttatagactgaaagaatgtagcctctgcattaatggtaaatggtctagaagttttcgtttccactgaggcttccgccactcgcttttttaaacttcctgctatggtttggatatggtttgtcctcaccaaaactcatgctgaggcctgagtccccagtttgattgtgttggtaggtggtgcctttaagaggtgattaggtcattgagatggattaaaggctttctcatgaggctcagttagttctggaatggattcgctcttgcaggaatggatgaattctcacaagagtgggttgttatgaagtgaggatgcttcttgtgttctgttctctttgccctcctcagttcaccatctgctttccaccatgagttgaagcagcatgaggccctcatcagatgggctccctgatcttggactcctcagcctttggactcataagccaaaataaatctgttttctttataa

SEQ ID NO: 6972 - protein, 49 aa, Homo sapiens; identical to SEQ ID NO: 6970

SEQ ID NO: 6973 - DNA, 4310 bp, Homo sapiens
ggtcgcggcggcgactctcggcgtgcggtgatagccaagccatgggagacaagaagagccccaccaggccgaagcggcagccgaagccgtcctcggatgagggttactgggactgtagcgtctgcaccttccggaacagcgccgaggccttcaagtgcatgatgtgcgatgtgcggaagggcacctccacccgatccacattgtttgaagttattgtgagtgcctcgaggaccaaggaaccgttgaaatttccaatttcaggaagagataacaggaagagagcctggttaccatttggtggaacaatcctgctggctcaagcctctgcctagaaatttgggtcattctcttttttggacagtctgcttctaaattactttaattgaagagcttcccaagattcaaggtgaatttaaagttaaaagattgtcatttgaaacctcgacctgtctcccagttggttgcacagcaggttactcagcagtttgtgcctcctacacagtcaaagaaagagaaaaaagataaagtagaaaaagaaaaaagtgaaaaggaaacaactagcaaaaagaatagccataagaaaaccaggccaagattgaaaaatgtggatcggagtagtgctcagcatttggaagttactgttggagatctgacagtcattattacagactttaaggagaaaacaaagtcaccgcctgcatctagtgctgcttctgcagatcaacacagtcaaagcggctctagctctgataacacagagagaggaatgtccaggtcatcttcacccagaggagaagcctcatcattgaatggagaatctcattaaagtttattttctccaatttcttagtcacttctgtcctaccatgcaaatacacagattatgccaagaggtaccacattttcatgacagatacattcatgcacaatccataatttgagttttacataaaatagaaatttgttagaatttgttagattttattgcaatgatgcctaccaaacatttccagacttaacattttggtctctgcagttaagtgccatgaaaatgtggttgaattattcattatgcagtgttattggtaagtgtattttcacttttagtttagtgaattctaacacataattcttgaattctctactattggcatgtaacgaatttaaattttttataacatagtgcaagctgcctaaatatgtattatttgagaattgtgaaacagatagttatatgtatacaagtcaaagaacaacttaactattgctgcaacaggtttttcttaatggttatcctcttaaatacacctgctggtacttggtgtggttaaataggaaaattgttattaaataaagaatttgtatgaacctttgccaatgtttttgacacgttttactaattattgttcctgaattatgtttctggttttatctattttttgaggtttttttgtttgcttatttttcaaaacattcatttattgtaatgtttactagcggactagtaaacaataaaacattgattatttagctttataattcaggtttagtgctattgtcattgaacactggtattttctgtatcatataaaacattaaaattcaaataattataagcatttggcaaaaacaagagaaaagaaacttgccatattttacaagctgcaattttagaaaagctttaacttaatgatagttttatcattgttttcttgtcccaaacttatccagggccatagaagtatgaatctaattaaaacagaaatgggaattattgcacagaaatgggaaataactaattttaaatcagtcaaattggcttcttattaaatacaataattcttatgaaaatcatagtaccctattttcagacacagctgccagtttacacatttctcagtatcctgaaaggaaaaaagtatagccccacttatactatgtaaaattaccaataaaatatttttatgactacagattttgcatttttgtttacaactatttaaagagttttatgttgtatttagaatttcaacctagaaaccacacagtacttaaattctcctggggtctcctgctttctcttaaccatttgcttaatatatatctacctaaaggagacttctgaattgtaaatgaacttaaaaatagaatgtggatgcaaaatatcacataagacatcatgataacatttgaagaaaaaataaaactgtagaccctaacagttgtgatatttggtggtttcatgtggtaatgtaattttctgtttaattacagtactttttacaggcacagtggtactgtcttttttgtaagatgctagttgtgaaatacaattaattgcatacagtaaaagtctgtgattaaaacatttatatacctcattctttagtgttgttaaatgaaaaattaaaatttgtgtttattataagatactttcaatggaataccagctaaccagatatgttcctttaaaacatgaatttttttgtcttattctgtttttaacatgtttcaaatgttttatacatttttggagatagtaaaaatttaaaaatgtaatagggaaaatatttaatttttaagtcaaaaactatgctttaaaggaattacatcttatgatcaaataactttcaggatgtattttaaatgagctgcaagagagaaaaatctgacaggagatgggattttacctgaatggagcatactcatatttctacataggtgggaagatactcatctttctacatagacgggaacacggtgtagcatggagattaagcgtgctaactgacacctcatgtttgaatcctgttgtagaatggaaatgagcttaaattacccaagcttactttccatctataaaacagggctaataatggtaatcacatctaatttatagggtttttgggaggattaagtcaatccgtgtaaaattcttaattatctgacacatactggtcactcagtaaatgtgagcttttaccattgttataggtaaaatcccattacaaaaatacaaaaatattttttgtaacagttattttcctgccctcttggatgacctaaagtaatagtgttttatagatttcactaaattttcagtgtaatatcagatgttttctctggatgcagaaagaccatctttccataattaaagaacctggtgggtgtgcactatgagattggagaaatgaattaagttgacttgaaattattttacttttattaatcacaggtatctcaacctgcctttgtttcaccctacttcaagtacacttccacaccaggaaaacagacccaaattccataaacagaactgacgttaaaatatgcgaaagattcagaacctaggtttagggtacatgtttttctctgtttcatgaacttacagtgtggtttgagcactgggttcttttagccaaattccatacaaaaagaatttggatgttttccagcatttattaccttactttgctataagtaagagtgaagataggccgggtgtgatggctcatgccagtaatcccagcactttgggctgaagcaggcagatattttgagcccaggaccagcctgggcaacatggtgaaagctcatctctatgaaaaaatttgaatatacatatatatatatatgtatatttaaaaagtgaatataatttgaggcacagaagaatattcttaaaaccttttgtattatacaatagaaataaaggttttatttttattaaatgctttcctaaaatgatagtggataatagacaaagtgaaaacatttaaaaaggaagagaaacttcagcctttctaagttgatagcatgtttattaacttttagataaagatccttatagactgaaagaatgtagcctctgcattaatggtaaatggtctagaagttttcgtttccactgaggcttccgccactcgcttttttaaacttcctgctatggtttggatatggtttgtcctcaccaaaactcatgctgaggcctgagtccccagtttgattgtgttggtaggtggtgcctttaagaggtgattaggtcattgagatggattaaaggctttctcatgaggctcagttagttctggaatggattcgctcttgcaggaatggatgaattctcacaagagtgggttgttatgaagtgaggatgcttcttgtgttctgttctctttgccctcctcagttcaccatctgctttccaccatgagttgaagcagcatgaggccctcatcagatgggctccctgatcttggactcctcagcctttggactcataagccaaaataaatctgttttctttataa

SEQ ID NO: 6974 - protein, 96 aa, Homo sapiens
MGDKKSPTRPKRQPKPSSDEGYWDCSVCTFRNSAEAFKCMMCDVRKGTSTRSTLFEVIVSASRTKEPLKFPISGRDNRKRAWLPFGGTILLAQASA

SEQ ID NO: 6975 - DNA, 4095 bp, Homo sapiens
attatcctccttattgacaaacagagcggtcgcggcggcgactctcggcgtgcggtgatagccaagccatgggagacaagaagagccccaccaggccgaagcggcagccgaagccgtcctcggatgagggttactgggactgtagcgtctgcaccttccggaacagcgccgaggccttcaagtgcatgatgtgcgatgtgcggaagggcacctccacccggaaacctcgacctgtctcccagttggttgcacagcaggttactcagcagtttgtgcctcctacacagtcaaagaaagagaaaaaagataaagtagaaaaagaaaaaagtgaaaaggaaacaactagcaaaaagaatagccataagaaaaccaggccaagattgaaaaatgtggatcggagtagtgctcagcatttggaagttactgttggagatctgacagtcattattacagactttaaggagaaaacaaagtcaccgcctgcatctagtgctgcttctgcagatcaacacagtcaaagcggctctagctctgataacacagagagaggaatgtccaggtcatcttcacccagaggagaagcctcatcattgaatggagaatctcattaaagtttattttctccaatttcttagtcacttctgtcctaccatgcaaatacacagattatgccaagaggtaccacattttcatgacagatacattcatgcacaatccataatttgagttttacataaaatagaaatttgttagaatttgttagattttattgcaatgatgcctaccaaacatttccagacttaacattttggtctctgcagttaagtgccatgaaaatgtggttgaattattcattatgcagtgttattggtaagtgtattttcacttttagtttagtgaattctaacacataattcttgaattctctactattggcatgtaacgaatttaaattttttataacatagtgcaagctgcctaaatatgtattatttgagaattgtgaaacagatagttatatgtatacaagtcaaagaacaacttaactattgctgcaacaggtttttcttaatggttatcctcttaaatacacctgctggtacttggtgtggttaaataggaaaattgttattaaataaagaatttgtatgaacctttgccaatgtttttgacacgttttactaattattgttcctgaattatgtttctggttttatctattttttgaggtttttttgtttgcttatttttcaaaacattcatttattgtaatgtttactagcggactagtaaacaataaaacattgattatttagctttataattcaggtttagtgctattgtcattgaacactggtattttctgtatcatataaaacattaaaattcaaataattataagcatttggcaaaaacaagagaaaagaaacttgccatattttacaagctgcaattttagaaaagctttaacttaatgatagttttatcattgttttcttgtcccaaacttatccagggccatagaagtatgaatctaattaaaacagaaatgggaattattgcacagaaatgggaaataactaattttaaatcagtcaaattggcttcttattaaatacaataattcttatgaaaatcatagtaccctattttcagacacagctgccagtttacacatttctcagtatcctgaaaggaaaaaagtatagccccacttatactatgtaaaattaccaataaaatatttttatgactacagattttgcatttttgtttacaactatttaaagagttttatgttgtatttagaatttcaacctagaaaccacacagtacttaaattctcctggggtctcctgctttctcttaaccatttgcttaatatatatctacctaaaggagacttctgaattgtaaatgaacttaaaaatagaatgtggatgcaaaatatcacataagacatcatgataacatttgaagaaaaaataaaactgtagaccctaacagttgtgatatttggtggtttcatgtggtaatgtaattttctgtttaattacagtactttttacaggcacagtggtactgtcttttttgtaagatgctagttgtgaaatacaattaattgcatacagtaaaagtctgtgattaaaacatttatatacctcattctttagtgttgttaaatgaaaaattaaaatttgtgtttattataagatactttcaatggaataccagctaaccagatatgttcctttaaaacatgaatttttttgtcttattctgtttttaacatgtttcaaatgttttatacatttttggagatagtaaaaatttaaaaatgtaatagggaaaatatttaatttttaagtcaaaaactatgctttaaaggaattacatcttatgatcaaataactttcaggatgtattttaaatgagctgcaagagagaaaaatctgacaggagatgggattttacctgaatggagcatactcatatttctacataggtgggaagatactcatctttctacatagacgggaacacggtgtagcatggagattaagcgtgctaactgacacctcatgtttgaatcctgttgtagaatggaaatgagcttaaattacccaagcttactttccatctataaaacagggctaataatggtaatcacatctaatttatagggtttttgggaggattaagtcaatccgtgtaaaattcttaattatctgacacatactggtcactcagtaaatgtgagcttttaccattgttataggtaaaatcccattacaaaaatacaaaaatattttttgtaacagttattttcctgccctcttggatgacctaaagtaatagtgttttatagatttcactaaattttcagtgtaatatcagatgttttctctggatgcagaaagaccatctttccataattaaagaacctggtgggtgtgcactatgagattggagaaatgaattaagttgacttgaaattattttacttttattaatcacaggtatctcaacctgcctttgtttcaccctacttcaagtacacttccacaccaggaaaacagacccaaattccataaacagaactgacgttaaaatatgcgaaagattcagaacctaggtttagggtacatgtttttctctgtttcatgaacttacagtgtggtttgagcactgggttcttttagccaaattccatacaaaaagaatttggatgttttccagcatttattaccttactttgctataagtaagagtgaagataggccgggtgtgatggctcatgccagtaatcccagcactttgggctgaagcaggcagatattttgagcccaggaccagcctgggcaacatggtgaaagctcatctctatgaaaaaatttgaatatacatatatatatatatgtatatttaaaaagtgaatataatttgaggcacagaagaatattcttaaaaccttttgtattatacaatagaaataaaggttttatttttattaaatgctttcctaaaatgatagtggataatagacaaagtgaaaacatttaaaaaggaagagaaacttcagcctttctaagttgatagcatgtttattaacttttagataaagatccttatagactgaaagaatgtagcctctgcattaatggtaaatggtctagaagttttcgtttccactgaggcttccgccactcgcttttttaaacttcctgctatggtttggatatggtttgtcctcaccaaaactcatgctgaggcctgagtccccagtttgattgtgttggtaggtggtgcctttaagaggtgattaggtcattgagatggattaaaggctttctcatgaggctcagttagttctggaatggattcgctcttgcaggaatggatgaattctcacaagagtgggttgttatgaagtgaggatgcttcttgtgttctgttctctttgccctcctcagttcaccatctgctttccaccatgagttgaagcagcatgaggccctcatcagatgggctccctgatcttggactcctcagcctttggactcataagccaaaataaatctgttttctttataa

SEQ ID NO: 6976 - protein, 180 aa, Homo sapiens; identical to SEQ ID NO: 956

SEQ ID NO: 6977 - DNA, 4424 bp, Homo sapiens
gcttccgcccggcttattatcctccttattgacaaacagagcggtcgcggcggcgactctcggcgtgcggtgatagccaagccatgggagacaagaagagccccaccaggccgaagcggcagccgaagccgtcctcggatgagggttactgggactgtagcgtctgcaccttccggaacagcgccgaggccttcaagtgcatgatgtgcgatgtgcggaagggcacctccacccgtacatctaagctcttgtagatccaatttttagtggtggaaacattacttgaggaggactcagagaagcattgtcatttggattgaaactgaagaggctctgggcaactcaccagaaatctaagggacactgtgttcctgaaaatccacattgtttgaagttattgtgagtgcctcgaggaccaaggaaccgttgaaatttccaatttcaggaagttccagtggatgcccatcaggaagattctcatgctgaacagaagggcaagagaggtggatctgtgagggaaaagacccaataggataactcaagttactggaaacctcgacctgtctcccagttggttgcacagcaggttactcagcagtttgtgcctcctacacagtcaaagaaagagaaaaaagataaagtagaaaaagaaaaaagtgaaaaggaaacaactagcaaaaagaatagccataagaaaaccaggccaagattgaaaaatgtggatcggagtagtgctcagcatttggaagttactgttggagatctgacagtcattattacagactttaaggagaaaacaaagtcaccgcctgcatctagtgctgcttctgcagatcaacacagtcaaagcggctctagctctgataacacagagagaggaatgtccaggtcatcttcacccagaggagaagcctcatcattgaatggagaatctcattaaagtttattttctccaatttcttagtcacttctgtcctaccatgcaaatacacagattatgccaagaggtaccacattttcatgacagatacattcatgcacaatccataatttgagttttacataaaatagaaatttgttagaatttgttagattttattgcaatgatgcctaccaaacatttccagacttaacattttggtctctgcagttaagtgccatgaaaatgtggttgaattattcattatgcagtgttattggtaagtgtattttcacttttagtttagtgaattctaacacataattcttgaattctctactattggcatgtaacgaatttaaattttttataacatagtgcaagctgcctaaatatgtattatttgagaattgtgaaacagatagttatatgtatacaagtcaaagaacaacttaactattgctgcaacaggtttttcttaatggttatcctcttaaatacacctgctggtacttggtgtggttaaataggaaaattgttattaaataaagaatttgtatgaacctttgccaatgtttttgacacgttttactaattattgttcctgaattatgtttctggttttatctattttttgaggtttttttgtttgcttatttttcaaaacattcatttattgtaatgtttactagcggactagtaaacaataaaacattgattatttagctttataattcaggtttagtgctattgtcattgaacactggtattttctgtatcatataaaacattaaaattcaaataattataagcatttggcaaaaacaagagaaaagaaacttgccatattttacaagctgcaattttagaaaagctttaacttaatgatagttttatcattgttttcttgtcccaaacttatccagggccatagaagtatgaatctaattaaaacagaaatgggaattattgcacagaaatgggaaataactaattttaaatcagtcaaattggcttcttattaaatacaataattcttatgaaaatcatagtaccctattttcagacacagctgccagtttacacatttctcagtatcctgaaaggaaaaaagtatagccccacttatactatgtaaaattaccaataaaatatttttatgactacagattttgcatttttgtttacaactatttaaagagttttatgttgtatttagaatttcaacctagaaaccacacagtacttaaattctcctggggtctcctgctttctcttaaccatttgcttaatatatatctacctaaaggagacttctgaattgtaaatgaacttaaaaatagaatgtggatgcaaaatatcacataagacatcatgataacatttgaagaaaaaataaaactgtagaccctaacagttgtgatatttggtggtttcatgtggtaatgtaattttctgtttaattacagtactttttacaggcacagtggtactgtcttttttgtaagatgctagttgtgaaatacaattaattgcatacagtaaaagtctgtgattaaaacatttatatacctcattctttagtgttgttaaatgaaaaattaaaatttgtgtttattataagatactttcaatggaataccagctaaccagatatgttcctttaaaacatgaatttttttgtcttattctgtttttaacatgtttcaaatgttttatacatttttggagatagtaaaaatttaaaaatgtaatagggaaaatatttaatttttaagtcaaaaactatgctttaaaggaattacatcttatgatcaaataactttcaggatgtattttaaatgagctgcaagagagaaaaatctgacaggagatgggattttacctgaatggagcatactcatatttctacataggtgggaagatactcatctttctacatagacgggaacacggtgtagcatggagattaagcgtgctaactgacacctcatgtttgaatcctgttgtagaatggaaatgagcttaaattacccaagcttactttccatctataaaacagggctaataatggtaatcacatctaatttatagggtttttgggaggattaagtcaatccgtgtaaaattcttaattatctgacacatactggtcactcagtaaatgtgagcttttaccattgttataggtaaaatcccattacaaaaatacaaaaatattttttgtaacagttattttcctgccctcttggatgacctaaagtaatagtgttttatagatttcactaaattttcagtgtaatatcagatgttttctctggatgcagaaagaccatctttccataattaaagaacctggtgggtgtgcactatgagattggagaaatgaattaagttgacttgaaattattttacttttattaatcacaggtatctcaacctgcctttgtttcaccctacttcaagtacacttccacaccaggaaaacagacccaaattccataaacagaactgacgttaaaatatgcgaaagattcagaacctaggtttagggtacatgtttttctctgtttcatgaacttacagtgtggtttgagcactgggttcttttagccaaattccatacaaaaagaatttggatgttttccagcatttattaccttactttgctataagtaagagtgaagataggccgggtgtgatggctcatgccagtaatcccagcactttgggctgaagcaggcagatattttgagcccaggaccagcctgggcaacatggtgaaagctcatctctatgaaaaaatttgaatatacatatatatatatatgtatatttaaaaagtgaatataatttgaggcacagaagaatattcttaaaaccttttgtattatacaatagaaataaaggttttatttttattaaatgctttcctaaaatgatagtggataatagacaaagtgaaaacatttaaaaaggaagagaaacttcagcctttctaagttgatagcatgtttattaacttttagataaagatccttatagactgaaagaatgtagcctctgcattaatggtaaatggtctagaagttttcgtttccactgaggcttccgccactcgcttttttaaacttcctgctatggtttggatatggtttgtcctcaccaaaactcatgctgaggcctgagtccccagtttgattgtgttggtaggtggtgcctttaagaggtgattaggtcattgagatggattaaaggctttctcatgaggctcagttagttctggaatggattcgctcttgcaggaatggatgaattctcacaagagtgggttgttatgaagtgaggatgcttcttgtgttctgttctctttgccctcctcagttcaccatctgctttccaccatgagttgaagcagcatgaggccctcatcagatgggctccctgatcttggactcctcagcctttggactcataagccaaaataaatctgttttctttataa

SEQ ID NO: 6978 - protein, 56 aa, Homo sapiens
MGDKKSPTRPKRQPKPSSDEGYWDCSVCTFRNSAEAFKCMMCDVRKGTSTRTSKLL

SEQ ID NO: 6979 - DNA, 2225 bp, Homo sapiens
attgacaaacagagcggtcgcggcggcgactctcggcgtgcggtgatagccaagccatgggagacaagaagagccccaccaggccgaagcggcagccgaagccgtcctcggatgagggttactgggactgtagcgtctgcaccttccggaacagcgccgaggccttcaagtgcatgatgtgcgatgtgcggaagggcacctccacccgatccacattgtttgaagttattgtgagtgcctcgaggaccaaggaaccgttgaaatttccaatttcaggaaggaaacctcgacctgtctcccagttggttgcacagcaggttactcagcagtttgtgcctcctacacagtcaaagaaagagaaaaaagataaagtagaaaaagaaaaaagtgaaaaggaaacaactagcaaaaagaatagccataagaaaaccaggccaagattgaaaaatgtggatcggagtagtgctcagcatttggaagttactgttggagatctgacagtcattattacagactttaaggagaaaacaaagtcaccgcctgcatctagtgctgcttctgcagatcaacacagtcaaagcggctctagctctgataacacagagagaggaatgtccaggtcatcttcacccagaggagaagcctcatcattgaatggagaatctcattaaagtttattttctccaatttcttagtcacttctgtcctaccatgcaaatacacagattatgccaagaggtaccacattttcatgacagatacattcatgcacaatccataatttgagttttacataaaatagaaatttgttagaatttgttagattttattgcaatgatgcctaccaaacatttccagacttaacattttggtctctgcagttaagtgccatgaaaatgtggttgaattattcattatgcagtgttattggtaagtgtattttcacttttagtttagtgaattctaacacataattcttgaattctctactattggcatgtaacgaatttaaattttttataacatagtgcaagctgcctaaatatgtattatttgagaattgtgaaacagatagttatatgtatacaagtcaaagaacaacttaactattgctgcaacaggtttttcttaatggttatcctcttaaatacacctgctggtacttggtgtggttaaataggaaaattgttattaaataaagaatttgtatgaacctttgccaatgtttttgacacgttttactaattattgttcctgaattatgtttctggttttatctattttttgaggtttttttgtttgcttatttttcaaaacattcatttattgtaatgtttactagcggactagtaaacaataaaacattgattatttagctttataattcaggtttagtgctattgtcattgaacactggtattttctgtatcatataaaacattaaaattcaaataattataagcatttggcaaaaacaagagaaaagaaacttgccatattttacaagctgcaattttagaaaagctttaacttaatgatagttttatcattgttttcttgtcccaaacttatccagggccatagaagtatgaatctaattaaaacagaaatgggaattattgcacagaaatgggaaataactaattttaaatcagtcaaattggcttcttattaaatacaataattcttatgaaaatcatagtaccctattttcagacacagctgccagtttacacatttctcagtatcctgaaaggaaaaaagtatagccccacttatactatgtaaaattaccaataaaatatttttatgactacagattttgcatttttgtttacaactatttaaagagttttatgttgtatttagaatttcaacctagaaaccacacagtacttaaattctcctggggtctcctgctttctcttaaccatttgcttaatatatatctacctaaaggagacttctgaattgtaaatgaacttaaaaatagaatgtggatgcaaaatatcacataagacatcatgataacatttgaagaaaaaataaaactgtagaccctaacagttgtgatatttggtggtttcatgtggtaatgtaattttctgtttaattacagtactttttacaggcacagtggtactgtcttttttgtaagatgctagttgtgaaatacaattaattgcatacagtaaaagtctgtgattaaaacatttatatacctc

SEQ ID NO: 6980 - protein, 204 aa, Homo sapiens
MGDKKSPTRPKRQPKPSSDEGYWDCSVCTFRNSAEAFKCMMCDVRKGTSTRSTLFEVIVSASRTKEPLKFPISGRKPRPVSQLVAQQVTQQFVPPTQSKKEKKDKVEKEKSEKETTSKKNSHKKTRPRLKNVDRSSAQHLEVTVGDLTVIITDFKEKTKSPPASSAASADQHSQSGSSSDNTERGMSRSSSPRGEASSLNGESH

SEQ ID NO: 6981 - DNA, 2165 bp, Homo sapiens
attatcctccttattgacaaacagagcggtcgcggcggcgactctcggcgtgcggtgatagccaagccatgggagacaagaagagccccaccaggccgaagcggcagccgaagccgtcctcggatgagggttactgggactgtagcgtctgcaccttccggaacagcgccgaggccttcaagtgcatgatgtgcgatgtgcggaagggcacctccacccggaaacctcgacctgtctcccagttggttgcacagcaggttactcagcagtttgtgcctcctacacagtcaaagaaagagaaaaaagataaagtagaaaaagaaaaaagtgaaaaggaaacaactagcaaaaagaatagccataagaaaaccaggccaagattgaaaaatgtggatcggagtagtgctcagcatttggaagttactgttggagatctgacagtcattattacagactttaaggagaaaacaaagtcaccgcctgcatctagtgctgcttctgcagatcaacacagtcaaagcggctctagctctgataacacagagagaggaatgtccaggtcatcttcacccagaggagaagcctcatcattgaatggagaatctcattaaagtttattttctccaatttcttagtcacttctgtcctaccatgcaaatacacagattatgccaagaggtaccacattttcatgacagatacattcatgcacaatccataatttgagttttacataaaatagaaatttgttagaatttgttagattttattgcaatgatgcctaccaaacatttccagacttaacattttggtctctgcagttaagtgccatgaaaatgtggttgaattattcattatgcagtgttattggtaagtgtattttcacttttagtttagtgaattctaacacataattcttgaattctctactattggcatgtaacgaatttaaattttttataacatagtgcaagctgcctaaatatgtattatttgagaattgtgaaacagatagttatatgtatacaagtcaaagaacaacttaactattgctgcaacaggtttttcttaatggttatcctcttaaatacacctgctggtacttggtgtggttaaataggaaaattgttattaaataaagaatttgtatgaacctttgccaatgtttttgacacgttttactaattattgttcctgaattatgtttctggttttatctattttttgaggtttttttgtttgcttatttttcaaaacattcatttattgtaatgtttactagcggactagtaaacaataaaacattgattatttagctttataattcaggtttagtgctattgtcattgaacactggtattttctgtatcatataaaacattaaaattcaaataattataagcatttggcaaaaacaagagaaaagaaacttgccatattttacaagctgcaattttagaaaagctttaacttaatgatagttttatcattgttttcttgtcccaaacttatccagggccatagaagtatgaatctaattaaaacagaaatgggaattattgcacagaaatgggaaataactaattttaaatcagtcaaattggcttcttattaaatacaataattcttatgaaaatcatagtaccctattttcagacacagctgccagtttacacatttctcagtatcctgaaaggaaaaaagtatagccccacttatactatgtaaaattaccaataaaatatttttatgactacagattttgcatttttgtttacaactatttaaagagttttatgttgtatttagaatttcaacctagaaaccacacagtacttaaattctcctggggtctcctgctttctcttaaccatttgcttaatatatatctacctaaaggagacttctgaattgtaaatgaacttaaaaatagaatgtggatgcaaaatatcacataagacatcatgataacatttgaagaaaaaataaaactgtagaccctaacagttgtgatatttggtggtttcatgtggtaatgtaattttctgtttaattacagtactttttacaggcacagtggtactgtcttttttgtaagatgctagttgtgaaatacaattaattgcatacagtaaaagtctgtgattaaaacatttatatacctc

SEQ ID NO: 6982 - protein, 180 aa, Homo sapiens; identical to SEQ ID NO: 956

SEQ ID NO: 6983 - DNA, 2494 bp, Homo sapiens
gcttccgcccggcttattatcctccttattgacaaacagagcggtcgcggcggcgactctcggcgtgcggtgatagccaagccatgggagacaagaagagccccaccaggccgaagcggcagccgaagccgtcctcggatgagggttactgggactgtagcgtctgcaccttccggaacagcgccgaggccttcaagtgcatgatgtgcgatgtgcggaagggcacctccacccgtacatctaagctcttgtagatccaatttttagtggtggaaacattacttgaggaggactcagagaagcattgtcatttggattgaaactgaagaggctctgggcaactcaccagaaatctaagggacactgtgttcctgaaaatccacattgtttgaagttattgtgagtgcctcgaggaccaaggaaccgttgaaatttccaatttcaggaagttccagtggatgcccatcaggaagattctcatgctgaacagaagggcaagagaggtggatctgtgagggaaaagacccaataggataactcaagttactggaaacctcgacctgtctcccagttggttgcacagcaggttactcagcagtttgtgcctcctacacagtcaaagaaagagaaaaaagataaagtagaaaaagaaaaaagtgaaaaggaaacaactagcaaaaagaatagccataagaaaaccaggccaagattgaaaaatgtggatcggagtagtgctcagcatttggaagttactgttggagatctgacagtcattattacagactttaaggagaaaacaaagtcaccgcctgcatctagtgctgcttctgcagatcaacacagtcaaagcggctctagctctgataacacagagagaggaatgtccaggtcatcttcacccagaggagaagcctcatcattgaatggagaatctcattaaagtttattttctccaatttcttagtcacttctgtcctaccatgcaaatacacagattatgccaagaggtaccacattttcatgacagatacattcatgcacaatccataatttgagttttacataaaatagaaatttgttagaatttgttagattttattgcaatgatgcctaccaaacatttccagacttaacattttggtctctgcagttaagtgccatgaaaatgtggttgaattattcattatgcagtgttattggtaagtgtattttcacttttagtttagtgaattctaacacataattcttgaattctctactattggcatgtaacgaatttaaattttttataacatagtgcaagctgcctaaatatgtattatttgagaattgtgaaacagatagttatatgtatacaagtcaaagaacaacttaactattgctgcaacaggtttttcttaatggttatcctcttaaatacacctgctggtacttggtgtggttaaataggaaaattgttattaaataaagaatttgtatgaacctttgccaatgtttttgacacgttttactaattattgttcctgaattatgtttctggttttatctattttttgaggtttttttgtttgcttatttttcaaaacattcatttattgtaatgtttactagcggactagtaaacaataaaacattgattatttagctttataattcaggtttagtgctattgtcattgaacactggtattttctgtatcatataaaacattaaaattcaaataattataagcatttggcaaaaacaagagaaaagaaacttgccatattttacaagctgcaattttagaaaagctttaacttaatgatagttttatcattgttttcttgtcccaaacttatccagggccatagaagtatgaatctaattaaaacagaaatgggaattattgcacagaaatgggaaataactaattttaaatcagtcaaattggcttcttattaaatacaataattcttatgaaaatcatagtaccctattttcagacacagctgccagtttacacatttctcagtatcctgaaaggaaaaaagtatagccccacttatactatgtaaaattaccaataaaatatttttatgactacagattttgcatttttgtttacaactatttaaagagttttatgttgtatttagaatttcaacctagaaaccacacagtacttaaattctcctggggtctcctgctttctcttaaccatttgcttaatatatatctacctaaaggagacttctgaattgtaaatgaacttaaaaatagaatgtggatgcaaaatatcacataagacatcatgataacatttgaagaaaaaataaaactgtagaccctaacagttgtgatatttggtggtttcatgtggtaatgtaattttctgtttaattacagtactttttacaggcacagtggtactgtcttttttgtaagatgctagttgtgaaatacaattaattgcatacagtaaaagtctgtgattaaaacatttatatacctc

SEQ ID NO: 6984 - protein, 56 aa, Homo sapiens; identical to SEQ ID NO: 6978

SEQ ID NO: 6985 - DNA, 2203 bp, Homo sapiens
aagttattgtgagtgcctcgaggaccaaggaaccgttgaaatttccaatttcaggaagttccagtggatgcccatcaggaagattctcatgctgaacagaagggcaagagaggtggatctgtgagggaaaagacccaataggataactcaagttactgagataacaggaagagagcctggttaccatttggtggaacaatcctgctggctcaagcctctgcctagaaatttgggtcattctcttttttggacagtctggaaacctcgacctgtctcccagttggttgcacagcaggttactcagcagtttgtgcctcctacacagtcaaagaaagagaaaaaagataaagtagaaaaagaaaaaagtgaaaaggaaacaactagcaaaaagaatagccataagaaaaccaggccaagattgaaaaatgtggatcggagtagtgctcagcatttggaagttactgttggagatctgacagtcattattacagactttaaggagaaaacaaagtcaccgcctgcatctagtgctgcttctgcagatcaacacagtcaaagcggctctagctctgataacacagagagaggaatgtccaggtcatcttcacccagaggagaagcctcatcattgaatggagaatctcattaaagtttattttctccaatttcttagtcacttctgtcctaccatgcaaatacacagattatgccaagaggtaccacattttcatgacagatacattcatgcacaatccataatttgagttttacataaaatagaaatttgttagaatttgttagattttattgcaatgatgcctaccaaacatttccagacttaacattttggtctctgcagttaagtgccatgaaaatgtggttgaattattcattatgcagtgttattggtaagtgtattttcacttttagtttagtgaattctaacacataattcttgaattctctactattggcatgtaacgaatttaaattttttataacatagtgcaagctgcctaaatatgtattatttgagaattgtgaaacagatagttatatgtatacaagtcaaagaacaacttaactattgctgcaacaggtttttcttaatggttatcctcttaaatacacctgctggtacttggtgtggttaaataggaaaattgttattaaataaagaatttgtatgaacctttgccaatgtttttgacacgttttactaattattgttcctgaattatgtttctggttttatctattttttgaggtttttttgtttgcttatttttcaaaacattcatttattgtaatgtttactagcggactagtaaacaataaaacattgattatttagctttataattcaggtttagtgctattgtcattgaacactggtattttctgtatcatataaaacattaaaattcaaataattataagcatttggcaaaaacaagagaaaagaaacttgccatattttacaagctgcaattttagaaaagctttaacttaatgatagttttatcattgttttcttgtcccaaacttatccagggccatagaagtatgaatctaattaaaacagaaatgggaattattgcacagaaatgggaaataactaattttaaatcagtcaaattggcttcttattaaatacaataattcttatgaaaatcatagtaccctattttcagacacagctgccagtttacacatttctcagtatcctgaaaggaaaaaagtatagccccacttatactatgtaaaattaccaataaaatatttttatgactacagattttgcatttttgtttacaactatttaaagagttttatgttgtatttagaatttcaacctagaaaccacacagtacttaaattctcctggggtctcctgctttctcttaaccatttgcttaatatatatctacctaaaggagacttctgaattgtaaatgaacttaaaaatagaatgtggatgcaaaatatcacataagacatcatgataacatttgaagaaaaaataaaactgtagaccctaacagttgtgatatttggtggtttcatgtggtaatgtaattttctgtttaattacagtactttttacaggcacagtggtactgtcttttttgtaagatgctagttgtgaaatacaattaattgcatacagtaaaagtctgtgattaaaacatttatatacctc

SEQ ID NO: 6986 - protein, 46 aa, Homo sapiens
MIVLSLFSCPKLIQGHRSMNLIKTEMGIIAQKWEITNFKSVKLASY

SEQ ID NO: 6987 - DNA, 2380 bp, Homo sapiens
ggtcgcggcggcgactctcggcgtgcggtgatagccaagccatgggagacaagaagagccccaccaggccgaagcggcagccgaagccgtcctcggatgagggttactgggactgtagcgtctgcaccttccggaacagcgccgaggccttcaagtgcatgatgtgcgatgtgcggaagggcacctccacccgatccacattgtttgaagttattgtgagtgcctcgaggaccaaggaaccgttgaaatttccaatttcaggaagagataacaggaagagagcctggttaccatttggtggaacaatcctgctggctcaagcctctgcctagaaatttgggtcattctcttttttggacagtctgcttctaaattactttaattgaagagcttcccaagattcaaggtgaatttaaagttaaaagattgtcatttgaaacctcgacctgtctcccagttggttgcacagcaggttactcagcagtttgtgcctcctacacagtcaaagaaagagaaaaaagataaagtagaaaaagaaaaaagtgaaaaggaaacaactagcaaaaagaatagccataagaaaaccaggccaagattgaaaaatgtggatcggagtagtgctcagcatttggaagttactgttggagatctgacagtcattattacagactttaaggagaaaacaaagtcaccgcctgcatctagtgctgcttctgcagatcaacacagtcaaagcggctctagctctgataacacagagagaggaatgtccaggtcatcttcacccagaggagaagcctcatcattgaatggagaatctcattaaagtttattttctccaatttcttagtcacttctgtcctaccatgcaaatacacagattatgccaagaggtaccacattttcatgacagatacattcatgcacaatccataatttgagttttacataaaatagaaatttgttagaatttgttagattttattgcaatgatgcctaccaaacatttccagacttaacattttggtctctgcagttaagtgccatgaaaatgtggttgaattattcattatgcagtgttattggtaagtgtattttcacttttagtttagtgaattctaacacataattcttgaattctctactattggcatgtaacgaatttaaattttttataacatagtgcaagctgcctaaatatgtattatttgagaattgtgaaacagatagttatatgtatacaagtcaaagaacaacttaactattgctgcaacaggtttttcttaatggttatcctcttaaatacacctgctggtacttggtgtggttaaataggaaaattgttattaaataaagaatttgtatgaacctttgccaatgtttttgacacgttttactaattattgttcctgaattatgtttctggttttatctattttttgaggtttttttgtttgcttatttttcaaaacattcatttattgtaatgtttactagcggactagtaaacaataaaacattgattatttagctttataattcaggtttagtgctattgtcattgaacactggtattttctgtatcatataaaacattaaaattcaaataattataagcatttggcaaaaacaagagaaaagaaacttgccatattttacaagctgcaattttagaaaagctttaacttaatgatagttttatcattgttttcttgtcccaaacttatccagggccatagaagtatgaatctaattaaaacagaaatgggaattattgcacagaaatgggaaataactaattttaaatcagtcaaattggcttcttattaaatacaataattcttatgaaaatcatagtaccctattttcagacacagctgccagtttacacatttctcagtatcctgaaaggaaaaaagtatagccccacttatactatgtaaaattaccaataaaatatttttatgactacagattttgcatttttgtttacaactatttaaagagttttatgttgtatttagaatttcaacctagaaaccacacagtacttaaattctcctggggtctcctgctttctcttaaccatttgcttaatatatatctacctaaaggagacttctgaattgtaaatgaacttaaaaatagaatgtggatgcaaaatatcacataagacatcatgataacatttgaagaaaaaataaaactgtagaccctaacagttgtgatatttggtggtttcatgtggtaatgtaattttctgtttaattacagtactttttacaggcacagtggtactgtcttttttgtaagatgctagttgtgaaatacaattaattgcatacagtaaaagtctgtgattaaaacatttatatacctc

SEQ ID NO: 6988 - protein, 96 aa, Homo sapiens; identical to SEQ ID NO: 6974
